(19) United States
(12) Patent Application Publication
(10) Pub. No.: US 2015/0141320 A1
(43) Pub. Date: May 21, 2015

(54) COMPOSITIONS AND METHODS FOR MODULATING GENE EXPRESSION

(71) Applicants: RaNA Therapeutics, Inc., Cambridge, MA (US); The General Hospital Corporation d/b/a Massachusetts General Hospital, Boston, MA (US)

(72) Inventors: Arthur M. Krieg, Cambridge, MA (US); Romesh Subramanian, Framingham, MA (US); James McSwiggen, Arlington, MA (US); Jeannie T. Lee, Boston, MA (US)

(73) Assignees: RaNA Therapeutics, Inc., Cambridge, MA (US); The General Hospital Corporation d/b/a Massachusetts General Hospital, Boston, MA (US)

(21) Appl. No.: 14/401,248

(22) PCT Filed: May 16, 2013
(86) PCT No.: PCT/US2013/041437

§ 371 Date: Nov. 14, 2014

Related U.S. Application Data
(60) Provisional application No. 61/648,077, filed on May 16, 2012.

(51) Int. Cl. C12N 15/113; A61K 47/48; A61K 48/00; A61K 31/7088

(52) U.S. Cl. CPC C12N 15/113; A61K 31/7088; A61K 47/48246; A61K 47/48023; A61K 48/00; C12N 2310/11; C12N 2310/321; C12N 2310/3231; C12N 2310/315
USPC 514/1.1; 536/22.1; 514/44 A; 435/375

(57) ABSTRACT

Aspects of the invention provide single stranded oligonucleotides for activating or enhancing expression of a target gene. Further aspects provide compositions and kits comprising single stranded oligonucleotides for activating or enhancing expression of a target gene. Methods for modulating expression of a target gene using the single stranded oligonucleotides are also provided. Further aspects of the invention provide methods for selecting a candidate oligonucleotide for activating or enhancing expression of a target gene.

### CROSS-REFERENCE TO RELATED APPLICATIONS

[0001] This application claims the benefit under 35 U.S.C. §119(e) of U.S. Provisional Application No. 61/648,077, entitled, “COMPOSITIONS AND METHODS FOR MODULATING GENE EXPRESSION”, filed on May 16, 2012, the contents of which are incorporated herein by reference in their entirety.

### FIELD OF THE INVENTION

[0002] The invention relates to oligonucleotide based compositions, as well as methods of using oligonucleotide based compositions for treating disease.

### BACKGROUND OF THE INVENTION

[0003] Transcriptome analyses have suggested that, although only 1-2% of the mammalian genome is protein coding, 70-90% is transcriptionally active. Recent discoveries argue that a subset of these non-protein coding transcripts play crucial roles in epigenetic regulation. In spite of their ubiquity, the structure and function of many of such transcripts remains uncharacterized. Recent studies indicate that some long non-coding RNAs function as an epigenetic regulator/RNA cofactor in chromatin remodeling through interactions with Polycomb repressor complex 2 (PRC2) and thus function to regulate gene expression.

### SUMMARY OF THE INVENTION

[0004] Aspects of the invention disclosed herein provide methods and compositions that are useful for upregulating expression of a target gene in cells. In some embodiments, single stranded oligonucleotides are provided that target a PRC2-associated region of a target gene encoding a protein of interest. In some embodiments, single stranded oligonucleotides are provided that target a PRC2-associated region of a target gene (e.g., a human gene) and thereby cause upregulation of the gene. In some embodiments, these single stranded oligonucleotides activate or enhance expression of a target gene by relieving or preventing PRC2 mediated repression of the target gene. In some embodiments, the target gene is listed in Table 4. In some embodiments, these single stranded oligonucleotides activate or enhance expression of a target gene to treat a disease associated with reduced expression of the target gene. In some embodiments, the disease associated with reduced expression of the target gene is listed is Table 4. In some embodiments, a phenotype associated with the disease is referred to in Table 4 by an OMIM identification number.

[0005] Further aspects of the invention provide methods for selecting oligonucleotides for activating or enhancing expression of a target. In some embodiments, the target gene may be a target gene listed in Table 4, such as ABCA4, ABCB11, ABCB4, ABCG5, ABCG8, ALB, APOE, EPO, F7, GCH1, HBA2, IL6, KCNMA1, KCNMB1, KCNMB2, KCNMB3, KCNMB4, KLF1, KLF4, MSX2, MYBPC3, NF1, NKX2-1, NKX2-1-AS1, RPS14, RPS19, SCARB1, TSIX, or XIST. In some embodiments, methods are provided for selecting a set of oligonucleotides that is enriched in candidates (e.g., compared with a random selection of oligonucleotides) for activating or enhancing expression of a target. Accordingly, the methods may be used to establish sets of clinical candidates that are enriched in oligonucleotides that activate or enhance expression of a target. Such libraries may be utilized, for example, to identify lead oligonucleotides for developing therapeutics to treat a disease associated with reduced expression of the target gene. In some embodiments, the disease associated with reduced expression of the target gene is listed is Table 4 or otherwise disclosed herein. Furthermore, in some embodiments, oligonucleotide chemistries are provided that are useful for controlling the pharmacokinetics, biodistribution, bioavailability and/or efficacy of the single stranded oligonucleotides for activating expression of a target gene.

[0006] According to some aspects of the invention single stranded oligonucleotides are provided that have a region of complementarity that is complementarty with (e.g., at least 8 consecutive nucleotides of) a PRC2-associated region of a target gene listed in Table 4, e.g., a PRC2-associated region of the nucleotide sequence set forth as any one of SEQ ID NOS: 1-114.

[0007] According to some aspects of the invention single stranded oligonucleotides are provided that have a region of complementarity that is complementarty with (e.g., at least 8 consecutive nucleotides of) a PRC2-associated region of a target gene listed in Table 4, e.g., a PRC2-associate region of the nucleotide sequence set forth as SEQ ID NO: 1, 2, 5, 6, 9, 10, 13, 14, 17, 18, 21, 22, 25, 26, 29, 30, 33, 34, 37, 38, 43, 44, 45, 46, 49, 50, 53, 54, 57, 58, 61, 62, 65, 66, 69, 70, 73, 74, 77, 78, 81, 82, 85, 86, 89, 90, 93, 94, 95, 96, 99, 100, 103, 104, 107, 108, 111, or 112. In some embodiments, the oligonucleotide has at least one of the following features: a) a sequence that is 5′X-Y-Z, in which X is any nucleotide and in which X is at the 5′ end of the oligonucleotide, Y is a nucleotide sequence of 6 nucleotides in length that is not a human seed sequence of a microRNA, and Z is a nucleotide sequence of 1 to 23 nucleotides in length; b) a sequence that does not comprise three or more consecutive guanosine nucleotides; c) a sequence that has less than a threshold level of sequence identity with every sequence of nucleotides, of equivalent length to the second nucleotide sequence, that are between 50 kilobases upstream of a 5′-end of an off-target gene and 50 kilobases downstream of a 3′-end of the off-target gene; d) a sequence that is complementary to a PRC2-associated region that encodes an RNA that forms a secondary structure comprising at least two single stranded loops; and e) a sequence that has greater than 60% G-C content. In some embodiments, the single stranded oligonucleotide has at least two of features a), b), c), d), and e), each independently selected. In some embodiments, the single stranded oligonucleotide has at least three of features a), b), c), d), and e), each independently selected. In some embodiments, the single stranded oligonucleotide has at least four of features a), b), c), d), and e), each independently selected. In some embodiments, the single stranded oligonucleotide has each of features a), b), c), d), and e). In certain embodiments, the oligonucleotide has the sequence 5′X-Y-Z, in which the oligonucleotide is 8-50 nucleotides in length.

[0008] According to some aspects of the invention, single stranded oligonucleotides are provided that have a sequence X-Y-Z, in which X is any nucleotide, Y is a nucleotide sequence of 6 nucleotides in length that is not a seed sequence of a human microRNA, and Z is a nucleotide sequence of 1 to 23 nucleotides in length, in which the single stranded oligonucleotide is complementary with a PRC2-associated region of a target gene listed in Table 4, e.g., a PRC2-associated region of the nucleotide sequence set forth as SEQ ID NO: 1, 2, 5, 6, 9, 10, 13, 14, 17, 18, 21, 22, 25, 26, 29, 30, 33, 34, 37, 38, 43, 44, 45, 46, 49, 50, 53, 54, 57, 58, 61, 62, 65, 66, 69, 70, 73, 74, 77, 78, 81, 82, 85, 86, 89, 90, 93, 94, 95, 96, 99, 100, 103, 104, 107, 108, 111, or 112. In some aspects of the invention, single stranded oligonucleotides are provided that have a sequence 5′-X-Y-Z, in which X is any nucleotide, Y is a nucleotide sequence of 6 nucleotides in length that is not a seed sequence of a human microRNA, and Z is a nucleotide sequence of 1 to 23 nucleotides in length, in which the single stranded oligonucleotide is complementary with at least 8 consecutive nucleotides of a PRC2-associated region of a target gene listed in Table 4, e.g., a PRC2-associated region of the nucleotide sequence set forth as SEQ ID NO: 1, 2, 5, 6, 9, 10, 13, 14, 17, 18, 21, 22, 25, 26, 29, 30, 33, 34, 37, 38, 43, 44, 45, 46, 49, 50, 53, 54, 57, 58, 61, 62, 65, 66, 69, 70, 73, 74, 77, 78, 81, 82, 85, 86, 89, 90, 93, 94, 95, 96, 99, 100, 103, 104, 107, 108, 111, or 112. In some embodiments, Y is a sequence selected from Table 1. In some embodiments, the PRC2-associated region is a sequence listed in any one of SEQ ID NOS: 115 to 1406.

[0009] In some embodiments, the single stranded oligonucleotide comprises a nucleotide sequence as set forth in any one of SEQ ID NOS: 1407 to 1098802 or 1098805 to 2142811, or a fragment thereof that is at least 8 nucleotides. In some embodiments, the single stranded oligonucleotide comprises a nucleotide sequence as set forth in any one of SEQ ID NOS: 1407 to 1098802 or 1098805 to 2142811, in which the 5′ end of the nucleotide sequence provided is the 5′ end of the oligonucleotide. In some embodiments, the region of complementarity (e.g., the at least 8 consecutive nucleotides) is also present within the nucleotide sequence set forth as SEQ ID NO: 3, 4, 7, 8, 11, 12, 15, 16, 19, 20, 23, 24, 27, 28, 31, 32, 35, 36, 39, 40, 41, 42, 47, 48, 51, 52, 55, 56, 59, 60, 63, 64, 67, 68, 71, 72, 75, 76, 79, 80, 83, 84, 87, 88, 91, 92, 97, 98, 101, 102, 105, 106, 109, 110, 113, or 114.

[0010] In some embodiments, the single stranded oligonucleotide comprises a nucleotide sequence as set forth in any one of SEQ ID NOS: 1407 to 1098802 or 1098805 to 2142811. In some embodiments, the single stranded oligonucleotide comprises a fragment of at least 8 nucleotides of a nucleotide sequence as set forth in any one of SEQ ID NOS: 1407 to 1098802 or 1098805 to 2142811.

[0011] In some embodiments, the PRC2-associated region is a sequence listed in any one of SEQ ID NOS: 115 to 1406. In some embodiments, the single stranded oligonucleotide comprises a nucleotide sequence as set forth in Table 2 or a fragment thereof that is at least 8 nucleotides. In some embodiments, the single stranded oligonucleotide comprises a nucleotide sequence as set forth in Table 2, wherein the 5′ end of the nucleotide sequence provided in Table 2 is the 5′ end of the oligonucleotide. In some embodiments, the at least 8 consecutive nucleotides are also present within the nucleotide sequence set forth as SEQ ID NO: 3, 7, 11, 15, 19, 23, 27, 31, 35, 39, 41, 47, 51, 55, 59, 63, 67, 71, 75, 79, 83, 87, 91, 97, 101, 105, 109, or 113.

[0012] In some embodiments, the PRC2-associated region is a sequence listed in any one of SEQ ID NOS: 115 to 1406. In some embodiments, the single stranded oligonucleotide comprises a nucleotide sequence as set forth in any one of SEQ ID NOS: 1407 to 587247 or 1098805 to 1674759 or a fragment thereof that is at least 8 nucleotides. In some embodiments, the single stranded oligonucleotide comprises a nucleotide sequence as set forth in SEQ ID NOS: 1407 to 587247 or 1098805 to 1674759, wherein the 5′ end of the nucleotide sequence provided in SEQ ID NOS: 1407 to 587247 or 1098805 to 1674759 is the 5′ end of the oligonucleotide. In some embodiments, the at least 8 consecutive nucleotides are present within the nucleotide sequence set forth as SEQ ID NO: 4, 8, 12, 16, 20, 24, 28, 32, 36, 40, 42, 48, 52, 56, 60, 64, 68, 72, 76, 80, 84, 88, 92, 98, 102, 106, 110, or 114.

[0013] In some embodiments, the single stranded oligonucleotide comprises a nucleotide sequence as set forth in any one of SEQ ID NOS: 587248 to 1098802 or 1674760 to 2142811 or a fragment thereof that is at least 8 nucleotides. In some embodiments, the single stranded oligonucleotide comprises a nucleotide sequence as set forth in SEQ ID NOS: 587248 to 1098802 or 1674760 to 2142811, wherein the 5′ end of the nucleotide sequence provided in SEQ ID NOS: 587248 to 1098802 or 1674760 to 2142811 is the 5′ end of the oligonucleotide. In some embodiments, the at least 8 consecutive nucleotides are present within the nucleotide sequence set forth as SEQ ID NO: 4, 8, 12, 16, 20, 24, 28, 32, 36, 40, 42, 48, 52, 56, 60, 64, 68, 72, 76, 80, 84, 88, 92, 98, 102, 106, 110, or 114. In some embodiments, the single stranded oligonucleotide does not comprise three or more consecutive guanosine nucleotides. In some embodiments, the single stranded oligonucleotide does not comprise four or more consecutive guanosine nucleotides.

[0014] In some embodiments, the single stranded oligonucleotide is 8 to 30 nucleotides in length. In some embodiments, the single stranded oligonucleotide is up to 50 nucleotides in length. In some embodiments, the single stranded oligonucleotide is 8 to 10 nucleotides in length and all but 1, 2, or 3 of the nucleotides of the complementary sequence of the PRC2-associated region are cytosine or guanosine nucleotides.

[0015] In some embodiments, the single stranded oligonucleotide is complementary with at least 8 consecutive nucleotides of a PRC2-associated region of a target gene listed in Table 4, e.g., a PRC2-associated region of a nucleotide sequence set forth as SEQ ID NO: 1, 2, 5, 6, 9, 10, 13, 14, 17, 18, 21, 22, 25, 26, 29, 30, 33, 34, 37, 38, 43, 44, 45, 46, 49, 50, 53, 54, 57, 58, 61, 62, 65, 66, 69, 70, 73, 74, 77, 78, 81, 82, 85, 86, 89, 90, 93, 94, 95, 96, 99, 100, 103, 104, 107, 108, 111, or 112, in which the nucleotide sequence of the single stranded oligonucleotide comprises one or more of a nucleotide sequence selected from the group consisting of

[0016] (a) (X)Xxxxxx, (X)xXxxxx, (X)xxXxxx, (X)xxxXxx, (X)xxxxXx and (X)xxxxxX,

[0017] (b) (X)XXxxxx, (X)XxXxxx, (X)XxxXxx, (X)XxxxXx, (X)XxxxxX, (X)xXXxxx, (X)xXxXxx, (X)xXxxXx, (X)xXxxxX, (X)xxXXxx, (X)xxXxXx, (X)xxXxxX, (X)xxxXXx, (X)xxxXxX and (X)xxxxXX,

[0018] (c) (X)XXXxxx, (X)xXXXxx, (X)xxXXXx, (X)xxxXXX, (X)XXxXxx, (X)XXxxXx, (X)XXxxxX, (X)xXXxXx, (X)xXXxxX, (X)xxXXxX, (X)XxXXxx, (X)XxxXXx (X)XxxxXX, (X)xXxXXx, (X)xXxxXX, (X)xxXxXX, (X)xXxXxX and (X)XxXxXx,

[0019] (d) (X)xxXXX, (X)xXxXXX, (X)xXXxXX, (X)xXXXxX, (X)xXXXXx, (X)XxxXXXX, (X)XxXxXX, (X)XxXXxX, (X)XxXXx, (X)XXxxXX, (X)XXxXxX, (X)XXxXXx, (X)XXXxxX, (X)XXXxXx, and (X)XXXXxx,

[0020] (e) (X)xXXXXX, (X)XxXXXX, (X)XXxXXX, (X)XXXxXX, (X)XXXXxX and (X)XXXXXx, and

[0021] (f) XXXXXX, XxXXXXX, XXxXXXX, XXXxXXX, XXXXxXX, XXXXXxX and XXXXXXx, wherein “X” denotes a nucleotide analogue, (X) denotes an optional nucleotide analogue, and “x” denotes a DNA or RNA nucleotide unit.

[0022] In some embodiments, at least one nucleotide of the oligonucleotide is a nucleotide analogue. In some embodiments, the at least one nucleotide analogue results in an increase in Tm of the oligonucleotide in a range of 1 to 5° C. compared with an oligonucleotide that does not have the at least one nucleotide analogue.

[0023] In some embodiments, at least one nucleotide of the oligonucleotide comprises a 2′ O-methyl. In some embodiments, each nucleotide of the oligonucleotide comprises a 2′ O-methyl. In some embodiments, the oligonucleotide comprises at least one ribonucleotide, at least one deoxyribonucleotide, or at least one bridged nucleotide. In some embodiments, the bridged nucleotide is a LNA nucleotide, a cEt nucleotide or a ENA modified nucleotide. In some embodiments, each nucleotide of the oligonucleotide is a LNA nucleotide.

[0024] In some embodiments, the nucleotides of the oligonucleotide comprise alternating deoxyribonucleotides and 2′-fluoro-deoxyribonucleotides. In some embodiments, the nucleotides of the oligonucleotide comprise alternating deoxyribonucleotides and 2′-O-methyl nucleotides. In some embodiments, the nucleotides of the oligonucleotide comprise alternating deoxyribonucleotides and ENA nucleotide analogues. In some embodiments, the nucleotides of the oligonucleotide comprise alternating deoxyribonucleotides and LNA nucleotides. In some embodiments, the 5′ nucleotide of the oligonucleotide is a deoxyribonucleotide. In some embodiments, the nucleotides of the oligonucleotide comprise alternating LNA nucleotides and 2′-O-methyl nucleotides. In some embodiments, the 5′ nucleotide of the oligonucleotide is a LNA nucleotide. In some embodiments, the nucleotides of the oligonucleotide comprise deoxyribonucleotides flanked by at least one LNA nucleotide on each of the 5′ and 3′ ends of the deoxyribonucleotides.

[0025] In some embodiments, the single stranded oligonucleotide comprises modified internucleotide linkages (e.g., phosphorothioate internucleotide linkages or other linkages) between at least two, at least three, at least four, at least five or more nucleotides. In some embodiments, the single stranded oligonucleotide comprises modified internucleotide linkages (e.g., phosphorothioate internucleotide linkages or other linkages) between all nucleotides.

[0026] In some embodiments, the nucleotide at the 3′ position of the oligonucleotide has a 3′ hydroxyl group. In some embodiments, the nucleotide at the 3′ position of the oligonucleotide has a 3′ thiophosphate. In some embodiments, the single stranded oligonucleotide has a biotin moiety or other moiety conjugated to its 5′ or 3′ nucleotide. In some embodiments, the single stranded oligonucleotide has cholesterol, Vitamin A, folate, sigma receptor ligands, aptamers, peptides, such as CPP, hydrophobic molecules, such as lipids, ASGPR or dynamic polyconjugates and variants thereof at its 5′ or 3′ end.

[0027] According to some aspects of the invention compositions are provided that comprise any of the oligonucleotides disclosed herein, and a carrier. In some embodiments, compositions are provided that comprise any of the oligonucleotides in a buffered solution. In some embodiments, the oligonucleotide is conjugated to the carrier. In some embodiments, the carrier is a peptide. In some embodiments, the carrier is a steroid. According to some aspects of the invention pharmaceutical compositions are provided that comprise any of the oligonucleotides disclosed herein, and a pharmaceutically acceptable carrier.

[0028] According to other aspects of the invention, kits are provided that comprise a container housing any of the compositions disclosed herein.

[0029] According to some aspects of the invention, methods of increasing expression of a target gene in a cell are provided. In some embodiments, the methods involve delivering any one or more of the single stranded oligonucleotides disclosed herein into the cell. In some embodiments, delivery of the single stranded oligonucleotide into the cell results in a level of expression of a target gene that is greater (e.g., at least 50% greater) than a level of expression of the target gene in a control cell that does not comprise the single stranded oligonucleotide.

[0030] According to some aspects of the invention, methods of increasing levels of a target gene in a subject are provided. According to some aspects of the invention, methods of treating a condition (e.g., a disease listed in Table 4 or otherwise disclosed herein) associated with decreased levels of the target gene in a subject are provided. In some embodiments, the methods involve administering any one or more of the single stranded oligonucleotides disclosed herein to the subject. In some embodiments, the target gene is ABCA4, ABCB11, ABCB4, ABCG5, ABCG8, ALB, APOE, EPO, F7, GCH1, HBA2, IL6, KCNMA1, KCNMB1, KCNMB2, KCNMB3, KCNMB4, KLF1, KLF4, MSX2, MYBPC3, NF1, NKX2-1, NKX2-1-AS1, RPS14, RPS19, SCARB1, TSIX, or XIST.

### BRIEF DESCRIPTION OF TABLES

[0031] Table 1: Hexamers that are not seed sequences of human miRNAs

[0032] Table 2: Oligonucleotide sequences made for testing in the lab. RQ (column 2) and RQ SE (column 3) shows the activity of the oligo relative to a control well (usually carrier alone) and the standard error or the triplicate replicates of the experiment. [oligo] is shown in nanomolar for in vitro experiments and in milligrams per kilogram of body weight for in vivo experiments. The Formatted Sequence column shows the sequence of the modified nucleotides, where lnaX represents an LNA nucleotide with 3′ phosphorothioate linkage, omeX is a 2′-O-methyl nucleotide, dX is a deoxy nucleotide. An s at the end of a nucleotide code indicates that the nucleotide had a 3′ phosphorothioate linkage. The “-Sup” at the end of the sequence marks the fact that the 3′ end lacks either a phosphate or thiophosphate on the 3′ linkage.

[0033] Table 3: A listing of oligonucleotide modifications

[0034] Table 4: Target Genes and Related Diseases

[0035] Table 5: Cell lines

### DETAILED DESCRIPTION OF CERTAIN EMBODIMENTS OF THE INVENTION

[0036] Aspects of the invention provided herein relate to the discovery of polycomb repressive complex 2 (PRC2)-interacting RNAs. Polycomb repressive complex 2 (PRC2) is a histone methyltransferase and a known epigenetic regulator involved in silencing of genomic regions through methylation of histone H3. Among other functions, PRC2 interacts with long noncoding RNAs (lncRNAs), such as RepA, Xist, and Tsix, to catalyze trimethylation of histone H3-lysine27. PRC2 contains four subunits, Eed, Suz12, RbAp48, and Ezh2. Aspects of the invention relate to the recognition that single stranded oligonucleotides that bind to PRC2-associated regions of RNAs (e.g., lncRNAs) that are expressed from within a genomic region that encompasses or that is in functional proximity to the target gene can induce or enhance expression of the target gene. In some embodiments, this upregulation is believed to result from inhibition of PRC2 mediated repression of the target gene.

[0037] As used herein, the term “PRC2-associated region” refers to a region of a nucleic acid that comprises or encodes a sequence of nucleotides that interact directly or indirectly with a component of PRC2. A PRC2-associated region may be present in a RNA (e.g., a long non-coding RNA (lncRNA)) that that interacts with a PRC2. A PRC2-associated region may be present in a DNA that encodes an RNA that interacts with PRC2. In some cases, the PRC2-associated region is equivalently referred to as a PRC2-interacting region. In some embodiments, a PRC2-associated region is a region of an RNA that crosslinks to a component of PRC2 in response to in situ ultraviolet irradiation of a cell that expresses the RNA, or a region of genomic DNA that encodes that RNA region. In some embodiments, a PRC2-associated region is a region of an RNA that immunoprecipitates with an antibody that targets a component of PRC2, or a region of genomic DNA that encodes that RNA region. In some embodiments, a PRC2-associated region is a region of an RNA that immunoprecipitates with an antibody that binds specifically to SUZ12, EED, EZH2 or RBBP4 (which as noted above are components of PRC2), or a region of genomic DNA that encodes that RNA region.

[0038] In some embodiments, a PRC2-associated region is a region of an RNA that is protected from nucleases (e.g., RNases) in an RNA-immunoprecipitation assay that employs an antibody that targets a component of PRC2, or a region of genomic DNA that encodes that protected RNA region. In some embodiments, a PRC2-associated region is a region of an RNA that is protected from nucleases (e.g., RNases) in an RNA-immunoprecipitation assay that employs an antibody that targets SUZ12, EED, EZH2 or RBBP4, or a region of genomic DNA that encodes that protected RNA region.

[0039] In some embodiments, a PRC2-associated region is a region of an RNA within which occur a relatively high frequency of sequence reads in a sequencing reaction of products of an RNA-immunoprecipitation assay that employs an antibody that targets a component of PRC2, or a region of genomic DNA that encodes that RNA region. In some embodiments, a PRC2-associated region is a region of an RNA within which occur a relatively high frequency of sequence reads in a sequencing reaction of products of an RNA-immunoprecipitation assay that employs an antibody that binds specifically to SUZ12, EED, EZH2 or RBBP4, or a region of genomic DNA that encodes that protected RNA region. In such embodiments, the PRC2-associated region may be referred to as a “peak.”

[0040] In some embodiments, a PRC2-associated region comprises a sequence of 40 to 60 nucleotides that interact with PRC2 complex. In some embodiments, a PRC2-associated region comprises a sequence of 40 to 60 nucleotides that encode an RNA that interacts with PRC2. In some embodiments, a PRC2-associated region comprises a sequence of up to 5 kb in length that comprises a sequence (e.g., of 40 to 60 nucleotides) that interacts with PRC2. In some embodiments, a PRC2-associated region comprises a sequence of up to 5 kb in length within which an RNA is encoded that has a sequence (e.g., of 40 to 60 nucleotides) that is known to interact with PRC2. In some embodiments, a PRC2-associated region comprises a sequence of about 4 kb in length that comprise a sequence (e.g., of 40 to 60 nucleotides) that interacts with PRC2. In some embodiments, a PRC2-associated region comprises a sequence of about 4 kb in length within which an RNA is encoded that includes a sequence (e.g., of 40 to 60 nucleotides) that is known to interact with PRC2. In some embodiments, a PRC2-associated region has a sequence as set forth in any one of SEQ ID NOS: 115 to 1406.

[0041] In some embodiments, single stranded oligonucleotides are provided that specifically bind to, or are complementary to, a PRC2-associated region in a genomic region that encompasses or that is in proximity to the target gene. In some embodiments, single stranded oligonucleotides are provided that specifically bind to, or are complementary to, a PRC2-associated region that has a sequence as set forth in any one of SEQ ID NOS: 115 to 1406. In some embodiments, single stranded oligonucleotides are provided that specifically bind to, or are complementary to, a PRC2-associated region that has a sequence as set forth in any one of SEQ ID NOS: 115 to 1406 combined with up to 2 kb, up to 5 kb, or up to 10 kb of flanking sequences from a corresponding genomic region to which these SEQ IDs map (e.g., in a human genome). In some embodiments, single stranded oligonucleotides have a sequence as set forth in any one of SEQ ID NOS: 1407 to 1098802 or 1098805 to 2142811. In some embodiments, single stranded oligonucleotides have a sequence as set forth in Table 2.

[0042] Without being bound by a theory of invention, these oligonucleotides are able to interfere with the binding of and function of PRC2, by preventing recruitment of PRC2 to a specific chromosomal locus. For example, a single administration of single stranded oligonucleotides designed to specifically bind a PRC2-associated region lncRNA can stably displace not only the lncRNA, but also the PRC2 that binds to the lncRNA, from binding chromatin. After displacement, the full complement of PRC2 is not recovered for up to 24 hours. Further, lncRNA can recruit PRC2 in a cis fashion, repressing gene expression at or near the specific chromosomal locus from which the lncRNA was transcribed.

[0043] Methods of modulating gene expression are provided, in some embodiments, that may be carried out in vitro, ex vivo, or in vivo. It is understood that any reference to uses of compounds throughout the description contemplates use of the compound in preparation of a pharmaceutical composition or medicament for use in the treatment of condition (e.g., a disease listed in Table 4 or otherwise disclosed herein) associated with decreased levels or activity of the target gene. Thus, as one nonlimiting example, this aspect of the invention includes use of such single stranded oligonucleotides in the preparation of a medicament for use in the treatment of disease, wherein the treatment involves upregulating expression of a target gene.

[0044] In further aspects of the invention, methods are provided for selecting a candidate oligonucleotide for activating expression of a target gene. The methods generally involve selecting as a candidate oligonucleotide, a single stranded oligonucleotide comprising a nucleotide sequence that is complementary to a PRC2-associated region (e.g., a nucleotide sequence as set forth in any one of SEQ ID NOS: 115 to 1406). In some embodiments, sets of oligonucleotides may be selected that are enriched (e.g., compared with a random selection of oligonucleotides) in oligonucleotides that activate expression of a target gene.

TABLE 4
Target Genes and Related Diseases

| Gene | | | OMIM Phenotype |
|---|---|---|---|
| name | Protein name | Disease or Biological Process | number |
| ABCA4 | ATP-binding | Cone-rod dystrophy, Fundus | 604116, 248200, |
| | cassette, sub-family | flavimaculatus, Age-related | 153800, 248200, |
| | A (ABC1), member 4 | macular degeneration, Retinal | 601718 |
| | | dystrophy, Early-onset severe | |
| | | Retinitis pigmentosa, and | |
| | | Stargardt disease | |
| ABCB11 | ATP-binding | Cholestasis, primary sclerosing | 605479, 601847 |
| | cassette, sub-family | cholangitis and biliary cirrhosis | |
| | B (MDR/TAP), | | |
| | member 11 | | |
| ABCB4 | ATP-binding | Cholestasis, primary sclerosing | 147480, 602347, |
| | cassette, sub-family | cholangitis, gall bladder disease, | 600803 |
| | B (MDR/TAP), | and biliary cirrhosis | |
| | member 4 | | |
| ABCG5 | ATP-binding | Cholestasis, primary sclerosing | 147480, 602347, |
| | cassette, sub-family | cholangitis, sitosterolemia and | 210250 |
| | G (WHITE), | biliary cirrhosis | |
| | member 5 | | |
| ABCG8 | ATP-binding | Cholestasis, primary sclerosing | 147480, 602347, |
| | cassette, sub-family | cholangitis, sitosterolemia and | 611465, 210250 |
| | G (WHITE), | biliary cirrhosis | |
| | member 8 | | |
| ALB | albumin | liver disease, nephrotic syndrome, | |
| | | renal disease, and analbuminemia | |
| APOE | apolipoprotein E | dyslipidemia, atherosclerosis, | 104310, 611771, |
| | | Alzheimer disease, Lipoprotein | 269600 |
| | | glomerulopathy, and Sea-blue | |
| | | histiocyte disease | |
| EPO | erythropoietin | erythropoiesis and anemia | |
| F7 | coagulation factor | coronary heart disease, bleeding | 227500 |
| | VII (serum | disorders (coagulopathy), e.g., | |
| | prothrombin | Factor VII deficiency, congenital | |
| | conversion | protein C deficiency, diseminated | |
| | accelerator) | intravascular coagulation, | |
| | | hemophilia A, hemophilia B, von | |
| | | willebrand disease and idiopathic | |
| | | thrombocytopenic purpura | |
| GCH1 | GTP cyclohydrolase 1 | gtp cyclohydrolase i deficiency, | 128230, 233910 |
| | | Parkinson's disease, movement | |
| | | disorders, CNS disease, dopa- | |
| | | responsive dystonia, | |
| | | hyperpehnylalaninemia, and | |
| | | atypical | |
| | | severe phenylketonuria | |
| HBA2 | hemoglobin, alpha 2 | alpha thalassemia and Heinz body | 604131, 140700 |
| | | anemia | |
| IL6 | interleukin 6 | infectious disease, vaccination, | |
| | (interferon, beta 2) | and cancer | |
| KCNMA1 | potassium large | vascular disease, kidney disease, | |
| | conductance | Obesity, Type 2 Diabetes, | |
| | calcium-activated | inflammatory disease, autoimmune | |
| | channel, subfamily | disease, and cancer, e.g. kidney, | |
| | M, alpha member 1 | lung, or ovarian cancer | |
| KCNMB1 | potassium large | vascular disease, kidney disease, | |
| | conductance | Obesity, Type 2 Diabetes, | |
| | calcium-activated | inflammatory disease, autoimmune | |
| | channel, subfamily | disease, and cancer, e.g. kidney, | |
| | M, beta member 1 | lung, or ovarian cancer | |
| KCNMB2 | potassium large | vascular disease, kidney disease, | |
| | conductance | Obesity, Type 2 Diabetes, | |
| | calcium-activated | inflammatory disease, autoimmune | |
| | channel, subfamily | disease, and cancer, e.g. kidney, | |
| | M, beta member 2 | lung, or ovarian cancer | |
| KCNMB3 | potassium large | vascular disease, kidney disease, | |
| | conductance | Obesity, Type 2 Diabetes, | |
| | calcium-activated | inflammatory disease, autoimmune | |
| | channel, subfamily | disease, and cancer, e.g. kidney, | |
| | M beta member 3 | lung, or ovarian cancer | |
| KCNMB4 | potassium large | vascular disease, kidney disease, | |
| | conductance | Obesity, Type 2 Diabetes, | |
| | calcium-activated | inflammatory disease, autoimmune | |
| | channel, subfamily | disease, and cancer, e.g. kidney, | |
| | M, beta member 4 | lung, or ovarian cancer | |
| KLF1 | Kruppel-like factor | thallasemia, sickle cell disease, | 613673 |
| | 1 (erythroid) | and anemia | |
| KLF4 | Kruppel-like factor | tissue regeneration and cancer, e.g. | |
| | 4 (gut) | squamous cell esophageal cancer, | |
| | | colon cancer, familial | |
| | | adenomatous polyposis, colorectal | |
| | | cancer, gastric cancer, and | |
| | | pancreatic cancer | |
| MSX2 | homolog of muscle | tooth agenesis (dentin dysplasia), | 604757, 168500 |
| | segment homeobox 2 | developmental disorders e.g. | |
| | | Craniosynostosis and Parietal | |
| | | foramina | |
| MYBPC3 | myosin binding | Thrombosis secondary | 115200, 115197 |
| | protein C, cardiac | prevention/treatment, | |
| | | Cardiomyopathy, hypertrophy, | |
| | | heart failure | |
| NF1 | neurofibromin 1 | neurofibromatosis and cancer, e.g., | 613113 |
| | | neurofibrosarcoma, malignant | |
| | | peripheral nerve sheath tumors, | |
| | | and myelomonocytic leukemia | |
| NKX2-1 | NK2 homeobox 1 | cancer, e.g., lung cancer | |
| NKX2-1- | NKX2-1 antisense | cardiac disease and malformation, | |
| AS1 | RNA 1 (non-protein | developmental diseases, | |
| | coding) | generation of pacreatic islet cells | |
| | | or stem cells, stem cell and cellular | |
| | | reprogramming, diseases of | |
| | | neuroendocrine differentiation | |
| RPS14 | ribosomal protein | 5q syndrome (myelodysplastic | 153550 |
| | S14 | syndrome) | |
| RPS19 | ribosomal protein | Diamond-Blackfan anemia | 105650 |
| | S19 | | |
| SCARB1 | scavenger receptor | dyslipidemia, atherosclerosis | |
| | class B, member 1 | | |
| TSIX | TSIX transcript, | cancer | |
| | XIST antisense | | |
| | RNA (non-protein | | |
| | coding) | | |
| XIST | X (inactive)-specific | X-inactivation | 300087 |
| | transcript (non- | | |
| | protein coding) | | |

*Online Mendelian Inheritance in Man ® An Online Catalog of Human Genes and Genetic Disorders (omim.org)

### Target Genes and Related Disease and Biological Pathways

[0045] Cancer—tsix, IL6, KCNMA1, KCNMB1, KCNMB2, KCNMB3, KCNMB4, NF1, nkx2-1

[0046] Cancer is a broad group of various diseases, all involving unregulated cell growth. In cancer, cells divide and grow uncontrollably, forming malignant tumors, and invade nearby parts of the body. The cancer may also spread to more distant parts of the body through the lymphatic system or bloodstream. Tumor suppressor genes are genes which inhibit cell division and survival. Malignant transformation can occur through the formation of novel oncogenes, the inappropriate over-expression of normal oncogenes, or by the under-expression or disabling of tumor suppressor genes. Several genes, many classified as tumor suppressors, are down-regulated during cancer progression, and have roles in inhibiting genomic instability, metabolic processes, immune response, cell growth/cell cycle progression, migration, and/or survival e.g., Tsix, IL6, KCNMA1, KCNMB1, KCNMB2, KCNMB3, KCNMB4, NF1 and NKX2-1. These cellular processes are important for blocking tumor progression.

[0047] Aspects of the invention disclosed herein provide methods and compositions that are useful for upregulating Tsix, IL6, KCNMA1, KCNMB1, KCNMB2, KCNMB3, KCNMB4, NF1 and NKX2-1 for the treatment and/or prevention of diseases associated with reduced Tsix, IL6, KCNMA1, KCNMB1, KCNMB2, KCNMB3, KCNMB4, NF1 and NKX2-1 expression or function such as cancer. For example, aspects of the invention disclosed herein provide methods and compositions that are useful for upregulating KCNMA1, KCNMB1, KCNMB2, KCNMB3, KCNMB4 for the treatment or prevention of kidney, lung, or ovarian cancer. In another example, aspects of the invention disclosed herein provide methods and compositions that are useful for upregulating NF1 for the treatment or prevention of neurofibrosarcoma, malignant peripheral nerve sheath tumors, or myelomonocytic leukemia. In another example, aspects of the invention disclosed herein provide methods and compositions that are useful for upregulating NKX2-1 for the treatment or prevention of lung cancer.

[0048] Examples of cancer include but are not limited to leukemias, lymphomas, myelomas, carcinomas, metastatic carcinomas, sarcomas, adenomas, nervous system cancers and genito-urinary cancers. In some embodiments, the cancer is adult and pediatric acute lymphoblastic leukemia, acute myeloid leukemia, adrenocortical carcinoma, AIDS-related cancers, anal cancer, cancer of the appendix, astrocytoma, basal cell carcinoma, bile duct cancer, bladder cancer, bone cancer, osteosarcoma, fibrous histiocytoma, brain cancer, brain stem glioma, cerebellar astrocytoma, malignant glioma, ependymoma, medulloblastoma, supratentorial primitive neuroectodermal tumors, hypothalamic glioma, breast cancer, male breast cancer, bronchial adenomas, Burkitt lymphoma, carcinoid tumor, carcinoma of unknown origin, central nervous system lymphoma, cerebellar astrocytoma, malignant glioma, cervical cancer, childhood cancers, chronic lymphocytic leukemia, chronic myelogenous leukemia, chronic myeloproliferative disorders, colorectal cancer, cutaneous T-cell lymphoma, endometrial cancer, ependymoma, esophageal cancer, Ewing family tumors, extracranial germ cell tumor, extragonadal germ cell tumor, extrahepatic bile duct cancer, intraocular melanoma, retinoblastoma, gallbladder cancer, gastric cancer, gastrointestinal stromal tumor, extracranial germ cell tumor, extragonadal germ cell tumor, ovarian germ cell tumor, gestational trophoblastic tumor, glioma, hairy cell leukemia, head and neck cancer, hepatocellular cancer, Hodgkin lymphoma, non-Hodgkin lymphoma, hypopharyngeal cancer, hypothalamic and visual pathway glioma, intraocular melanoma, islet cell tumors, Kaposi sarcoma, kidney cancer, renal cell cancer, laryngeal cancer, lip and oral cavity cancer, small cell lung cancer, non-small cell lung cancer, primary central nervous system lymphoma, Waldenstrom macroglobulinema, malignant fibrous histiocytoma, medulloblastoma, melanoma, Merkel cell carcinoma, malignant mesothelioma, squamous neck cancer, multiple endocrine neoplasia syndrome, multiple myeloma, mycosis fungoides, myelodysplastic syndromes, myeloproliferative disorders, chronic myeloproliferative disorders, nasal cavity and paranasal sinus cancer, nasopharyngeal cancer, neuroblastoma, oropharyngeal cancer, ovarian cancer, pancreatic cancer, parathyroid cancer, penile cancer, pharyngeal cancer, pheochromocytoma, pineoblastoma and supratentorial primitive neuroectodermal tumors, pituitary cancer, plasma cell neoplasms, pleuropulmonary blastoma, prostate cancer, rectal cancer, rhabdomyosarcoma, salivary gland cancer, soft tissue sarcoma, uterine sarcoma, Sezary syndrome, non-melanoma skin cancer, small intestine cancer, squamous cell carcinoma, squamous neck cancer, supratentorial primitive neuroectodermal tumors, testicular cancer, throat cancer, thymoma and thymic carcinoma, thyroid cancer, transitional cell cancer, trophoblastic tumors, urethral cancer, uterine cancer, uterine sarcoma, vaginal cancer, vulvar cancer, or Wilms tumor.

### Neurofibromatosis—NF1

[0049] Neurofibromatosis (commonly abbreviated NF; neurofibromatosis type 1 is also known as von Recklinghausen disease) is a genetically-inherited disorder in which the nerve tissue grows tumors (neurofibromas) that may be benign or may cause serious damage by compressing nerves and other tissues. The disorder affects all neural crest cells (Schwann cells, melanocytes and endoneurial fibroblasts). Cellular elements from these cell types proliferate excessively throughout the body, forming tumors; melanocytes also function abnormally in this disease, resulting in disordered skin pigmentation and café au lait spots. The tumors may cause bumps under the skin, colored spots, skeletal problems, pressure on spinal nerve roots, and other neurological problems. Neurofibromatosis is caused in part by mutation in the NF1 gene. Neurofibromin, encoded by the NF1 gene, is a tumor suppressor whose function is to inhibit the p21 ras oncoprotein. In absence of this tumor suppressor's inhibitory control on the ras oncoprotein, cellular proliferation is erratic and uncontrolled, resulting in unbalanced cellular proliferation and tumor development. Aspects of the invention disclosed herein provide methods and compositions that are useful for upregulating NF1 for the treatment and/or prevention of diseases associated with reduced NF1 expression or function such as Neurofibromatosis.

### Eye/Ocular Diseases—ABCA4

[0050] Eye diseases can result in loss of vision and severe impairment of everyday life. Cone-rod dystrophy is an inherited ocular disorder characterized by the loss of cone cells, the photoreceptors responsible for both central and color vision. Age-related macular degeneration (AMD) is a medical condition which usually affects older adults and results in a loss of vision in the center of the visual field (the macula) because of damage to the retina. It occurs in “dry” and “wet” forms. It is a major cause of blindness and visual impairment in older adults (>50 years). Retinitis pigmentosa (RP) is a type of progressive retinal dystrophy, a group of inherited disorders in which abnormalities of the photoreceptors (rods and cones) or the retinal pigment epithelium (RPE) of the retina lead to progressive visual loss. In the progression of symptoms for RP, night blindness generally precedes tunnel vision and eventually blindness. Stargardt disease, or fundus flavimaculatus, is an inherited juvenile macular degeneration that causes progressive vision loss usually to the point of legal blindness.

[0051] ABCA4 is a member of the ATP-binding cassette transporter gene sub-family A (ABC1). The ABCA4 gene transcribes a large retina-specific protein with two transmembrane domains (TMD), two glycosylated extracellular domains (ECD), and two nucleotide-binding domains (NBD). ABCA4 functions as a retinoid flippase and facilitates transfer of N-retinyl-phosphatidylethanolamine (NR-PE), a covalent adduct of all-trans retinaldehyde (ATR) with phosphatidylethanolamine (PE), trapped inside the disk as charged species out to the cytoplasmic surface. The ABCA4 protein is almost exclusively expressed in retina localizing in outer segment disk edges of rod photoreceptors. Removal of NR-PE/ATR is necessary for normal bleach recovery and to mitigate persistent opsin signaling that causes photoreceptors to degenerate. ABCA4 also mitigates long-term effects of accumulation of ATR that results in irreversible ATR binding to a second molecule of ATR and NR-PE to form dihydro-N-retinylidene-N-retinyl-phosphatidyl-ethanolamine (A2PE-H2). A2PE-H2 traps ATR and accumulates in outer segments to further oxidize into N-retinylidene-N-retinyl-phosphatidyl-ethanolamine (A2PE). After diurnal disk-shedding and phagocytosis of outer segment by RPE cells, A2PE is hydrolyzed inside the RPE phagolysosome to form A2E. Accumulation of A2E causes toxicity at the primary RPE level and secondary photoreceptor destruction in macular degenerations. Mutations in ABCA4 are associated with Stargardt disease, fundus flavimaculatus, cone-rod dystrophy, retinitis pigmentosa, and age-related macular degeneration.

[0052] Aspects of the invention disclosed herein provide methods and compositions that are useful for upregulating ABCA4 for the treatment and/or prevention of diseases associated with reduced ABCA4 expression or function such as eye diseases. For example, aspects of the invention disclosed herein provide methods and compositions that are useful for upregulating ABCA4 for the treatment and/or prevention of diseases associated with reduced ABCA4 expression or function such as Stargardt disease, fundus flavimaculatus, cone-rod dystrophy, retinitis pigmentosa, or age-related macular degeneration.

### Cholestasis—ABCB11, ABCB4, ABCG5, and ABCG8

[0053] Cholestasis is a condition where bile cannot flow from the liver to the duodenum. The two basic distinctions are an obstructive type of cholestasis where there is a mechanical blockage in the duct system such as can occur from a gallstone or malignancy and metabolic types of cholestasis which are disturbances in bile formation that can occur because of genetic defects or acquired as a side effect of many medications. Symptoms include pruritus, jaundice, pale stool, and dark urine. Cholestasis can be caused by the autoimmune disease biliary cirrhosis. Primary biliary cirrhosis, often abbreviated PBC, is an autoimmune disease of the liver marked by the slow progressive destruction of the small bile ducts (bile canaliculi) within the liver. When these ducts are damaged, bile builds up in the liver (cholestasis) and over time damages the tissue. This can lead to scarring, fibrosis and cirrhosis. Cholestasis can also be caused by primary sclerosing cholangitis, which is a chronic liver disease caused by progressive inflammation and scarring of the bile ducts of the liver. The inflammation impedes the flow of bile to the gut, which can ultimately lead to liver cirrhosis, liver failure and liver cancer. Mutations in members of the ATP-binding cassette (ABC) transporters are associated with cholestasis.

[0054] ABCB11 encodes an ABC transporter called BSEP (Bile Salt Export Pump), or sPgp (sister of P-glycoprotein). This particular protein is responsible for the transport of taurocholate and other cholate conjugates from hepatocytes (liver cells) to the bile. In humans, the activity of this transporter is the major determinant of bile formation and bile flow. ABCB11 is a gene associated with progressive familial intrahepatic cholestasis type 2. ABCB4 encodes Multidrug resistance protein 3, which is a full transporter and member of the p-glycoprotein family of membrane proteins with phosphatidylcholine as its substrate. ABCB4 is associated with progressive familial intrahepatic cholestasis type 3. ABCG5 encodes the ATP-binding cassette sub-family G member 5 protein. The protein encoded by this gene functions as a half-transporter to limit intestinal absorption and promote biliary excretion of sterols. It is expressed in a tissue-specific manner in the liver, colon, and intestine. ABCG8 encodes the ATP-binding cassette sub-family G member 8 protein. The protein encoded by this gene functions as a half-transporter to limit intestinal absorption and promote biliary excretion of sterols. It is expressed in a tissue-specific manner in the liver, colon, and intestine. This gene is tandemly arrayed on chromosome 2, in a head-to-head orientation with family member ABCG5.

[0055] Aspects of the invention disclosed herein provide methods and compositions that are useful for upregulating ABCB11, ABCB4, ABCG5, and/or ABCG8 for the treatment and/or prevention of diseases associated with reduced ABCB11, ABCB4, ABCG5, and/or ABCG8 expression or function such as cholestasis. Aspects of the invention disclosed herein provide methods and compositions that are useful for upregulating ABCB11, ABCB4, ABCG5, and/or ABCG8 for the treatment and/or prevention of diseases associated with reduced ABCB11, ABCB4, ABCG5, and/or ABCG8 expression or function such as biliary cirrhosis or sclerosing cholangitis.

### Liver Disease—ALB

[0056] Liver disease (also called hepatic disease) refers to damage to or disease of the liver. The symptoms related to liver dysfunction include both physical signs and a variety of symptoms related to digestive problems, blood sugar problems, immune disorders, abnormal absorption of fats, and metabolism problems. Examples of liver disease include Hepatitis, Alcoholic liver disease, Fatty liver disease, Cirrhosis, Primary biliary cirrhosis, Primary sclerosing cholangitis, Budd-Chiari syndrome, transthyretin-related hereditary amyloidosis, and Gilbert's syndrome.

[0057] ALB encodes the Albumin protein, which is a plasma protein essential for maintaining the osmotic pressure needed for proper distribution of body fluids between intravascular compartments and body tissues. Because albumin is made by the liver, decreased serum albumin is associated with liver disease. Albumin has been widely used in patients with liver disease, e.g. cirrhosis, in an attempt to improve circulatory and renal functions. The benefits of albumin infusions in preventing the deterioration in renal function associated with large-volume paracentesis, spontaneous bacterial peritonitis, and established hepatorenal syndrome in conjunction with a vasoconstrictor are well established.

[0058] Aspects of the invention disclosed herein provide methods and compositions that are useful for upregulating ALB for the treatment and/or prevention of diseases associated with reduced ALB expression or function such as liver disease.

### Nephrotic Syndrome—ALB

[0059] Nephrotic syndrome is a nonspecific disorder in which the kidneys are damaged, causing them to leak large amounts of protein from the blood to the urine. It is characterized by proteinuria (>3.5 g/day), hypoalbuminemia, hyperlipidemia and edema. The most common sign is excess fluid in the body due to the serum hypoalbuminemia. ALB encodes the Albumin protein, which is a plasma protein essential for maintaining the osmotic pressure needed for proper distribution of body fluids between intravascular compartments and body tissues. Nephrotic syndrome causes a decrease in albumin levels due to leakage from the blood to the urine.

[0060] Aspects of the invention disclosed herein provide methods and compositions that are useful for upregulating ALB for the treatment and/or prevention of diseases associated with reduced ALB expression or function such as nephrotic syndrome.

### Chronic Kidney Disease—ALB and KCNMA1, KCNMB1, KCNMB2, KCNMB3, KCNMB4

[0061] Chronic kidney disease (CKD), also known as chronic renal disease, is a progressive loss in renal function over a period of months or years. Chronic kidney disease is identified by a blood test for creatinine. Higher levels of creatinine indicate a lower glomerular filtration rate and as a result a decreased capability of the kidneys to excrete waste products. Creatinine levels may be normal in the early stages of CKD, and the condition is discovered if urinalysis (testing of a urine sample) shows that the kidney is allowing the loss of protein or red blood cells into the urine. ALB encodes the Albumin protein, which is a plasma protein essential for maintaining the osmotic pressure needed for proper distribution of body fluids between intravascular compartments and body tissues. CKD can result in lower than normal levels of albumin in the blood.

[0062] Aspects of the invention disclosed herein provide methods and compositions that are useful for upregulating ALB for the treatment and/or prevention of diseases associated with reduced ALB expression or function such as Chronic kidney disease.

[0063] MaxiK (also called Big Potasium (BK)) channels are large conductance, voltage and calcium-sensitive potassium channels which are fundamental to the control of smooth muscle tone and neuronal excitability. In vitro and in vivo studies have provided evidence that MaxiK channels secrete K+ in renal tubules. KCNMA1 (potassium large conductance calcium-activated channel, subfamily M, alpha member 1) is an alpha subunit of MaxiK channels. The beta subunit, KCNMB (Calcium-activated potassium channel subunit beta), can be made up of any of the four alternative beta subunits: KCNMB1, KCNMB2, KCNMB3, and KCNMB4.

[0064] Aspects of the invention disclosed herein provide methods and compositions that are useful for upregulating KCNMA1, KCNMB1, KCNMB2, KCNMB3, and/or KCNMB4 for the treatment and/or prevention of diseases associated with reduced KCNMA1, KCNMB1, KCNMB2, KCNMB3, and/or KCNMB4 expression or function such as chronic kidney disease.

### Dyslipidemias and Atherosclerosis—APOE and SCARB1

[0065] Accumulation of lipids in the blood can cause a variety of conditions and diseases, e.g. dyslipidemia and atherosclerosis. Atherosclerosis in particular is the leading cause of death in industrialized societies, making prevention and treatment a high public health concern. Low-density lipoprotein (LDL) is a major transporter of fat molecules, e.g., cholesterol, in the blood stream that delivers fat molecules to cells. High-density lipoprotein (HDL) is another transporter of fat molecules that moves lipids, e.g. cholesterol, from cells to the liver. High levels of LDL are associated with health problems such as dyslipidemia and atherosclerosis, while HDL is protective against atherosclerosis and is involved in maintenance of cholesterol homeostasis.

[0066] Dyslipidemia generally describes a condition when an abnormal amount of lipids is present in the blood. Hyperlipidemia, which accounts for the majority of dyslipidemias, refers to an abnormally high amount of lipids in the blood. Hyperlipidemia is often associated with hormonal diseases such as diabetes, hypothyroidism, metabolic syndrome, and Cushing syndrome. Examples of common lipids in dyslipidemias include triglycerides like cholesterol and fat. Abnormal amounts lipids or lipoproteins in the blood can lead to atherosclerosis, heart disease, and stroke.

[0067] Atherosclerosic diseases, e.g. coronary artery disease (CAD) and myocardial infarction (MI), involve a thickening of artery walls caused by accumulation of fat in the blood, most commonly cholesterol. This thickening is thought to be the result of chronic inflammation of arteriole walls due to accumulation of LDLs in the vessel walls. LDL molecules can become oxidized once inside vessel walls, resulting in cell damage and recruitment of immune cells like macrophages to absorb the oxidized LDL. Once macrophages internalize oxidized LDL, they become saturated with cholesterol and are referred to as foam cells. Smooth muscle cells are then recruited and form a fibrous region. These processes eventually lead to formation of plaques block arteries and can cause heart attack and stroke. HDL is capable of transporting cholesterol from foam cells to the liver, which aids in inhibition of inflammation and plaque formation.

[0068] Apolipoprotein E (APOE) is a class of apolipoprotein found in the chylomicron and Intermediate-density lipoprotein (IDLs) that binds to a specific receptor on liver cells and peripheral cells. It is essential for the normal catabolism of triglyceride-rich lipoprotein constituents. APOE is 299 amino acids long and transports lipoproteins, fat-soluble vitamins, and cholesterol into the lymph system and then into the blood. It is synthesized principally in the liver, but has also been found in other tissues such as the brain, kidneys, and spleen. Mutations in APOE, specifically the E4 allele, are associated with atherosclerosis. Genetic deficiency of APOE in mouse models results in formation of atherosclerotic lesions and/or dyslipidemia.

[0069] Aspects of the invention disclosed herein provide methods and compositions that are useful for upregulating APOE for the treatment and/or prevention of diseases associated with reduced APOE expression or function such as dyslipidemia or atherosclerosis.

[0070] Scavenger receptor class B member 1 (SCARB1) is a protein that in humans is encoded by the SCARB1 gene. SCARB1 functions as a receptor for high-density lipoprotein. It is best known for its role in facilitating the uptake of cholesteryl esters from high-density lipoproteins in the liver. This process drives the movement of cholesterol from peripheral tissues towards the liver for excretion. This movement of cholesterol is known as reverse cholesterol transport and is a protective mechanism against the development of atherosclerosis and dyslipidemia.

[0071] Aspects of the invention disclosed herein provide methods and compositions that are useful for upregulating SCARB1 for the treatment and/or prevention of diseases associated with reduced SCARB1 expression or function such as dyslipidemia or atherosclerosis.

### Alzheimer Disease—APOE

[0072] Alzheimer's disease (AD) is the most common form of dementia. There is no cure for the disease, which worsens as it progresses, and eventually leads to death. Apolipoprotein E (APOE) is a class of apolipoprotein found in the chylomicron and Intermediate-density lipoprotein (IDLs) that binds to a specific receptor on liver cells and peripheral cells. It is essential for the normal catabolism of triglyceride-rich lipoprotein constituents. APOE is 299 amino acids long and transports lipoproteins, fat-soluble vitamins, and cholesterol into the lymph system and then into the blood. It is synthesized principally in the liver, but has also been found in other tissues such as the brain, kidneys, and spleen. Mutations in APOE, specifically the E4 allele, are associated with Alzheimer's disease. Alzheimer's Disease is characterized by build-ups of aggregates of the peptide beta-amyloid. Apolipoprotein E enhances proteolytic break-down of this peptide, both within and between cells. Some isoforms of ApoE are not as efficient as others at catalyzing these reactions. In particular, the isoform ApoE-ε4 is not very effective, resulting in increased vulnerability to Alzheimer's in individuals with that gene variation.

[0073] Aspects of the invention disclosed herein provide methods and compositions that are useful for upregulating APOE for the treatment and/or prevention of diseases associated with reduced APOE expression or function such as Alzheimer's disease.

### Erythropoiesis and Anemia—EPO and KLF4

[0074] Erythropoiesis is the process by which red blood cells (erythrocytes) are produced. It is stimulated by decreased O2 in circulation, which is detected by the kidneys, which then secrete the hormone erythropoietin (EPO). This hormone stimulates proliferation and differentiation of red cell precursors, which activates increased erythropoiesis in the hemopoietic tissues, ultimately producing red blood cells. Anemia, on the other hand, is a decrease in number of red blood cells (RBCs) or less than the normal quantity of hemoglobin in the blood. Because hemoglobin (found inside RBCs) normally carries oxygen from the lungs to the tissues, anemia leads to hypoxia (lack of oxygen) in organs. Since all human cells depend on oxygen for survival, varying degrees of anemia can have a wide range of clinical consequences. Anemia can be caused by several diseases, including chronic kidney disease, cancer, Fanconi anemia, endocrine disorders, folic acid deficiency, iron deficiency, thallasemias, myelophthisis, myelodysplastic syndrome, and chronic inflammation. EPO is a glycoprotein hormone that controls erythropoiesis, or red blood cell production. Exogenous EPO administered to a patient behaves as an erythropoiesis-stimulating agent, which can be used to treat anemia.

[0075] Aspects of the invention disclosed herein provide methods and compositions that are useful for upregulating EPO for the treatment and/or prevention of diseases associated with reduced EPO expression or function such as anemia. Aspects of the invention disclosed herein provide methods and compositions that are useful for upregulating EPO for stimulating erythropoiesis.

### Bleeding Disorder (Coagulopathy)—F7

[0076] Bleeding disorder (coagulopathy) is a condition in which the blood's ability to clot is impaired. This condition can cause prolonged or excessive bleeding, which may occur spontaneously or following an injury or medical and dental procedures. The normal clotting process depends on the interplay of various proteins in the blood. Coagulopathy may be caused by reduced levels or absence of blood-clotting proteins, known as clotting factors or coagulation factors. Examples of bleeding disorders include, e.g., Factor VII deficiency, congenital protein C deficiency, diseminated intravascular coagulation, hemophilia A, hemophilia B, von Willebrand disease and idiopathic thrombocytopenic purpura. Factor VII (F7) is one of the proteins that causes blood to clot in the coagulation cascade. It is an enzyme of the serine protease class. Deficiency or a reduction in F7 results in Factor VII deficiency disease, which is a hemophilia-like bleeding disorder. Recombinant F7 is currently used as a treatment for uncontrolled bleeding associated with hemophilia. Aspects of the invention disclosed herein provide methods and compositions that are useful for upregulating F7 for the treatment and/or prevention of diseases associated with reduced F7 expression or function such as a bleeding disorder. For example, aspects of the invention disclosed herein provide methods and compositions that are useful for upregulating F7 for the treatment and/or prevention of diseases associated with reduced F7 expression or function such as factor VII deficiency.

### CNS Disease, Neurodegeneration, and Movement Disorder—GCH1

[0077] Central nervous system (CNS) disease can affect either the spinal cord (myelopathy) or brain (encephalopathy), both of which are part of the central nervous system. CNS diseases include Encephalitis, Meningitis, Tropical spastic paraparesis, Arachnoid cysts, Amyotrophic lateral sclerosis, Huntington's disease, Alzheimer's disease, Dementia, Locked-in syndrome, Parkinson's disease, Tourette′, and Multiple sclerosis. CNS diseases have a variety of causes including Trauma, Infections, Degeneration, Structural defects, Tumors, Autoimmune Disorders, and Stroke. Symptoms range from persistent headache, loss of feeling, memory loss, loss of muscle strength, tremors, seizures, slurred speech, and in some cases, death.

[0078] Neurodegeneration the progressive loss of function or death of neurons and is the cause of a family of devastating diseases including amyotrophic lateral sclerosis (ALS, also known as Lou Gehrig's disease), Alzheimer's Disease (AD), and Parkinson's Disease (PD). ALS involves degeneration of motor neurons and results in progressive muscle weakness, dysarthria, dysphagia, respiratory difficulty, and eventually death. ALS can be caused by mutations in Cu/Zn superoxide dismutase 1. AD involves degeneration of neurons and synapses in the cerebral cortex, resulting in dementia, confusion, aggression, and long-term memory loss. AD is hypothesized to be caused by misfolded proteins that form small plaques that cause neuronal death. PD involves the death of dopamine-generating neurons in the substantia nigra, resulting in motor defects, psychiatric problems, and autonomic dysfunction. Mutations in some genes, alpha-synuclein (SNCA), parkin (PRKN), leucine-rich repeat kinase 2 (LRRK2 or dardarin), PTEN-induced putative kinase 1 (PINK1), DJ-1 and ATP13A2, cause at least a subset of Parkinson's disease.

[0079] Movement disorder includes a host of disease characterized by disrupted movement. Examples of movement disorders include, Akathisia (inability to sit still), Akinesia (lack of movement), Athetosis (contorted torsion or twisting), Ataxia (gross lack of coordination of muscle movements), Bradykinesia (slow movement), Cerebral palsy, Chorea (rapid, involuntary movement), Dystonia (sustained torsion), Geniospasm (episodic involuntary up and down movements of the chin and lower lip), Myoclonus (brief, involuntary twitching of a muscle or a group of muscles), Mirror movement disorder (involuntary movements on one side of the body mirroring voluntary movements of the other side), Spasms (contractions), Stereotypy (repetition), Tic disorders (involuntary, compulsive, repetitive, stereotyped), and Tremor (oscillations).

[0080] GCH1 encodes the protein GTP cyclohydrolase I (GTPCH), which is a member of the GTP cyclohydrolase family of enzymes. GTPCH is part of the folate and biopterin biosynthesis pathways. It is responsible for the hydrolysis of guanosine triphosphate (GTP) to form 7,8-dihydroneopterin 3′-triphosphate (7,8-DHNP-3′-TP, 7,8-NH2-3′-TP). GTPCH is the first and rate-limiting enzyme in tetrahydrobiopterin (THB, BH4) biosynthesis, catalyzing the conversion of GTP into 7,8-DHNP-3′-TP. THB is an essential cofactor required by the aromatic amino acid hydroxylase (AAAH) and nitric oxide synthase (NOS) enzymes in the biosynthesis of the monoamine neurotransmitters serotonin (5-hydroxytryptamine (5-HT)), melatonin, dopamine, norepinephrine (noradrenaline), and epinephrine (adrenaline), and nitric oxide (NO), respectively. Mutations in this gene are associated with the movement disorder dopamine-responsive dystonia (DRD). GCH1 gene therapy has been used to treat Parkinson's disease animal models.

[0081] Aspects of the invention disclosed herein provide methods and compositions that are useful for upregulating GCH1 for the treatment and/or prevention of diseases associated with reduced GCH1 expression or function such as a CNS disease. For example, aspects of the invention disclosed herein provide methods and compositions that are useful for upregulating GCH1 for the treatment and/or prevention of diseases associated with reduced GCH1 expression or function such as Parkinson's disease. Aspects of the invention disclosed herein provide methods and compositions that are useful for upregulating GCH1 for the treatment and/or prevention of diseases associated with reduced GCH1 expression or function such as a movement disorder. For example, aspects of the invention disclosed herein provide methods and compositions that are useful for upregulating GCH1 for the treatment and/or prevention of diseases associated with reduced GCH1 expression or function such as dopamine-responsive dystonia.

### Thalassemia—HBA2 and KLF1

[0082] Red blood cells are essential for transporting oxygen throughout the body. Red blood cells are made up of hemoglobin, which is a multi-subunit oxygen-transport metalloprotein. During development, embryonic hemoglobin is composed of epsilon chains (encoded by HBE1) and zeta chains and is produced by the embryonic yolk sac. In human infants, hemoglobin is made up of alpha chains (encoded by HBA1 and HBA2) and gamma chains (encoded by HBG1 and HBG2), with the gamma chains gradually replaced by beta chains over time. The majority of hemoglobin in adults is made up of alpha chains and beta chains (encoded by HBB) with a small percentage (about 3%) made up of alpha and delta chains (encoded by HBD). Several disorders are caused by mutations in hemoglobin subunits and affect red blood cell function or production, resulting in anemia. Two major diseases that affect red blood cells include sickle cell anemia and thalassemia.

[0083] Sickle cell anemia is a recessive disorder caused by the absence of a polar amino acid at position six of the beta-globin chain due to a point mutation in HBB. The absence of this amino acid causes aggregation of hemoglobin and results in red blood cells having a stiff, sickle shape. The rigidity of these red blood cells results in vessel occlusion and ischaemia as the cells pass through capillary beds. Anemia is also a symptom, due to the excessive lysis of sickle-shaped red blood cells. Mouse models of sickle cell anemia have shown that expression of other hemoglobin subunits can alleviate symptoms. In adult sickle cell anemia mice, for example, expression of HBE1, which is normally not expressed in adults but serves a similar function as beta-chains during embryonic development, restores the mice to a normal phenotype.

[0084] Thalassemia is a group of hereditary blood disorders characterized by a reduced amount of hemoglobin and fewer red blood cells. There are several types of thalassemia, including alpha-thalassemia, beta-thalassemia, delta thalassemia. Alpha-thalassemia is caused by mutations in the HBA1 or HBA2 gene. These mutations cause reduction in alpha-globin production and formation of beta-chain tetramers with altered oxygen profiles and anemia. Delta-thalassemia is caused by a reduction in the synthesis of delta chains of hemoglobin, which is encoded by HBD. Beta-thalassemia, the most severe form of thalassemia, is caused by a reduction in the synthesis of the beta chains of hemoglobin, which is encoded by HBB. Beta-thalassemia is classified into three types, thalassemia minor, thalassemia intermedia, and thalassemia major, depending on the number of mutations and disease severity. Thalassemia minor occurs when only one beta globin allele is mutated and results in microcytic anemia. When more than one allele is mutated, thalassemia intermedia or thalassemia major can occur depending on the severity of the mutation. Patients with thalassemia major require blood transfusions or bone marrow transplantation, otherwise anemia, splenomegaly, and severe bone deformities occur. Patients with thalassemia intermedia may require blood transfusions depending on the severity of the disease.

[0085] Upregulation of hemoglobin subunits is a potential treatment for both sickle cell anemia and thalassemia. Aspects of the invention disclosed herein provide methods and compositions that are useful for upregulating HBA2 for the treatment and/or prevention of diseases associated with reduced HBA2 expression or function such as thalassemia. For example, aspects of the invention disclosed herein provide methods and compositions that are useful for upregulating HBA2 for the treatment and/or prevention of diseases associated with reduced HBA2 expression or function such as alpha thalassemia.

[0086] KLF1 (Krüppel-like Factor 1) is a transcription factor that is necessary for the proper maturation of erythroid (red blood) cells. KLF1 knockout deficient (knockout) mouse embryos exhibit a lethal anemic phenotype, due to a failure to promote the transcription of adult β globin. Aspects of the invention disclosed herein provide methods and compositions that are useful for upregulating KLF1 for the treatment and/or prevention of diseases associated with reduced KLF1 expression or function such as thalassemia or sickle cell anemia. For example, aspects of the invention disclosed herein provide methods and compositions that are useful for upregulating KLF1 for the treatment and/or prevention of diseases associated with reduced KLF1 expression or function such as beta thalassemia.

### Infectious Disease—IL6

[0087] Infectious diseases, also known as transmissible diseases or communicable diseases comprise clinically evident illness (i.e., characteristic medical signs and/or symptoms of disease) resulting from the infection, presence and growth of pathogenic biological agents in an individual host organism. Infectious pathogens include some viruses, bacteria, fungi, protozoa, multicellular parasites, and aberrant proteins known as prions. A contagious disease is a subset of infectious disease that is especially infective or easily transmitted.

[0088] Aspects of the invention disclosed herein provide methods and compositions that are useful for upregulating IL6 for the treatment and/or prevention of diseases associated with reduced IL6 expression or function such as infectious disease. Interleukin-6 (IL6) is a protein that in humans is encoded by the IL6 gene. IL6 is secreted by T cells and macrophages to stimulate immune response, e.g. during infection and after trauma, especially burns or other tissue damage leading to inflammation. In terms of host response to a foreign pathogen during infection, IL-6 has been shown, in mice, to be required for resistance against the bacterium Streptococcus pneumoniae. Aspects of the invention disclosed herein provide methods and compositions that are useful for upregulating IL6 for the treatment and/or prevention of diseases associated with reduced IL6 expression or function such as infectious disease.

### Vaccination—IL6

[0089] Vaccination is the administration of antigenic material (a vaccine) to stimulate the immune system of an individual to develop adaptive immunity to a disease. Vaccines can prevent or ameliorate the effects of infection by many pathogens. The efficacy of vaccination has been widely studied and verified; for example, the influenza vaccine, the HPV vaccine, and the chicken pox vaccine. In general, vaccination is considered to be the most effective method of preventing infectious diseases. Interleukin-6 (IL6) is a protein that in humans is encoded by the IL6 gene. IL6 is secreted by T cells and macrophages to stimulate immune response, e.g. during infection and after trauma, especially burns or other tissue damage leading to inflammation. Aspects of the invention disclosed herein provide methods and compositions that are useful for upregulating IL6 for use in vaccination.

### Obesity and Type 2 Diabetes—KCNMA1, KCNMB1, KCNMB2, KCNMB3, KCNMB4

[0090] Obesity is a medical condition in which excess body fat has accumulated to the extent that it may have an adverse effect on health, leading to reduced life expectancy and/or increased health problems. A person is considered obese when his or her weight is 20% or more above normal weight. The most common measure of obesity is the body mass index or BMI. A person is considered overweight if his or her BMI is between 25 and 29.9; a person is considered obese if his or her BMI is over 30. Obesity increases the likelihood of various diseases, particularly heart disease, type 2 diabetes, obstructive sleep apnea, certain types of cancer, and osteoarthritis. Obesity is most commonly caused by a combination of excessive food energy intake, lack of physical activity, and genetic susceptibility.

[0091] Type 2 diabetes (also called Diabetes mellitus type 2 and formally known as adult-onset diabetes) a metabolic disorder that is characterized by high blood glucose in the context of insulin resistance and relative insulin deficiency. Type 2 diabetes makes up about 90% of cases of diabetes with the other 10% due primarily to diabetes mellitus type 1 and gestational diabetes. Obesity is thought to be the primary cause of type 2 diabetes in people who are genetically predisposed to the disease. The prevalence of diabetes has increased dramatically in the last 50 years. As of 2010 there were approximately 285 million people with the disease compared to around 30 million in 1985.

[0092] MaxiK (also called Big Potasium (BK)) channels are large conductance, voltage and calcium-sensitive potassium channels which contribute to repolarization of the membrane potential and play a key role in controlling excitability in a number of systems, such as regulation of the contraction of smooth muscle, the tuning of hair cells in the cochlea, regulation of transmitter release, and innate immunity. KCNMA1 (potassium large conductance calcium-activated channel, subfamily M, alpha member 1) is an alpha subunit of MaxiK channels. The beta subunit, KCNMB (Calcium-activated potassium channel subunit beta), can be made up of any of the four alternative beta subunits: KCNMB1, KCNMB2, KCNMB3, and KCNMB4. Genetic mutations in BK gene promoter regions are associated with low insulin sensitivity and impaired glucose tolerance.

[0093] Aspects of the invention disclosed herein provide methods and compositions that are useful for upregulating KCNMA1, KCNMB1, KCNMB2, KCNMB3, and/or KCNMB4 for the treatment and/or prevention of diseases associated with reduced KCNMA1, KCNMB1, KCNMB2, KCNMB3, and/or KCNMB4 expression or function such as obesity or type-2 diabetes.

### Inflammatory Disease and Autoimmune Disease—KCNMA1, KCNMB1, KCNMB2, KCNMB3, KCNMB4

[0094] Inflammation is part of the complex biological response of vascular tissues to harmful stimuli, such as pathogens, damaged cells, or irritants. Inflammation is a protective attempt by the organism to remove the injurious stimuli and to initiate the healing process. However, chronic inflammation can also lead to a host of diseases, such as hay fever, periodontitis, atherosclerosis, and rheumatoid arthritis. Prolonged inflammation, known as chronic inflammation, leads to a progressive shift in the type of cells present at the site of inflammation and is characterized by simultaneous destruction and healing of the tissue from the inflammatory process. Inflammatory disorder include, but are not limited to, acne vulgaris, asthma, autoimmune diseases, celiac disease, chronic prostatitis, glomerulonephritis, inflammatory bowel diseases, Multiple sclerosis, pelvic inflammatory disease, reperfusion injury, rheumatoid arthritis, sarcoidosis, transplant rejection (graft vs host disease), vasculitis and interstitial cystitis.

[0095] Autoimmune diseases arise from an inappropriate immune response of the body against substances and tissues normally present in the body. In other words, the immune system mistakes some part of the body as a pathogen and attacks its own cells. Autoimmune diseases are classified by corresponding types of hypersensitivity: type II, type III, or type IV. Examples of autoimmune disease include, but are not limited to, Ankylosing Spondylitis, Autoimmune cardiomyopathy, Autoimmune hemolytic anemia, Autoimmune hepatitis, Autoimmune inner ear disease, immune lymphoproliferative syndrome, Autoimmune peripheral neuropathy, Autoimmune pancreatitis, Autoimmune polyendocrine syndrome, Autoimmune thrombocytopenic purpura, Celiac disease, Cold agglutinin disease, Contact dermatitis, Crohn's disease, Dermatomyositis, Diabetes mellitus type 1, Eosinophilic fasciitis, Gastrointestinal pemphigoid, Goodpasture's syndrome, Graves' disease, Guillain-Barré syndrome, Hashimoto's encephalopathy, Hashimoto's thyroiditis, Idiopathic thrombocytopenic purpura, Lupus erythematosus, Miller-Fisher syndrome, Myasthenia gravis, Multiple sclerosis, Pemphigus vulgaris, Pernicious anemia, Polymyositis, Primary biliary cirrhosis, Psoriasis, Psoriatic arthritis, Relapsing polychondritis, Rheumatoid arthritis, Sjögren's syndrome, Temporal arteritis, Transverse myelitis, Ulcerative colitis, Undifferentiated connective tissue disease, Vasculitis, Vitiligo, and Wegener's granulomatosis.

[0096] MaxiK (also called Big Potasium (BK)) channels are large conductance, voltage and calcium-sensitive potassium channels which contribute to repolarization of the membrane potential and play a key role in controlling excitability in a number of systems, such as regulation of the contraction of smooth muscle, the tuning of hair cells in the cochlea, regulation of transmitter release, and innate immunity. KCNMA1 (potassium large conductance calcium-activated channel, subfamily M, alpha member 1) is an alpha subunit of MaxiK channels. The beta subunit, KCNMB (Calcium-activated potassium channel subunit beta), can be made up of any of the four alternative beta subunits: KCNMB1, KCNMB2, KCNMB3, and KCNMB4. Aspects of the invention disclosed herein provide methods and compositions that are useful for upregulating KCNMA1, KCNMB1, KCNMB2, KCNMB3, and/or KCNMB4 for the treatment and/or prevention of diseases associated with reduced KCNMA1, KCNMB1, KCNMB2, KCNMB3, and/or KCNMB4 expression or function such as autoimmune disease or inflammatory disease.

### Vascular Disease—KCNMA1, KCNMB1, KCNMB2, KCNMB3, KCNMB4

[0097] Vascular disease is a form of cardiovascular disease primarily affecting the blood vessels. Vascular disease is a pathological state of large and medium sized muscular arteries and is triggered by endothelial cell dysfunction. Because of factors like pathogens, oxidized LDL particles and other inflammatory stimuli endothelial cells become activated. This leads to change in their characteristics: endothelial cells start to excrete cytokines and chemokines and express adhesion molecules on their surface. This in turn results in recruitment of white blood cells (monocytes and lymphocytes), which can infiltrate the blood vessel wall. Stimulation of smooth muscle cell layer with cytokines produced by endothelial cells and recruited white blood cells causes smooth muscle cells to proliferate and migrate towards the blood vessel lumen. The process causes thickening of the vessel wall, forming a plaque consisting of proliferating smooth muscle cells, macrophages and various types of lymphocytes. This plaque result in obstructed blood flow leading to diminished amounts of oxygen and nutrients, that reach the target organ. In the final stages, the plaque may also rupture causing the formation of clots, and as a result strokes.

[0098] MaxiK (also called Big Potasium (BK)) channels are large conductance, voltage and calcium-sensitive potassium channels which contribute to repolarization of the membrane potential and play a key role in controlling excitability in a number of systems, such as regulation of the contraction of smooth muscle, the tuning of hair cells in the cochlea, regulation of transmitter release, and innate immunity. KCNMA1 (potassium large conductance calcium-activated channel, subfamily M, alpha member 1) is an alpha subunit of MaxiK channels. The beta subunit, KCNMB (Calcium-activated potassium channel subunit beta), can be made up of any of the four alternative beta subunits: KCNMB1, KCNMB2, KCNMB3, and KCNMB4. When KCNMB1 is knocked out (BKβ1-KO), the result is increased myogenic tone of vascular smooth muscle and hypertension. BK channels are current pharmacological targets for the treatment of vascular diseases such as stroke.

[0099] Aspects of the invention disclosed herein provide methods and compositions that are useful for upregulating KCNMA1, KCNMB1, KCNMB2, KCNMB3, and/or KCNMB4 for the treatment and/or prevention of diseases associated with reduced KCNMA1, KCNMB1, KCNMB2, KCNMB3, and/or KCNMB4 expression or function such as vascular disease.

### Developmental Disorders e.g., Craniosynostosis and Parietal Foramina—MSX2

[0100] Developmental disorders occur at some stage in a child's development, often retarding the development. These may include psychological or physical disorders. Craniosynostosis is a condition in which one or more of the fibrous sutures in an infant skull prematurely fuses by ossification, thereby changing the growth pattern of the skull. Because the skull cannot expand perpendicular to the fused suture, it compensates by growing more in the direction parallel to the closed sutures. Sometimes the resulting growth pattern provides the necessary space for the growing brain, but results in an abnormal head shape and abnormal facial features. In cases in which the compensation does not effectively provide enough space for the growing brain, craniosynostosis results in increased intracranial pressure leading possibly to visual impairment, sleeping impairment, eating difficulties, or an impairment of mental development combined with a significant reduction in IQ. Craniosynostosis occurs in one in 2000 births. Another developmental disorder is enlarged parietal foramina. Enlarged parietal foramina are characteristic symmetric, paired radiolucencies of the parietal bones, located close to the intersection of the sagittal and lambdoid sutures, caused by deficient ossification around the parietal notch that is normally obliterated by the fifth month of fetal development. Enlarged parietal foramina are usually asymptomatic. Meningeal, cortical, and vascular malformations of the posterior fossa occasionally accompany the bone defects and may predispose to epilepsy. Mutations in MSX2 are associated with both Craniosynostosis and enlarged parietal foramina.

[0101] Aspects of the invention disclosed herein provide methods and compositions that are useful for upregulating MSX2 for the treatment and/or prevention of diseases associated with reduced MSX2 expression or function such as a developmental disorder. For example, aspects of the invention disclosed herein provide methods and compositions that are useful for upregulating MSX2 for the treatment and/or prevention of diseases associated with reduced MSX2 expression or function such as craniosynostosis or enlarged parietal foramina.

### Cardiac Disease—MYBPC3

[0102] Cardiac disease includes a host of diseases and disorders of the heart, including congenital heart disease, Hypertensive heart disease, aortic aneurysms, aortic dissections, arrhythmia, cardiomyopathy, hypertrophic cardiomyopathy and congestive heart failure. Congestive heart failure, in particular, occurs when the heart is unable to maintain an adequate circulation of blood in the tissues of the body or to pump out the venous blood returned to it. This weakening of the heart prevents it from circulating a sufficient quantity of oxygen to the body's tissues. Cardiac diseases that involve contractility, e.g. congestive heart failure, depend on the regulation of the contraction/relaxation cycle of muscle cells in the heart.

[0103] MYBPC3 encodes the cardiac isoform of myosin-binding protein C. Myosin-binding protein C is a myosin-associated protein found in the cross-bridge-bearing zone (C region) of A bands in striated muscle. It is found in regularly spaced intervals and acts as like a “barrel hoop” to hold the thick filament together. MYBPC3, the cardiac isoform, is expressed exclusively in heart muscle. Regulatory phosphorylation of the cardiac isoform in vivo by cAMP-dependent protein kinase (PKA) upon adrenergic stimulation may be linked to modulation of cardiac contraction. Mutations in MYBPC3 are one cause of hypertrophic cardiomyopathy. A deletion of 25 by in the gene encoding the MYBPC3 protein is associated with heritable cardiomyopathies and an increased risk of heart failure in Indian populations.

[0104] Aspects of the invention disclosed herein provide methods and compositions that are useful for upregulating MYBPC3 for the treatment and/or prevention of diseases associated with reduced MYBPC3 expression or function such as a cardiac disease. For example, aspects of the invention disclosed herein provide methods and compositions that are useful for upregulating MYBPC3 for the treatment and/or prevention of diseases associated with reduced MYBPC3 expression or function such as cardiomyopathy.

### Tissue Regeneration—KLF4

[0105] Regeneration is the process of renewal, restoration, and growth of cells and organs in response to disturbance or damage. Strategies for regeneration of tissue include the rearrangement of pre-existing tissue, the use of adult somatic stem cells and the dedifferentiation and/or transdifferentiation of cells, and more than one mode can operate in different tissues of the same animal. During the developmental process genes are activated that serve to modify the properties of cells as they differentiate into different tissues. Development and regeneration involves the coordination and organization of populations cells into a blastema, which is a mound of stem cells from which regeneration begins. Dedifferentiation of cells means that they lose their tissue-specific characteristics as tissues remodel during the regeneration process. Transdifferentiation of cells occurs when they lose their tissue-specific characteristics during the regeneration process, and then re-differentiate to a different kind of cell. These strategies result in the re-establishment of appropriate tissue polarity, structure and form. Krueppel-like factor 4 is a transcription factor protein that in humans is encoded by the KLF4 gene. KLF4 has been shown to interact with Oct4 and Sox2 to promote reprogramming of cells. Aspects of the invention disclosed herein provide methods and compositions that are useful for upregulating KLF4 for tissue regeneration.

### 5q Syndrome—RPS14

[0106] Chromosome 5q deletion syndrome (chromosome 5q monosomy, 5q syndrome) is a rare disorder caused by loss of part of the long arm (q arm, band 5q31.1) of human chromosome 5. The 5q-syndrome is characterized by macrocytic anemia often thrombocytosis, erythroblastopenia, and megakaryocyte hyperplasia with nuclear hypolobation. 5q syndrome has been shown to be associated with the RPS14 gene. 40S ribosomal protein S14 is a protein that in humans is encoded by the RPS14 gene. This gene encodes a ribosomal protein that is a component of the 40S subunit.

[0107] Aspects of the invention disclosed herein provide methods and compositions that are useful for upregulating RPS14 for the treatment and/or prevention of diseases associated with reduced RPS14 expression or function such as a 5q syndrome.

### Diamond-Blackfan Anemia—RPS19

[0108] Diamond-Blackfan anemia (DBA), also known as Blackfan-Diamond anemia and Inherited erythroblastopenia is a congenital erythroid aplasia that usually presents in infancy. DBA patients have low red blood cell counts (anemia). The rest of their blood cells (the platelets and the white blood cells) are normal. About 47% of affected individuals also have a variety of congenital abnormalities, including craniofacial malformations, thumb or upper limb abnormalities, cardiac defects, urogenital malformations, and cleft palate. Mutations in the ribosomal protein S19 gene (RPS19) are known to be associated with DBA. 40S ribosomal protein S19 is a protein that in humans is encoded by the RPS19 gene. This gene encodes a ribosomal protein that is a component of the 40S subunit.

[0109] Aspects of the invention disclosed herein provide methods and compositions that are useful for upregulating RPS19 for the treatment and/or prevention of diseases associated with reduced RPS19 expression or function such as a Diamond-Blackfan anemia.

### X-Inactivation—Xist and Tsix

[0110] X-inactivation (also called lyonization) is a process by which one of the two copies of the X chromosome present in female mammals is inactivated. The inactive X chromosome is silenced by packaging into transcriptionally inactive heterochromatin. As female mammals have two X chromosomes, X-inactivation causes them not to have twice as many X chromosome gene products as males, which only possess a single copy of the X chromosome. The X-inactive specific transcript (Xist) gene encodes a large non-coding RNA that is responsible for mediating the specific silencing of the X chromosome from which it is transcribed. The inactive X chromosome is coated by Xist RNA, whereas the Xa is not. The Xist gene is the only gene which is expressed from the Xi but not from the Xa. X chromosomes which lack the Xist gene cannot be inactivated. Artificially placing and expressing the Xist gene on another chromosome leads to silencing of that chromosome. Like Xist, the Tsix gene encodes a large RNA which is not believed to encode a protein. The Tsix RNA is transcribed antisense to Xist, meaning that the Tsix gene overlaps the Xist gene and is transcribed on the opposite strand of DNA from the Xist gene. Tsix is a negative regulator of Xist; X chromosomes lacking Tsix expression (and thus having high levels of Xist transcription) are inactivated much more frequently than normal chromosomes.

[0111] Aspects of the invention disclosed herein provide methods and compositions that are useful for modulating Xist or Tsix expression for X-inactivation.

### Single Stranded Oligonucleotides for Modulating Expression of Target Genes

[0112] In one aspect of the invention, single stranded oligonucleotides complementary to the PRC2-associated regions are provided for modulating expression of a target gene in a cell. In some embodiments, expression of the target gene is upregulated or increased. In some embodiments, single stranded oligonucleotides complementary to these PRC2-associated regions inhibit the interaction of PRC2 with long RNA transcripts such that gene expression is upregulated or increased. In some embodiments, single stranded oligonucleotides complementary to these PRC2-associated regions inhibit the interaction of PRC2 with long RNA transcripts, resulting in reduced methylation of histone H3 and reduced gene inactivation, such that gene expression is upregulated or increased. In some embodiments, this interaction may be disrupted or inhibited due to a change in the structure of the long RNA that prevents or reduces binding to PRC2. The oligonucleotide may be selected using any of the methods disclosed herein for selecting a candidate oligonucleotide for activating expression of a target gene.

[0113] The single stranded oligonucleotide may comprise a region of complementarity that is complementary with a PRC2-associated region of a nucleotide sequence set forth in any one of SEQ ID NOS: 1 to 114. The region of complementarity of the single stranded oligonucleotide may be complementary with at least 6, e.g., at least 7, at least 8, at least 9, at least 10, at least 15 or more consecutive nucleotides of the PRC2-associated region.

[0114] The PRC2-associated region may map to a position in a chromosome between 50 kilobases upstream of a 5′-end of the target gene and 50 kilobases downstream of a 3′-end of the target gene. The PRC2-associated region may map to a position in a chromosome between 25 kilobases upstream of a 5′-end of the target gene and 25 kilobases downstream of a 3′-end of the target gene. The PRC2-associated region may map to a position in a chromosome between 12 kilobases upstream of a 5′-end of the target gene and 12 kilobases downstream of a 3′-end of the target gene. The PRC2-associated region may map to a position in a chromosome between 5 kilobases upstream of a 5′-end of the target gene and 5 kilobases downstream of a 3′-end of the target gene.

[0115] The genomic position of the selected PRC2-associated region relative to the target gene may vary. For example, the PRC2-associated region may be upstream of the 5′ end of the target gene. The PRC2-associated region may be downstream of the 3′ end of the target gene. The PRC2-associated region may be within an intron of the target gene. The PRC2-associated region may be within an exon of the target gene. The PRC2-associated region may traverse an intron-exon junction, a 5′-UTR-exon junction or a 3′-UTR-exon junction of the target gene.

[0116] The single stranded oligonucleotide may comprise a sequence having the formula X-Y-Z, in which X is any nucleotide, Y is a nucleotide sequence of 6 nucleotides in length that is not a human seed sequence of a microRNA, and Z is a nucleotide sequence of varying length. In some embodiments X is the 5′ nucleotide of the oligonucleotide. In some embodiments, when X is anchored at the 5′ end of the oligonucleotide, the oligonucleotide does not have any nucleotides or nucleotide analogs linked 5′ to X. In some embodiments, other compounds such as peptides or sterols may be linked at the 5′ end in this embodiment as long as they are not nucleotides or nucleotide analogs. In some embodiments, the single stranded oligonucleotide has a sequence 5′X-Y-Z and is 8-50 nucleotides in length. Oligonucleotides that have these sequence characteristics are predicted to avoid the miRNA pathway. Therefore, in some embodiments, oligonucleotides having these sequence characteristics are unlikely to have an unintended consequence of functioning in a cell as a miRNA molecule. The Y sequence may be a nucleotide sequence of 6 nucleotides in length set forth in Table 1.

[0117] The single stranded oligonucleotide may have a sequence that does not contain guanosine nucleotide stretches (e.g., 3 or more, 4 or more, 5 or more, 6 or more consecutive guanosine nucleotides). In some embodiments, oligonucleotides having guanosine nucleotide stretches have increased non-specific binding and/or off-target effects, compared with oligonucleotides that do not have guanosine nucleotide stretches.

[0118] The single stranded oligonucleotide may have a sequence that has less than a threshold level of sequence identity with every sequence of nucleotides, of equivalent length, that map to a genomic position encompassing or in proximity to an off-target gene. For example, an oligonucleotide may be designed to ensure that it does not have a sequence that maps to genomic positions encompassing or in proximity with all known genes (e.g., all known protein coding genes) other than the target gene. In a similar embodiment, an oligonucleotide may be designed to ensure that it does not have a sequence that maps to any other known PRC2-associated region, particularly PRC2-associated regions that are functionally related to any other known gene (e.g., any other known protein coding gene). In either case, the oligonucleotide is expected to have a reduced likelihood of having off-target effects. The threshold level of sequence identity may be 50%, 60%, 70%, 80%, 85%, 90%, 95%, 99% or 100% sequence identity.

[0119] The single stranded oligonucleotide may have a sequence that is complementary to a PRC2-associated region that encodes an RNA that forms a secondary structure comprising at least two single stranded loops. In has been discovered that, in some embodiments, oligonucleotides that are complementary to a PRC2-associated region that encodes an RNA that forms a secondary structure comprising one or more single stranded loops (e.g., at least two single stranded loops) have a greater likelihood of being active (e.g., of being capable of activating or enhancing expression of a target gene) than a randomly selected oligonucleotide. In some cases, the secondary structure may comprise a double stranded stem between the at least two single stranded loops. Accordingly, the region of complementarity between the oligonucleotide and the PRC2-associated region may be at a location of the PRC2 associated region that encodes at least a portion of at least one of the loops. In some cases, the region of complementarity between the oligonucleotide and the PRC2-associated region may be at a location of the PRC2-associated region that encodes at least a portion of at least two of the loops. In some cases, the region of complementarity between the oligonucleotide and the PRC2-associated region may be at a location of the PRC2 associated region that encodes at least a portion of the double stranded stem. In some embodiments, a PRC2-associated region (e.g., of an lncRNA) is identified (e.g., using RIP-Seq methodology or information derived therefrom). In some embodiments, the predicted secondary structure RNA (e.g., lncRNA) containing the PRC2-associated region is determined using RNA secondary structure prediction algorithms, e.g., RNAfold, mfold. In some embodiments, oligonucleotides are designed to target a region of the RNA that forms a secondary structure comprising one or more single stranded loop (e.g., at least two single stranded loops) structures which may comprise a double stranded stem between the at least two single stranded loops.

[0120] The single stranded oligonucleotide may have a sequence that is has greater than 30% G-C content, greater than 40% G-C content, greater than 50% G-C content, greater than 60% G-C content, greater than 70% G-C content, or greater than 80% G-C content. The single stranded oligonucleotide may have a sequence that has up to 100% G-C content, up to 95% G-C content, up to 90% G-C content, or up to 80% G-C content. In some embodiments in which the oligonucleotide is 8 to 10 nucleotides in length, all but 1, 2, 3, 4, or 5 of the nucleotides of the complementary sequence of the PRC2-associated region are cytosine or guanosine nucleotides. In some embodiments, the sequence of the PRC2-associated region to which the single stranded oligonucleotide is complementary comprises no more than 3 nucleotides selected from adenine and uracil.

[0121] The single stranded oligonucleotide may be complementary to a chromosome of a different species (e.g., a mouse, rat, rabbit, goat, monkey, etc.) at a position that encompasses or that is in proximity to that species' homolog of the target gene. The single stranded oligonucleotide may be complementary to a human genomic region encompassing or in proximity to the target gene and also be complementary to a mouse genomic region encompassing or in proximity to the mouse homolog of the target gene. For example, the single stranded oligonucleotide may be complementary to a sequence as set forth in SEQ ID NO: 1, 2, 5, 6, 9, 10, 13, 14, 17, 18, 21, 22, 25, 26, 29, 30, 33, 34, 37, 38, 43, 44, 45, 46, 49, 50, 53, 54, 57, 58, 61, 62, 65, 66, 69, 70, 73, 74, 77, 78, 81, 82, 85, 86, 89, 90, 93, 94, 95, 96, 99, 100, 103, 104, 107, 108, 111, or 112, which is a human genomic region encompassing or in proximity to the target gene, and also be complementary to a sequence as set forth in SEQ ID NO: 3, 4, 7, 8, 11, 12, 15, 16, 19, 20, 23, 24, 27, 28, 31, 32, 35, 36, 39, 40, 41, 42, 47, 48, 51, 52, 55, 56, 59, 60, 63, 64, 67, 68, 71, 72, 75, 76, 79, 80, 83, 84, 87, 88, 91, 92, 97, 98, 101, 102, 105, 106, 109, 110, 113, or 114, which is a mouse genomic region encompassing or in proximity to the mouse homolog of the target gene. Oligonucleotides having these characteristics may be tested in vivo or in vitro for efficacy in multiple species (e.g., human and mouse). This approach also facilitates development of clinical candidates for treating human disease by selecting a species in which an appropriate animal exists for the disease.

[0122] In some embodiments, the region of complementarity of the single stranded oligonucleotide is complementary with at least 8 to 15, 8 to 30, 8 to 40, or 10 to 50, or 5 to 50, or 5 to 40 bases, e.g., 5, 6, 7, 8, 9, 10, 11, 12, 13, 14, 15, 16, 17, 18, 19, 20, 21, 22, 23, 24, 25, 26, 27, 28, 29, 30, 31, 32, 33, 34, 35, 36, 37, 38, 39, 40, 41, 42, 43, 44, 45, 46, 47, 48, 49, or 50 consecutive nucleotides of a PRC2-associated region. In some embodiments, the region of complementarity is complementary with at least 8 consecutive nucleotides of a PRC2-associated region. In some embodiments the sequence of the single stranded oligonucleotide is based on an RNA sequence that binds to PRC2, or a portion thereof, said portion having a length of from 5 to 40 contiguous base pairs, or about 8 to 40 bases, or about 5 to 15, or about 5 to 30, or about 5 to 40 bases, or about 5 to 50 bases.

[0123] Complementary, as the term is used in the art, refers to the capacity for precise pairing between two nucleotides. For example, if a nucleotide at a certain position of an oligonucleotide is capable of hydrogen bonding with a nucleotide at the same position of PRC2-associated region, then the single stranded nucleotide and PRC2-associated region are considered to be complementary to each other at that position. The single stranded nucleotide and PRC2-associated region are complementary to each other when a sufficient number of corresponding positions in each molecule are occupied by nucleotides that can hydrogen bond with each other through their bases. Thus, “complementary” is a term which is used to indicate a sufficient degree of complementarity or precise pairing such that stable and specific binding occurs between the single stranded nucleotide and PRC2-associated region. For example, if a base at one position of a single stranded nucleotide is capable of hydrogen bonding with a base at the corresponding position of a PRC2-associated region, then the bases are considered to be complementary to each other at that position. 100% complementarity is not required.

[0124] The single stranded oligonucleotide may be at least 80% complementary to (optionally one of at least 85%, 90%, 91%, 92%, 93%, 94%, 95%, 96%, 97%, 98%, 99% or 100% complementary to) the consecutive nucleotides of a PRC2-associated region. In some embodiments the single stranded oligonucleotide may contain 1, 2 or 3 base mismatches compared to the portion of the consecutive nucleotides of a PRC2-associated region. In some embodiments the single stranded oligonucleotide may have up to 3 mismatches over 15 bases, or up to 2 mismatches over 10 bases.

[0125] It is understood in the art that a complementary nucleotide sequence need not be 100% complementary to that of its target to be specifically hybridizable. In some embodiments, a complementary nucleic acid sequence for purposes of the present disclosure is specifically hybridizable when binding of the sequence to the target molecule (e.g., lncRNA) interferes with the normal function of the target (e.g., lncRNA) to cause a loss of activity (e.g., inhibiting PRC2-associated repression with consequent up-regulation of gene expression) and there is a sufficient degree of complementarity to avoid non-specific binding of the sequence to non-target sequences under conditions in which avoidance of non-specific binding is desired, e.g., under physiological conditions in the case of in vivo assays or therapeutic treatment, and in the case of in vitro assays, under conditions in which the assays are performed under suitable conditions of stringency.

[0126] In some embodiments, the single stranded oligonucleotide is 7, 8, 9, 10, 11, 12, 13, 14, 15, 16, 17, 18, 19, 20, 21, 22, 23, 24, 25, 26, 27, 28, 29, 30, 35, 40, 45, 50 or more nucleotides in length. In a preferred embodiment, the oligonucleotide is 8 to 30 nucleotides in length.

[0127] In some embodiments, the PRC2-associated region occurs on the same DNA strand as a gene sequence (sense). In some embodiments, the PRC2-associated region occurs on the opposite DNA strand as a gene sequence (anti-sense). Oligonucleotides complementary to a PRC2-associated region can bind either sense or anti-sense sequences. Base pairings may include both canonical Watson-Crick base pairing and non-Watson-Crick base pairing (e.g., Wobble base pairing and Hoogsteen base pairing). It is understood that for complementary base pairings, adenosine-type bases (A) are complementary to thymidine-type bases (T) or uracil-type bases (U), that cytosine-type bases (C) are complementary to guanosine-type bases (G), and that universal bases such as 3-nitropyrrole or 5-nitroindole can hybridize to and are considered complementary to any A, C, U, or T. Inosine (I) has also been considered in the art to be a universal base and is considered complementary to any A, C, U or T.

[0128] In some embodiments, any one or more thymidine (T) nucleotides (or modified nucleotide thereof) or uridines (U) nucleotides (or a modified nucleotide thereof) in a sequence provided herein, including a sequence provided in the sequence listing, may be replaced with any other nucleotide suitable for base pairing (e.g., via a Watson-Crick base pair) with an adenosine nucleotide. In some embodiments, any one or more thymidine (T) nucleotides (or modified nucleotide thereof) or uridines (U) nucleotides (or a modified nucleotide thereof) in a sequence provided herein, including a sequence provided in the sequence listing, may be suitably replaced with a different pyrimidine nucleotide or vice versa. In some embodiments, any one or more thymidine (T) nucleotides (or modified nucleotide thereof) in a sequence provided herein, including a sequence provided in the sequence listing, may be suitably replaced with a uridine (U) nucleotide (or a modified nucleotide thereof) or vice versa.

[0129] In some embodiments, GC content of the single stranded oligonucleotide is preferably between about 30-60%. Contiguous runs of three or more Gs or Cs may not be preferable in some embodiments. Accordingly, in some embodiments, the oligonucleotide does not comprise a stretch of three or more guanosine nucleotides.

[0130] In some embodiments, the single stranded oligonucleotide specifically binds to, or is complementary to an RNA that is encoded in a genome (e.g., a human genome) as a single contiguous transcript (e.g., a non-spliced RNA). In some embodiments, the single stranded oligonucleotide specifically binds to, or is complementary to an RNA that is encoded in a genome (e.g., a human genome), in which the distance in the genome between the 5′end of the coding region of the RNA and the 3′ end of the coding region of the RNA is less than 1 kb, less than 2 kb, less than 3 kb, less than 4 kb, less than 5 kb, less than 7 kb, less than 8 kb, less than 9 kb, less than 10 kb, or less than 20 kb.

[0131] It is to be understood that any oligonucleotide provided herein can be excluded. In some embodiments, a single stranded oligonucleotide is not complementary to SEQ ID NO: 1098803. In some embodiments, a single stranded oligonucleotide is not complementary to SEQ ID NO: 1098804.

[0132] In some embodiments, a single-stranded oligonucleotide is complementary to a sequence within nucleotides 1 to 723 or 878 to 4047 of SEQ ID NO: 1366. In some embodiments, a single-stranded oligonucleotide is complementary to a sequence within nucleotides 1 to 2900 or 3054 to 4045 of SEQ ID NO: 1367.

[0133] In some embodiments, it has been found that single stranded oligonucleotides as disclosed herein may increase expression of mRNA corresponding to a gene by at least about 50% (i.e. 150% of normal or 1.5 fold), or by about 2 fold to about 5 fold. In some embodiments, expression may be increased by at least about 15 fold, 20 fold, 30 fold, 40 fold, 50 fold or 100 fold, or any range between any of the foregoing numbers. It has also been found that increased mRNA expression has been shown to correlate to increased protein expression.

[0134] In some or any of the embodiments of the oligonucleotides described herein, or processes for designing or synthesizing them, the oligonucleotides will upregulate gene expression and may specifically bind or specifically hybridize or be complementary to the PRC2 binding RNA that is transcribed from the same strand as a protein coding reference gene. The oligonucleotide may bind to a region of the PRC2 binding RNA that originates within or overlaps an intron, exon, intron exon junction, 5′ UTR, 3′ UTR, a translation initiation region, or a translation termination region of a protein coding sense strand of a reference gene (refGene).

[0135] In some or any of the embodiments of oligonucleotides described herein, or processes for designing or synthesizing them, the oligonucleotides will upregulate gene expression and may specifically bind or specifically hybridize or be complementary to a PRC2 binding RNA that transcribed from the opposite strand (the antisense strand) of a protein coding reference gene. The oligonucleotide may bind to a region of the PRC2 binding RNA that originates within or overlaps an intron, exon, intron exon junction, 5′ UTR, 3′ UTR, a translation initiation region, or a translation termination region of a protein coding antisense strand of a reference gene

[0136] The oligonucleotides described herein may be modified, e.g., comprise a modified sugar moiety, a modified internucleoside linkage, a modified nucleotide and/or combinations thereof. In addition, the oligonucleotides can exhibit one or more of the following properties: do not induce substantial cleavage or degradation of the target RNA; do not cause substantially complete cleavage or degradation of the target RNA; do not activate the RNAse H pathway; do not activate RISC; do not recruit any Argonaute family protein; are not cleaved by Dicer; do not mediate alternative splicing; are not immune stimulatory; are nuclease resistant; have improved cell uptake compared to unmodified oligonucleotides; are not toxic to cells or mammals; may have improved endosomal exit; do interfere with interaction of lncRNA with PRC2, preferably the Ezh2 subunit but optionally the Suz12, Eed, RbAp46/48 subunits or accessory factors such as Jarid2; do decrease histone H3 lysine27 methylation and/or do upregulate gene expression.

[0137] Oligonucleotides that are designed to interact with RNA to modulate gene expression are a distinct subset of base sequences from those that are designed to bind a DNA target (e.g., are complementary to the underlying genomic DNA sequence from which the RNA is transcribed).

[0138] Any of the oligonucleotides disclosed herein may be linked to one or more other oligonucleotides disclosed herein by a linker, e.g., a cleavable linker.

[0139] Method for Selecting Candidate Oligonucleotides for Activating Expression of a Target Gene

[0140] Methods are provided herein for selecting a candidate oligonucleotide for activating or enhancing expression of a target gene. The target selection methods may generally involve steps for selecting single stranded oligonucleotides having any of the structural and functional characteristics disclosed herein. Typically, the methods involve one or more steps aimed at identifying oligonucleotides that target a PRC2-associated region that is functionally related to the target gene, for example a PRC2-associated region of a lncRNA that regulates expression of the target gene by facilitating (e.g., in a cis-regulatory manner) the recruitment of PRC2 to the target gene. Such oligonucleotides are expected to be candidates for activating expression of the target gene because of their ability to hybridize with the PRC2-associated region of a nucleic acid (e.g., a lncRNA). In some embodiments, this hybridization event is understood to disrupt interaction of PRC2 with the nucleic acid (e.g., a lncRNA) and as a result disrupt recruitment of PRC2 and its associated co-repressors (e.g., chromatin remodeling factors) to the target gene locus.

[0141] Methods of selecting a candidate oligonucleotide may involve selecting a PRC2-associated region (e.g., a nucleotide sequence as set forth in any one of SEQ ID NOS: 115 to 1406) that maps to a chromosomal position encompassing or in proximity to the target gene (e.g., a chromosomal position having a sequence as set forth in any one of SEQ ID NOS: 1 to 114). The PRC2-associated region may map to the strand of the chromosome comprising the sense strand of the target gene, in which case the candidate oligonucleotide is complementary to the sense strand of the target gene (i.e., is antisense to the target gene). Alternatively, the PRC2-associated region may map to the strand of the first chromosome comprising the antisense strand of the target gene, in which case the oligonucleotide is complementary to the antisense strand (the template strand) of the target gene (i.e., is sense to the target gene).

[0142] Methods for selecting a set of candidate oligonucleotides that is enriched in oligonucleotides that activate expression of the target gene may involve selecting one or more PRC2-associated regions that map to a chromosomal position that encompasses or that is in proximity to the target gene and selecting a set of oligonucleotides, in which each oligonucleotide in the set comprises a nucleotide sequence that is complementary with the one or more PRC2-associated regions. As used herein, the phrase, “a set of oligonucleotides that is enriched in oligonucleotides that activate expression of” refers to a set of oligonucleotides that has a greater number of oligonucleotides that activate expression of a target gene (e.g., a gene listed in Table 4) compared with a random selection of oligonucleotides of the same physicochemical properties (e.g., the same GC content, Tₘ, length etc.) as the enriched set.

[0143] Where the design and/or synthesis of a single stranded oligonucleotide involves design and/or synthesis of a sequence that is complementary to a nucleic acid or PRC2-associated region described by such sequence information, the skilled person is readily able to determine the complementary sequence, e.g., through understanding of Watson Crick base pairing rules which form part of the common general knowledge in the field.

[0144] In some embodiments design and/or synthesis of a single stranded oligonucleotide involves manufacture of an oligonucleotide from starting materials by techniques known to those of skill in the art, where the synthesis may be based on a sequence of a PRC2-associated region, or portion thereof.

[0145] Methods of design and/or synthesis of a single stranded oligonucleotide may involve one or more of the steps of:

[0146] Identifying and/or selecting PRC2-associated region;

[0147] Designing a nucleic acid sequence having a desired degree of sequence identity or complementarity to a PRC2-associated region or a portion thereof;

[0148] Synthesizing a single stranded oligonucleotide to the designed sequence;

[0149] Purifying the synthesized single stranded oligonucleotide; and

[0150] Optionally mixing the synthesized single stranded oligonucleotide with at least one pharmaceutically acceptable diluent, carrier or excipient to form a pharmaceutical composition or medicament.

[0151] Single stranded oligonucleotides so designed and/or synthesized may be useful in method of modulating gene expression as described herein.

[0152] Preferably, single stranded oligonucleotides of the invention are synthesized chemically. Oligonucleotides used to practice this invention can be synthesized in vitro by well-known chemical synthesis techniques.

[0153] Oligonucleotides of the invention can be stabilized against nucleolytic degradation such as by the incorporation of a modification, e.g., a nucleotide modification. For example, nucleic acid sequences of the invention include a phosphorothioate at least the first, second, or third internucleotide linkage at the 5′ or 3′ end of the nucleotide sequence. As another example, the nucleic acid sequence can include a 2′-modified nucleotide, e.g., a 2′-deoxy, 2′-deoxy-2′-fluoro, 2′-O-methyl, 2′-O-methoxyethyl (2′-O-MOE), 2′-O-aminopropyl (2′-O-AP), 2′-O-dimethylaminoethyl (2′-O-DMAOE), 2′-O-dimethylaminopropyl (2′-O-DMAP), 2′-O-dimethylaminoethyloxyethyl (2′-O-DMAEOE), or 2′-O—N-methylacetamido (2′-O-NMA). As another example, the nucleic acid sequence can include at least one 2′-O-methyl-modified nucleotide, and in some embodiments, all of the nucleotides include a 2′-O-methyl modification. In some embodiments, the nucleic acids are “locked,” i.e., comprise nucleic acid analogues in which the ribose ring is “locked” by a methylene bridge connecting the 2′-O atom and the 4′-C atom.

[0154] It is understood that any of the modified chemistries or formats of single stranded oligonucleotides described herein can be combined with each other, and that one, two, three, four, five, or more different types of modifications can be included within the same molecule.

[0155] In some embodiments, the method may further comprise the steps of amplifying the synthesized single stranded oligonucleotide, and/or purifying the single stranded oligonucleotide (or amplified single stranded oligonucleotide), and/or sequencing the single stranded oligonucleotide so obtained.

[0156] As such, the process of preparing a single stranded oligonucleotide may be a process that is for use in the manufacture of a pharmaceutical composition or medicament for use in the treatment of disease, optionally wherein the treatment involves modulating expression of a gene associated with a PRC2-associated region.

[0157] In the methods described above a PRC2-associated region may be, or have been, identified, or obtained, by a method that involves identifying RNA that binds to PRC2.

[0158] Such methods may involve the following steps: providing a sample containing nuclear ribonucleic acids, contacting the sample with an agent that binds specifically to PRC2 or a subunit thereof, allowing complexes to form between the agent and protein in the sample, partitioning the complexes, synthesizing nucleic acid that is complementary to nucleic acid present in the complexes.

[0159] Where the single stranded oligonucleotide is based on a PRC2-associated region, or a portion of such a sequence, it may be based on information about that sequence, e.g., sequence information available in written or electronic form, which may include sequence information contained in publicly available scientific publications or sequence databases.

### Nucleotide Analogues

[0160] In some embodiments, the oligonucleotide may comprise at least one ribonucleotide, at least one deoxyribonucleotide, and/or at least one bridged nucleotide. In some embodiments, the oligonucleotide may comprise a bridged nucleotide, such as a locked nucleic acid (LNA) nucleotide, a constrained ethyl (cEt) nucleotide, or an ethylene bridged nucleic acid (ENA) nucleotide. Examples of such nucleotides are disclosed herein and known in the art. In some embodiments, the oligonucleotide comprises a nucleotide analog disclosed in one of the following United States patent or patent application Publications: U.S. Pat. No. 7,399,845, U.S. Pat. No. 7,741,457, U.S. Pat. No. 8,022,193, U.S. Pat. No. 7,569,686, U.S. Pat. No. 7,335,765, U.S. Pat. No. 7,314,923, U.S. Pat. No. 7,335,765, and U.S. Pat. No. 7,816,333, US 20110009471, the entire contents of each of which are incorporated herein by reference for all purposes. The oligonucleotide may have one or more 2′ O-methyl nucleotides. The oligonucleotide may consist entirely of 2′ O-methyl nucleotides.

[0161] Often the single stranded oligonucleotide has one or more nucleotide analogues. For example, the single stranded oligonucleotide may have at least one nucleotide analogue that results in an increase in Tₘ of the oligonucleotide in a range of 1° C., 2° C., 3° C., 4° C., or 5° C. compared with an oligonucleotide that does not have the at least one nucleotide analogue. The single stranded oligonucleotide may have a plurality of nucleotide analogues that results in a total increase in Tₘ of the oligonucleotide in a range of 2° C., 3° C., 4° C., 5° C., 6° C., 7° C., 8° C., 9° C., 10° C., 15° C., 20° C., 25° C., 30° C., 35° C., 40° C., 45° C. or more compared with an oligonucleotide that does not have the nucleotide analogue.

[0162] The oligonucleotide may be of up to 50 nucleotides in length in which 2 to 10, 2 to 15, 2 to 16, 2 to 17, 2 to 18, 2 to 19, 2 to 20, 2 to 25, 2 to 30, 2 to 40, 2 to 45, or more nucleotides of the oligonucleotide are nucleotide analogues. The oligonucleotide may be of 8 to 30 nucleotides in length in which 2 to 10, 2 to 15, 2 to 16, 2 to 17, 2 to 18, 2 to 19, 2 to 20, 2 to 25, 2 to 30 nucleotides of the oligonucleotide are nucleotide analogues. The oligonucleotide may be of 8 to 15 nucleotides in length in which 2 to 4, 2 to 5, 2 to 6, 2 to 7, 2 to 8, 2 to 9, 2 to 10, 2 to 11, 2 to 12, 2 to 13, 2 to 14 nucleotides of the oligonucleotide are nucleotide analogues. Optionally, the oligonucleotides may have every nucleotide except 1, 2, 3, 4, 5, 6, 7, 8, 9, or 10 nucleotides modified.

[0163] The oligonucleotide may consist entirely of bridged nucleotides (e.g., LNA nucleotides, cEt nucleotides, ENA nucleotides). The oligonucleotide may comprise alternating deoxyribonucleotides and 2′-fluoro-deoxyribonucleotides. The oligonucleotide may comprise alternating deoxyribonucleotides and 2′-O-methyl nucleotides. The oligonucleotide may comprise alternating deoxyribonucleotides and ENA nucleotide analogues. The oligonucleotide may comprise alternating deoxyribonucleotides and LNA nucleotides. The oligonucleotide may comprise alternating LNA nucleotides and 2′-O-methyl nucleotides. The oligonucleotide may have a 5′ nucleotide that is a bridged nucleotide (e.g., a LNA nucleotide, cEt nucleotide, ENA nucleotide). The oligonucleotide may have a 5′ nucleotide that is a deoxyribonucleotide.

[0164] The oligonucleotide may comprise deoxyribonucleotides flanked by at least one bridged nucleotide (e.g., a LNA nucleotide, cEt nucleotide, ENA nucleotide) on each of the 5′ and 3′ ends of the deoxyribonucleotides. The oligonucleotide may comprise deoxyribonucleotides flanked by 1, 2, 3, 4, 5, 6, 7, 8 or more bridged nucleotides (e.g., LNA nucleotides, cEt nucleotides, ENA nucleotides) on each of the 5′ and 3′ ends of the deoxyribonucleotides. The 3′ position of the oligonucleotide may have a 3′ hydroxyl group. The 3′ position of the oligonucleotide may have a 3′ thiophosphate.

[0165] The oligonucleotide may be conjugated with a label. For example, the oligonucleotide may be conjugated with a biotin moiety, cholesterol, Vitamin A, folate, sigma receptor ligands, aptamers, peptides, such as CPP, hydrophobic molecules, such as lipids, ASGPR or dynamic polyconjugates and variants thereof at its 5′ or 3′ end.

[0166] Preferably the single stranded oligonucleotide comprises one or more modifications comprising: a modified sugar moiety, and/or a modified internucleoside linkage, and/or a modified nucleotide and/or combinations thereof. It is not necessary for all positions in a given oligonucleotide to be uniformly modified, and in fact more than one of the modifications described herein may be incorporated in a single oligonucleotide or even at within a single nucleoside within an oligonucleotide.

[0167] In some embodiments, the single stranded oligonucleotides are chimeric oligonucleotides that contain two or more chemically distinct regions, each made up of at least one nucleotide. These oligonucleotides typically contain at least one region of modified nucleotides that confers one or more beneficial properties (such as, for example, increased nuclease resistance, increased uptake into cells, increased binding affinity for the target) and a region that is a substrate for enzymes capable of cleaving RNA:DNA or RNA:RNA hybrids. Chimeric single stranded oligonucleotides of the invention may be formed as composite structures of two or more oligonucleotides, modified oligonucleotides, oligonucleosides and/or oligonucleotide mimetics as described above. Such compounds have also been referred to in the art as hybrids or gapmers. Representative United States patents that teach the preparation of such hybrid structures comprise, but are not limited to, U.S. Pat. Nos. 5,013,830; 5,149,797; 5,220,007; 5,256,775; 5,366,878; 5,403,711; 5,491,133; 5,565,350; 5,623,065; 5,652,355; 5,652,356; and 5,700,922, each of which is herein incorporated by reference.

[0168] In some embodiments, the single stranded oligonucleotide comprises at least one nucleotide modified at the 2′ position of the sugar, most preferably a 2′-O-alkyl, 2′-O-alkyl-O-alkyl or 2′-fluoro-modified nucleotide. In other preferred embodiments, RNA modifications include 2′-fluoro, 2′-amino and 2′ O-methyl modifications on the ribose of pyrimidines, abasic residues or an inverted base at the 3′ end of the RNA. Such modifications are routinely incorporated into oligonucleotides and these oligonucleotides have been shown to have a higher Tm (i.e., higher target binding affinity) than 2′-deoxyoligonucleotides against a given target.

[0169] A number of nucleotide and nucleoside modifications have been shown to make the oligonucleotide into which they are incorporated more resistant to nuclease digestion than the native oligodeoxynucleotide; these modified oligos survive intact for a longer time than unmodified oligonucleotides. Specific examples of modified oligonucleotides include those comprising modified backbones, for example, phosphorothioates, phosphotriesters, methyl phosphonates, short chain alkyl or cycloalkyl intersugar linkages or short chain heteroatomic or heterocyclic intersugar linkages. Most preferred are oligonucleotides with phosphorothioate backbones and those with heteroatom backbones, particularly CH₂—NH—O—CH₂, CH, ˜N(CH₃)˜O˜CH₂ (known as a methylene(methylimino) or MMI backbone, CH₂—O—N(CH₃)—CH₂, CH₂—N(CH₃)—N(CH₃)—CH₂ and O—N(CH₃)—CH₂—CH₂ backbones, wherein the native phosphodiester backbone is represented as O—P—O—CH,); amide backbones (see De Mesmaeker et al. Ace. Chem. Res. 1995, 28:366-374); morpholino backbone structures (see Summerton and Weller, U.S. Pat. No. 5,034,506); peptide nucleic acid (PNA) backbone (wherein the phosphodiester backbone of the oligonucleotide is replaced with a polyamide backbone, the nucleotides being bound directly or indirectly to the aza nitrogen atoms of the polyamide backbone, see Nielsen et al., Science 1991, 254, 1497). Phosphorus-containing linkages include, but are not limited to, phosphorothioates, chiral phosphorothioates, phosphorodithioates, phosphotriesters, aminoalkylphosphotriesters, methyl and other alkyl phosphonates comprising 3′alkylene phosphonates and chiral phosphonates, phosphinates, phosphoramidates comprising 3′-amino phosphoramidate and aminoalkylphosphoramidates, thionophosphoramidates, thionoalkylphosphonates, thionoalkylphosphotriesters, and boranophosphates having normal 3′-5′ linkages, 2′-5′ linked analogs of these, and those having inverted polarity wherein the adjacent pairs of nucleoside units are linked 3′-5′ to 5′-3′ or 2′-5′ to 5′-2′; see U.S. Pat. Nos. 3,687,808; 4,469,863; 4,476,301; 5,023,243; 5,177,196; 5,188,897; 5,264,423; 5,276,019; 5,278,302; 5,286,717; 5,321,131; 5,399,676; 5,405,939; 5,453,496; 5,455, 233; 5,466,677; 5,476,925; 5,519,126; 5,536,821; 5,541,306; 5,550,111; 5,563, 253; 5,571,799; 5,587,361; and 5,625,050.

[0170] Morpholino-based oligomeric compounds are described in Dwaine A. Braasch and David R. Corey, Biochemistry, 2002, 41(14), 4503-4510); Genesis, volume 30, issue 3, 2001; Heasman, J., Dev. Biol., 2002, 243, 209-214; Nasevicius et al., Nat. Genet., 2000, 26, 216-220; Lacerra et al., Proc. Natl. Acad. Sci., 2000, 97, 9591-9596; and U.S. Pat. No. 5,034,506, issued Jul. 23, 1991. In some embodiments, the morpholino-based oligomeric compound is a phosphorodiamidate morpholino oligomer (PMO) (e.g., as described in Iverson, Curr. Opin. Mol. Ther., 3:235-238, 2001; and Wang et al., J. Gene Med., 12:354-364, 2010; the disclosures of which are incorporated herein by reference in their entireties).

[0171] Cyclohexenyl nucleic acid oligonucleotide mimetics are described in Wang et al., J. Am. Chem. Soc., 2000, 122, 8595-8602.

[0172] Modified oligonucleotide backbones that do not include a phosphorus atom therein have backbones that are formed by short chain alkyl or cycloalkyl internucleoside linkages, mixed heteroatom and alkyl or cycloalkyl internucleoside linkages, or one or more short chain heteroatomic or heterocyclic internucleoside linkages. These comprise those having morpholino linkages (formed in part from the sugar portion of a nucleoside); siloxane backbones; sulfide, sulfoxide and sulfone backbones; formacetyl and thioformacetyl backbones; methylene formacetyl and thioformacetyl backbones; alkene containing backbones; sulfamate backbones; methyleneimino and methylenehydrazino backbones; sulfonate and sulfonamide backbones; amide backbones; and others having mixed N, O, S and CH2 component parts; see U.S. Pat. Nos. 5,034,506; 5,166,315; 5,185,444; 5,214,134; 5,216,141; 5,235,033; 5,264,562; 5,264,564; 5,405,938; 5,434,257; 5,466,677; 5,470,967; 5,489,677; 5,541,307; 5,561,225; 5,596,086; 5,602,240; 5,610,289; 5,602,240; 5,608,046; 5,610,289; 5,618,704; 5,623,070; 5,663,312; 5,633,360; 5,677,437; and 5,677,439, each of which is herein incorporated by reference.

[0173] Modified oligonucleotides are also known that include oligonucleotides that are based on or constructed from arabinonucleotide or modified arabinonucleotide residues. Arabinonucleosides are stereoisomers of ribonucleosides, differing only in the configuration at the 2′-position of the sugar ring. In some embodiments, a 2′-arabino modification is 2′-F arabino. In some embodiments, the modified oligonucleotide is 2′-fluoro-D-arabinonucleic acid (FANA) (as described in, for example, Lon et al., Biochem., 41:3457-3467, 2002 and Min et al., Bioorg. Med. Chem. Lett., 12:2651-2654, 2002; the disclosures of which are incorporated herein by reference in their entireties). Similar modifications can also be made at other positions on the sugar, particularly the 3′ position of the sugar on a 3′ terminal nucleoside or in 2′-5′ linked oligonucleotides and the 5′ position of 5′ terminal nucleotide.

[0174] PCT Publication No. WO 99/67378 discloses arabinonucleic acids (ANA) oligomers and their analogues for improved sequence specific inhibition of gene expression via association to complementary messenger RNA.

[0175] Other preferred modifications include ethylene-bridged nucleic acids (ENAs) (e.g., International Patent Publication No. WO 2005/042777, Morita et al., Nucleic Acid Res., Suppl 1:241-242, 2001; Surono et al., Hum. Gene Ther., 15:749-757, 2004; Koizumi, Curr. Opin. Mol. Ther., 8:144-149, 2006 and Horie et al., Nucleic Acids Symp. Ser (Oxf), 49:171-172, 2005; the disclosures of which are incorporated herein by reference in their entireties). Preferred ENAs include, but are not limited to, 2′-O,4′-C-ethylene-bridged nucleic acids.

[0176] Examples of LNAs are described in WO/2008/043753 and include compounds of the following general formula.

[chemical structure]

[0177] where X and Y are independently selected among the groups —O—,

[0178] —S—, —N(H)—, N(R)—, —CH₂— or —CH— (if part of a double bond),

[0179] —CH₂—O—, —CH₂—S—, —CH₂—N(H)—, —CH₂—N(R)—, —CH₂—CH₂— or —CH₂—CH— (if part of a double bond),

[0180] —CH═CH—, where R is selected from hydrogen and C₁₋₄-alkyl; Z and Z* are independently selected among an internucleoside linkage, a terminal group or a protecting group; B constitutes a natural or non-natural nucleotide base moiety; and the asymmetric groups may be found in either orientation.

[0181] Preferably, the LNA used in the oligonucleotides described herein comprises at least one LNA unit according any of the formulas

[chemical structure]

[0182] wherein Y is —O—, —S—, —NH—, or N(R^{H}); Z and Z* are independently selected among an internucleoside linkage, a terminal group or a protecting group; B constitutes a natural or non-natural nucleotide base moiety, and RH is selected from hydrogen and C₁₋₄-alkyl.

[0183] In some embodiments, the Locked Nucleic Acid (LNA) used in the oligonucleotides described herein comprises at least one Locked Nucleic Acid (LNA) unit according any of the formulas shown in Scheme 2 of PCT/DK2006/000512.

[0184] In some embodiments, the LNA used in the oligomer of the invention comprises internucleoside linkages selected from -0-P(O)₂—O—, -0-P(O,S)—O—, -0-P(S)₂—O—, —S—P(O)₂—O—, —S—P(O,S)—O—, —S—P(S)₂—O—, -0-P(O)₂—S—, —O—P(O,S)—S—, —S—P(O)₂—S—, —O—PO(R^{H})—O—, O—PO(OCH₃)—O—, —O—PO(NR^{H})—O—, —O—PO(OCH₂CH₂S—R)—O—, —O—PO(BH₃)—O—, —O—PO(NHR^{H})—O—, —O—P(O)₂—NR^{H}—, —NR^{H}—P(O)₂—O—, —NR^{H}—CO—O—, where R^{H} is selected from hydrogen and C₁₋₄-alkyl.

[0185] Specifically preferred LNA units are shown in scheme 2:

[chemical structure]

[0186] The term “thio-LNA” comprises a locked nucleotide in which at least one of X or Y in the general formula above is selected from S or —CH₂—S—. Thio-LNA can be in both beta-D and alpha-L-configuration.

[0187] The term “amino-LNA” comprises a locked nucleotide in which at least one of X or Y in the general formula above is selected from —N(H)—, N(R)—, CH₂—N(H)—, and —CH₂—N(R)— where R is selected from hydrogen and C₁₋₄-alkyl. Amino-LNA can be in both beta-D and alpha-L-configuration.

[0188] The term “oxy-LNA” comprises a locked nucleotide in which at least one of X or Y in the general formula above represents —O— or —CH₂—O—. Oxy-LNA can be in both beta-D and alpha-L-configuration.

[0189] The term “ena-LNA” comprises a locked nucleotide in which Y in the general formula above is —CH₂—O— (where the oxygen atom of —CH₂—O— is attached to the 2′-position relative to the base B).

[0190] LNAs are described in additional detail herein.

[0191] One or more substituted sugar moieties can also be included, e.g., one of the following at the 2′ position: OH, SH, SCH₃, F, OCN, OCH₃OCH₃, OCH₃O(CH₂)nCH₃, O(CH₂)nNH₂ or O(CH₂)nCH₃ where n is from 1 to about 10; C1 to C10 lower alkyl, alkoxyalkoxy, substituted lower alkyl, alkaryl or aralkyl; Cl; Br; CN; CF₃; OCF₃; O—, S—, or N-alkyl; O—, S—, or N-alkenyl; SOCH₃; SO₂CH₃; ONO₂; NO₂, N₃; NH2; heterocycloalkyl; heterocycloalkaryl; amino alkylamino; polyalkylamino; substituted silyl; an RNA cleaving group; a reporter group; an intercalator; a group for improving the pharmacokinetic properties of an oligonucleotide; or a group for improving the pharmacodynamic properties of an oligonucleotide and other substituents having similar properties. A preferred modification includes 2′-methoxyethoxy [2′-O—CH₂CH₂OCH₃, also known as 2′-O-(2-methoxyethyl)] (Martin et al, HeIv. Chim. Acta, 1995, 78, 486). Other preferred modifications include 2′-methoxy (2′-O—CH₃), 2′-propoxy (2′-OCH₂CH₂CH₃) and 2′-fluoro (2′-F). Similar modifications may also be made at other positions on the oligonucleotide, particularly the 3′ position of the sugar on the 3′ terminal nucleotide and the 5′ position of 5′ terminal nucleotide. Oligonucleotides may also have sugar mimetics such as cyclobutyls in place of the pentofuranosyl group.

[0192] Single stranded oligonucleotides can also include, additionally or alternatively, nucleobase (often referred to in the art simply as “base”) modifications or substitutions. As used herein, “unmodified” or “natural” nucleobases include adenine (A), guanine (G), thymine (T), cytosine (C) and uracil (U). Modified nucleobases include nucleobases found only infrequently or transiently in natural nucleic acids, e.g., hypoxanthine, 6-methyladenine, 5-Me pyrimidines, particularly 5-methylcytosine (also referred to as 5-methyl-2′ deoxycytosine and often referred to in the art as 5-Me-C), 5-hydroxymethylcytosine (HMC), glycosyl HMC and gentobiosyl HMC, isocytosine, pseudoisocytosine, as well as synthetic nucleobases, e.g., 2-aminoadenine, 2-(methylamino)adenine, 2-(imidazolylalkyl)adenine, 2-(aminoalklyamino)adenine or other heterosubstituted alkyladenines, 2-thiouracil, 2-thiothymine, 5-bromouracil, 5-hydroxymethyluracil, 5-propynyluracil, 8-azaguanine, 7-deazaguanine, N6 (6-aminohexyl)adenine, 6-aminopurine, 2-aminopurine, 2-chloro-6-aminopurine and 2,6-diaminopurine or other diaminopurines. See, e.g., Kornberg, “DNA Replication,” W. H. Freeman & Co., San Francisco, 1980, pp 75-77; and Gebeyehu, G., et al. Nucl. Acids Res., 15:4513 (1987)). A “universal” base known in the art, e.g., inosine, can also be included. 5-Me-C substitutions have been shown to increase nucleic acid duplex stability by 0.6-1.2° C. (Sanghvi, in Crooke, and Lebleu, eds., Antisense Research and Applications, CRC Press, Boca Raton, 1993, pp. 276-278) and may be used as base substitutions.

[0193] It is not necessary for all positions in a given oligonucleotide to be uniformly modified, and in fact more than one of the modifications described herein may be incorporated in a single oligonucleotide or even at within a single nucleoside within an oligonucleotide.

[0194] In some embodiments, both a sugar and an internucleoside linkage, i.e., the backbone, of the nucleotide units are replaced with novel groups. The base units are maintained for hybridization with an appropriate nucleic acid target compound. One such oligomeric compound, an oligonucleotide mimetic that has been shown to have excellent hybridization properties, is referred to as a peptide nucleic acid (PNA). In PNA compounds, the sugar-backbone of an oligonucleotide is replaced with an amide containing backbone, for example, an aminoethylglycine backbone. The nucleobases are retained and are bound directly or indirectly to aza nitrogen atoms of the amide portion of the backbone. Representative United States patents that teach the preparation of PNA compounds include, but are not limited to, U.S. Pat. Nos. 5,539,082; 5,714,331; and 5,719,262, each of which is herein incorporated by reference. Further teaching of PNA compounds can be found in Nielsen et al, Science, 1991, 254, 1497-1500.

[0195] Single stranded oligonucleotides can also include one or more nucleobase (often referred to in the art simply as “base”) modifications or substitutions. As used herein, “unmodified” or “natural” nucleobases comprise the purine bases adenine (A) and guanine (G), and the pyrimidine bases thymine (T), cytosine (C) and uracil (U). Modified nucleobases comprise other synthetic and natural nucleobases such as 5-methylcytosine (5-me-C), 5-hydroxymethyl cytosine, xanthine, hypoxanthine, 2-aminoadenine, 6-methyl and other alkyl derivatives of adenine and guanine, 2-propyl and other alkyl derivatives of adenine and guanine, 2-thiouracil, 2-thiothymine and 2-thiocytosine, 5-halouracil and cytosine, 5-propynyl uracil and cytosine, 6-azo uracil, cytosine and thymine, 5-uracil (pseudo-uracil), 4-thiouracil, 8-halo, 8-amino, 8-thiol, 8-thioalkyl, 8-hydroxyl and other 8-substituted adenines and guanines, 5-halo particularly 5-bromo, 5-trifluoromethyl and other 5-substituted uracils and cytosines, 7-methylquanine and 7-methyladenine, 8-azaguanine and 8-azaadenine, 7-deazaguanine and 7-deazaadenine and 3-deazaguanine and 3-deazaadenine.

[0196] Further, nucleobases comprise those disclosed in U.S. Pat. No. 3,687,808, those disclosed in “The Concise Encyclopedia of Polymer Science And Engineering”, pages 858-859, Kroschwitz, ed. John Wiley & Sons, 1990; those disclosed by Englisch et al., Angewandle Chemie, International Edition, 1991, 30, page 613, and those disclosed by Sanghvi, Chapter 15, Antisense Research and Applications,” pages 289-302, Crooke, and Lebleu, eds., CRC Press, 1993. Certain of these nucleobases are particularly useful for increasing the binding affinity of the oligomeric compounds of the invention. These include 5-substituted pyrimidines, 6-azapyrimidines and N-2, N-6 and 0-6 substituted purines, comprising 2-aminopropyladenine, 5-propynyluracil and 5-propynylcytosine. 5-methylcytosine substitutions have been shown to increase nucleic acid duplex stability by 0.6-1.2<0>C (Sanghvi, et al., eds, “Antisense Research and Applications,” CRC Press, Boca Raton, 1993, pp. 276-278) and are presently preferred base substitutions, even more particularly when combined with 2′-O-methoxyethyl sugar modifications. Modified nucleobases are described in U.S. Pat. No. 3,687,808, as well as U.S. Pat. No. 4,845,205; U.S. Pat. No. 5,130,302; U.S. Pat. No. 5,134,066; U.S. Pat. No. 5,175,273; U.S. Pat. No. 5,367,066; U.S. Pat. No. 5,432,272; U.S. Pat. No. 5,457,187; U.S. Pat. No. 5,459,255; U.S. Pat. No. 5,484,908; U.S. Pat. No. 5,502,177; U.S. Pat. No. 5,525,711; U.S. Pat. No. 5,552,540; U.S. Pat. No. 5,587,469; U.S. Pat. No. 5,596,091; U.S. Pat. No. 5,614,617; U.S. Pat. No. 5,750,692, and U.S. Pat. No. 5,681,941, each of which is herein incorporated by reference.

[0197] In some embodiments, the single stranded oligonucleotides are chemically linked to one or more moieties or conjugates that enhance the activity, cellular distribution, or cellular uptake of the oligonucleotide. For example, one or more single stranded oligonucleotides, of the same or different types, can be conjugated to each other; or single stranded oligonucleotides can be conjugated to targeting moieties with enhanced specificity for a cell type or tissue type. Such moieties include, but are not limited to, lipid moieties such as a cholesterol moiety (Letsinger et al., Proc. Natl. Acad. Sci. USA, 1989, 86, 6553-6556), cholic acid (Manoharan et al., Bioorg. Med. Chem. Let., 1994, 4, 1053-1060), a thioether, e.g., hexyl-S— tritylthiol (Manoharan et al, Ann. N. Y. Acad. Sci., 1992, 660, 306-309; Manoharan et al., Bioorg. Med. Chem. Let., 1993, 3, 2765-2770), a thiocholesterol (Oberhauser et al., Nucl. Acids Res., 1992, 20, 533-538), an aliphatic chain, e.g., dodecandiol or undecyl residues (Kabanov et al., FEBS Lett., 1990, 259, 327-330; Svinarchuk et al., Biochimie, 1993, 75, 49-54), a phospholipid, e.g., di-hexadecyl-rac-glycerol or triethylammonium 1,2-di-O-hexadecyl-rac-glycero-3-H-phosphonate (Manoharan et al., Tetrahedron Lett., 1995, 36, 3651-3654; Shea et al., Nucl. Acids Res., 1990, 18, 3777-3783), a polyamine or a polyethylene glycol chain (Mancharan et al., Nucleosides & Nucleotides, 1995, 14, 969-973), or adamantane acetic acid (Manoharan et al., Tetrahedron Lett., 1995, 36, 3651-3654), a palmityl moiety (Mishra et al., Biochim. Biophys. Acta, 1995, 1264, 229-237), or an octadecylamine or hexylamino-carbonyl-t oxycholesterol moiety (Crooke et al., J. Pharmacol. Exp. Ther., 1996, 277, 923-937). See also U.S. Pat. Nos. 4,828,979; 4,948,882; 5,218,105; 5,525,465; 5,541,313; 5,545,730; 5,552,538; 5,578,717, 5,580,731; 5,580,731; 5,591,584; 5,109,124; 5,118,802; 5,138,045; 5,414,077; 5,486,603; 5,512,439; 5,578,718; 5,608,046; 4,587,044; 4,605,735; 4,667,025; 4,762,779; 4,789,737; 4,824,941; 4,835,263; 4,876,335; 4,904,582; 4,958,013; 5,082,830; 5,112,963; 5,214,136; 5,082,830; 5,112,963; 5,214,136; 5,245,022; 5,254,469; 5,258,506; 5,262,536; 5,272,250; 5,292,873; 5,317,098; 5,371,241, 5,391,723; 5,416,203, 5,451,463; 5,510,475; 5,512,667; 5,514,785; 5,565,552; 5,567,810; 5,574,142; 5,585,481; 5,587,371; 5,595,726; 5,597,696; 5,599,923; 5,599,928 and 5,688,941, each of which is herein incorporated by reference.

[0198] These moieties or conjugates can include conjugate groups covalently bound to functional groups such as primary or secondary hydroxyl groups. Conjugate groups of the invention include intercalators, reporter molecules, polyamines, polyamides, polyethylene glycols, polyethers, groups that enhance the pharmacodynamic properties of oligomers, and groups that enhance the pharmacokinetic properties of oligomers. Typical conjugate groups include cholesterols, lipids, phospholipids, biotin, phenazine, folate, phenanthridine, anthraquinone, acridine, fluoresceins, rhodamines, coumarins, and dyes. Groups that enhance the pharmacodynamic properties, in the context of this invention, include groups that improve uptake, enhance resistance to degradation, and/or strengthen sequence-specific hybridization with the target nucleic acid. Groups that enhance the pharmacokinetic properties, in the context of this invention, include groups that improve uptake, distribution, metabolism or excretion of the compounds of the present invention. Representative conjugate groups are disclosed in International Patent Application No. PCT/US92/09196, filed Oct. 23, 1992, and U.S. Pat. No. 6,287,860, which are incorporated herein by reference. Conjugate moieties include, but are not limited to, lipid moieties such as a cholesterol moiety, cholic acid, a thioether, e.g., hexyl-5-tritylthiol, a thiocholesterol, an aliphatic chain, e.g., dodecandiol or undecyl residues, a phospholipid, e.g., di-hexadecyl-rac-glycerol or triethylammonium 1,2-di-O-hexadecyl-rac-glycero-3-H-phosphonate, a polyamine or a polyethylene glycol chain, or adamantane acetic acid, a palmityl moiety, or an octadecylamine or hexylamino-carbonyl-oxy cholesterol moiety. See, e.g., U.S. Pat. Nos. 4,828,979; 4,948,882; 5,218,105; 5,525,465; 5,541,313; 5,545,730; 5,552,538; 5,578,717, 5,580,731; 5,580,731; 5,591,584; 5,109,124; 5,118,802; 5,138,045; 5,414,077; 5,486,603; 5,512,439; 5,578,718; 5,608,046; 4,587,044; 4,605,735; 4,667,025; 4,762,779; 4,789,737; 4,824,941; 4,835,263; 4,876,335; 4,904,582; 4,958,013; 5,082,830; 5,112,963; 5,214,136; 5,082,830; 5,112,963; 5,214,136; 5,245,022; 5,254,469; 5,258,506; 5,262,536; 5,272,250; 5,292,873; 5,317,098; 5,371,241, 5,391,723; 5,416,203, 5,451,463; 5,510,475; 5,512,667; 5,514,785; 5,565,552; 5,567,810; 5,574,142; 5,585,481; 5,587,371; 5,595,726; 5,597,696; 5,599,923; 5,599,928 and 5,688,941.

[0199] In some embodiments, single stranded oligonucleotide modification include modification of the 5′ or 3′ end of the oligonucleotide. In some embodiments, the 3′ end of the oligonucleotide comprises a hydroxyl group or a thiophosphate. It should be appreciated that additional molecules (e.g. a biotin moiety or a fluorophor) can be conjugated to the 5′ or 3′ end of the single stranded oligonucleotide. In some embodiments, the single stranded oligonucleotide comprises a biotin moiety conjugated to the 5′ nucleotide.

[0200] In some embodiments, the single stranded oligonucleotide comprises locked nucleic acids (LNA), ENA modified nucleotides, 2′-O-methyl nucleotides, or 2′-fluoro-deoxyribonucleotides. In some embodiments, the single stranded oligonucleotide comprises alternating deoxyribonucleotides and 2′-fluoro-deoxyribonucleotides. In some embodiments, the single stranded oligonucleotide comprises alternating deoxyribonucleotides and 2′-O-methyl nucleotides. In some embodiments, the single stranded oligonucleotide comprises alternating deoxyribonucleotides and ENA modified nucleotides. In some embodiments, the single stranded oligonucleotide comprises alternating deoxyribonucleotides and locked nucleic acid nucleotides. In some embodiments, the single stranded oligonucleotide comprises alternating locked nucleic acid nucleotides and 2′-O-methyl nucleotides.

[0201] In some embodiments, the 5′ nucleotide of the oligonucleotide is a deoxyribonucleotide. In some embodiments, the 5′ nucleotide of the oligonucleotide is a locked nucleic acid nucleotide. In some embodiments, the nucleotides of the oligonucleotide comprise deoxyribonucleotides flanked by at least one locked nucleic acid nucleotide on each of the 5′ and 3′ ends of the deoxyribonucleotides. In some embodiments, the nucleotide at the 3′ position of the oligonucleotide has a 3′ hydroxyl group or a 3′ thiophosphate.

[0202] In some embodiments, the single stranded oligonucleotide comprises phosphorothioate internucleotide linkages. In some embodiments, the single stranded oligonucleotide comprises phosphorothioate internucleotide linkages between at least two nucleotides. In some embodiments, the single stranded oligonucleotide comprises phosphorothioate internucleotide linkages between all nucleotides.

[0203] It should be appreciated that the single stranded oligonucleotide can have any combination of modifications as described herein.

[0204] The oligonucleotide may comprise a nucleotide sequence having one or more of the following modification patterns.

[0205] (a) (X)Xxxxxx, (X)xXxxxx, (X)xxXxxx, (X)xxxXxx, (X)xxxxXx and (X)xxxxxX,

[0206] (b) (X)XXxxxx, (X)XxXxxx, (X)XxxXxx, (X)XxxxXx, (X)XxxxxX, (X)xXXxxx, (X)xXxXxx, (X)xXxxXx, (X)xXxxxX, (X)xxXXxx, (X)xxXxXx, (X)xxXxxX, (X)xxxXXx, (X)xxxXxX and (X)xxxxXX,

[0207] (c) (X)XXXxxx, (X)xXXXxx, (X)xxXXXx, (X)xxxXXX, (X)XXxXxx, (X)XXxxXx, (X)XXxxxX, (X)xXXxXx, (X)xXXxxX, (X)xxXXxX, (X)XxXXxx, (X)XxxXXx (X)XxxxXX, (X)xXxXXx, (X)xXxxXX, (X)xxXxXX, (X)xXxXxX and (X)XxXxXx,

[0208] (d) (X)xxXXX, (X)xXxXXX, (X)xXXxXX, (X)xXXXxX, (X)xXXXXx, (X)XxxXXXX, (X)XxXxXX, (X)XxXXxX, (X)XxXXx, (X)XXxxXX, (X)XXxXxX, (X)XXxXXx, (X)XXXxxX, (X)XXXxXx, and (X)XXXXxx,

[0209] (e) (X)xXXXXX, (X)XxXXXX, (X)XXxXXX, (X)XXXxXX, (X)XXXXxX and (X)XXXXXx, and

[0210] (f) XXXXXX, XxXXXXX, XXxXXXX, XXXxXXX, XXXXxXX, XXXXXxX and XXXXXXx, in which “X” denotes a nucleotide analogue, (X) denotes an optional nucleotide analogue, and “x” denotes a DNA or RNA nucleotide unit. Each of the above listed patterns may appear one or more times within an oligonucleotide, alone or in combination with any of the other disclosed modification patterns.

### Methods for Modulating Gene Expression

[0211] In one aspect, the invention relates to methods for modulating gene expression in a cell (e.g., a cell for which levels of a target gene are reduced) for research purposes (e.g., to study the function of the gene in the cell). In another aspect, the invention relates to methods for modulating gene expression in a cell (e.g., a cell for which levels of a target gene are reduced) for gene or epigenetic therapy. The cells can be in vitro, ex vivo, or in vivo (e.g., in a subject who has a disease resulting from reduced expression or activity of the target gene. In some embodiments, methods for modulating gene expression in a cell comprise delivering a single stranded oligonucleotide as described herein. In some embodiments, delivery of the single stranded oligonucleotide to the cell results in a level of expression of gene that is at least 5%, 10%, 20%, 30%, 40%, 50%, 60%, 70%, 80%, 90%, 100%, 200% or more greater than a level of expression of gene in a control cell to which the single stranded oligonucleotide has not been delivered. In certain embodiments, delivery of the single stranded oligonucleotide to the cell results in a level of expression of gene that is at least 50% greater than a level of expression of gene in a control cell to which the single stranded oligonucleotide has not been delivered.

[0212] In another aspect of the invention, methods comprise administering to a subject (e.g. a human) a composition comprising a single stranded oligonucleotide as described herein to increase protein levels in the subject. In some embodiments, the increase in protein levels is at least 5%, 10%, 20%, 30%, 40%, 50%, 60%, 70%, 80%, 90%, 100%, 200%, or more, higher than the amount of a protein in the subject before administering.

[0213] As another example, to increase expression of the target gene in a cell, the methods include introducing into the cell a single stranded oligonucleotide that is sufficiently complementary to a PRC2-associated region (e.g., of a long non-coding RNA) that maps to a genomic position encompassing or in proximity to the target gene.

[0214] In another aspect of the invention provides methods of treating a condition (e.g., a disease listed in Table 4) associated with decreased levels of expression of a target gene in a subject, the method comprising administering a single stranded oligonucleotide as described herein.

[0215] A subject can include a non-human mammal, e.g. mouse, rat, guinea pig, rabbit, cat, dog, goat, cow, or horse. In preferred embodiments, a subject is a human. Single stranded oligonucleotides have been employed as therapeutic moieties in the treatment of disease states in animals, including humans. Single stranded oligonucleotides can be useful therapeutic modalities that can be configured to be useful in treatment regimes for the treatment of cells, tissues and animals, especially humans.

[0216] For therapeutics, an animal, preferably a human, suspected of having a disease associated with reduced expression levels of the target gene is treated by administering single stranded oligonucleotide in accordance with this invention. For example, in one non-limiting embodiment, the methods comprise the step of administering to the animal in need of treatment, a therapeutically effective amount of a single stranded oligonucleotide as described herein.

### Formulation, Delivery, And Dosing

[0217] The oligonucleotides described herein can be formulated for administration to a subject for treating a condition (e.g., a disease of Table 4 or otherwise disclosed herein) associated with decreased levels of a target gene. It should be understood that the formulations, compositions and methods can be practiced with any of the oligonucleotides disclosed herein.

[0218] The formulations may conveniently be presented in unit dosage form and may be prepared by any methods well known in the art of pharmacy. The amount of active ingredient (e.g., an oligonucleotide or compound of the invention) which can be combined with a carrier material to produce a single dosage form will vary depending upon the host being treated, the particular mode of administration, e.g., intradermal or inhalation. The amount of active ingredient which can be combined with a carrier material to produce a single dosage form will generally be that amount of the compound which produces a therapeutic effect, e.g. tumor regression. Pharmaceutical formulations of this invention can be prepared according to any method known to the art for the manufacture of pharmaceuticals. Such formulations can contain sweetening agents, flavoring agents, coloring agents and preserving agents. A formulation can be admixtured with nontoxic pharmaceutically acceptable excipients which are suitable for manufacture. Formulations may comprise one or more diluents, emulsifiers, preservatives, buffers, excipients, etc. and may be provided in such forms as liquids, powders, emulsions, lyophilized powders, sprays, creams, lotions, controlled release formulations, tablets, pills, gels, on patches, in implants, etc.

[0219] A formulated single stranded oligonucleotide composition can assume a variety of states. In some examples, the composition is at least partially crystalline, uniformly crystalline, and/or anhydrous (e.g., less than 80, 50, 30, 20, or 10% water). In another example, the single stranded oligonucleotide is in an aqueous phase, e.g., in a solution that includes water. The aqueous phase or the crystalline compositions can, e.g., be incorporated into a delivery vehicle, e.g., a liposome (particularly for the aqueous phase) or a particle (e.g., a microparticle as can be appropriate for a crystalline composition). Generally, the single stranded oligonucleotide composition is formulated in a manner that is compatible with the intended method of administration.

[0220] In some embodiments, the composition is prepared by at least one of the following methods: spray drying, lyophilization, vacuum drying, evaporation, fluid bed drying, or a combination of these techniques; or sonication with a lipid, freeze-drying, condensation and other self-assembly.

[0221] A single stranded oligonucleotide preparation can be formulated or administered (together or separately) in combination with another agent, e.g., another therapeutic agent or an agent that stabilizes a single stranded oligonucleotide, e.g., a protein that complexes with single stranded oligonucleotide. Still other agents include chelators, e.g., EDTA (e.g., to remove divalent cations such as Mg²⁺), salts, RNAse inhibitors (e.g., a broad specificity RNAse inhibitor such as RNAsin) and so forth.

[0222] In one embodiment, the single stranded oligonucleotide preparation includes another single stranded oligonucleotide, e.g., a second single stranded oligonucleotide that modulates expression of a second gene or a second single stranded oligonucleotide that modulates expression of the first gene. Still other preparation can include at least 3, 5, ten, twenty, fifty, or a hundred or more different single stranded oligonucleotide species. Such single stranded oligonucleotides can mediated gene expression with respect to a similar number of different genes. In one embodiment, the single stranded oligonucleotide preparation includes at least a second therapeutic agent (e.g., an agent other than an oligonucleotide).

### Route of Delivery

[0223] A composition that includes a single stranded oligonucleotide can be delivered to a subject by a variety of routes. Exemplary routes include: intravenous, intradermal, topical, rectal, parenteral, anal, intravaginal, intranasal, pulmonary, ocular. The term “therapeutically effective amount” is the amount of oligonucleotide present in the composition that is needed to provide the desired level of target gene expression in the subject to be treated to give the anticipated physiological response. The term “physiologically effective amount” is that amount delivered to a subject to give the desired palliative or curative effect. The term “pharmaceutically acceptable carrier” means that the carrier can be administered to a subject with no significant adverse toxicological effects to the subject.

[0224] The single stranded oligonucleotide molecules of the invention can be incorporated into pharmaceutical compositions suitable for administration. Such compositions typically include one or more species of single stranded oligonucleotide and a pharmaceutically acceptable carrier. As used herein the language “pharmaceutically acceptable carrier” is intended to include any and all solvents, dispersion media, coatings, antibacterial and antifungal agents, isotonic and absorption delaying agents, and the like, compatible with pharmaceutical administration. The use of such media and agents for pharmaceutically active substances is well known in the art. Except insofar as any conventional media or agent is incompatible with the active compound, use thereof in the compositions is contemplated. Supplementary active compounds can also be incorporated into the compositions.

[0225] The pharmaceutical compositions of the present invention may be administered in a number of ways depending upon whether local or systemic treatment is desired and upon the area to be treated. Administration may be topical (including ophthalmic, vaginal, rectal, intranasal, transdermal), oral or parenteral. Parenteral administration includes intravenous drip, subcutaneous, intraperitoneal or intramuscular injection, or intrathecal or intraventricular administration.

[0226] The route and site of administration may be chosen to enhance targeting. For example, to target muscle cells, intramuscular injection into the muscles of interest would be a logical choice. Lung cells might be targeted by administering the single stranded oligonucleotide in aerosol form. The vascular endothelial cells could be targeted by coating a balloon catheter with the single stranded oligonucleotide and mechanically introducing the oligonucleotide.

[0227] Topical administration refers to the delivery to a subject by contacting the formulation directly to a surface of the subject. The most common form of topical delivery is to the skin, but a composition disclosed herein can also be directly applied to other surfaces of the body, e.g., to the eye, a mucous membrane, to surfaces of a body cavity or to an internal surface. As mentioned above, the most common topical delivery is to the skin. The term encompasses several routes of administration including, but not limited to, topical and transdermal. These modes of administration typically include penetration of the skin's permeability barrier and efficient delivery to the target tissue or stratum. Topical administration can be used as a means to penetrate the epidermis and dermis and ultimately achieve systemic delivery of the composition. Topical administration can also be used as a means to selectively deliver oligonucleotides to the epidermis or dermis of a subject, or to specific strata thereof, or to an underlying tissue.

[0228] Formulations for topical administration may include transdermal patches, ointments, lotions, creams, gels, drops, suppositories, sprays, liquids and powders. Conventional pharmaceutical carriers, aqueous, powder or oily bases, thickeners and the like may be necessary or desirable. Coated condoms, gloves and the like may also be useful.

[0229] Transdermal delivery is a valuable route for the administration of lipid soluble therapeutics. The dermis is more permeable than the epidermis and therefore absorption is much more rapid through abraded, burned or denuded skin. Inflammation and other physiologic conditions that increase blood flow to the skin also enhance transdermal adsorption. Absorption via this route may be enhanced by the use of an oily vehicle (inunction) or through the use of one or more penetration enhancers. Other effective ways to deliver a composition disclosed herein via the transdermal route include hydration of the skin and the use of controlled release topical patches. The transdermal route provides a potentially effective means to deliver a composition disclosed herein for systemic and/or local therapy. In addition, iontophoresis (transfer of ionic solutes through biological membranes under the influence of an electric field), phonophoresis or sonophoresis (use of ultrasound to enhance the absorption of various therapeutic agents across biological membranes, notably the skin and the cornea), and optimization of vehicle characteristics relative to dose position and retention at the site of administration may be useful methods for enhancing the transport of topically applied compositions across skin and mucosal sites.

[0230] Both the oral and nasal membranes offer advantages over other routes of administration. For example, oligonucleotides administered through these membranes may have a rapid onset of action, provide therapeutic plasma levels, avoid first pass effect of hepatic metabolism, and avoid exposure of the oligonucleotides to the hostile gastrointestinal (GI) environment. Additional advantages include easy access to the membrane sites so that the oligonucleotide can be applied, localized and removed easily.

[0231] In oral delivery, compositions can be targeted to a surface of the oral cavity, e.g., to sublingual mucosa which includes the membrane of ventral surface of the tongue and the floor of the mouth or the buccal mucosa which constitutes the lining of the cheek. The sublingual mucosa is relatively permeable thus giving rapid absorption and acceptable bioavailability of many agents. Further, the sublingual mucosa is convenient, acceptable and easily accessible.

[0232] A pharmaceutical composition of single stranded oligonucleotide may also be administered to the buccal cavity of a human being by spraying into the cavity, without inhalation, from a metered dose spray dispenser, a mixed micellar pharmaceutical formulation as described above and a propellant. In one embodiment, the dispenser is first shaken prior to spraying the pharmaceutical formulation and propellant into the buccal cavity.

[0233] Compositions for oral administration include powders or granules, suspensions or solutions in water, syrups, slurries, emulsions, elixirs or non-aqueous media, tablets, capsules, lozenges, or troches. In the case of tablets, carriers that can be used include lactose, sodium citrate and salts of phosphoric acid. Various disintegrants such as starch, and lubricating agents such as magnesium stearate, sodium lauryl sulfate and talc, are commonly used in tablets. For oral administration in capsule form, useful diluents are lactose and high molecular weight polyethylene glycols. When aqueous suspensions are required for oral use, the nucleic acid compositions can be combined with emulsifying and suspending agents. If desired, certain sweetening and/or flavoring agents can be added.

[0234] Parenteral administration includes intravenous drip, subcutaneous, intraperitoneal or intramuscular injection, intrathecal or intraventricular administration. In some embodiments, parental administration involves administration directly to the site of disease (e.g. injection into a tumor).

[0235] Formulations for parenteral administration may include sterile aqueous solutions which may also contain buffers, diluents and other suitable additives. Intraventricular injection may be facilitated by an intraventricular catheter, for example, attached to a reservoir. For intravenous use, the total concentration of solutes should be controlled to render the preparation isotonic.

[0236] Any of the single stranded oligonucleotides described herein can be administered to ocular tissue. For example, the compositions can be applied to the surface of the eye or nearby tissue, e.g., the inside of the eyelid. For ocular administration, ointments or droppable liquids may be delivered by ocular delivery systems known to the art such as applicators or eye droppers. Such compositions can include mucomimetics such as hyaluronic acid, chondroitin sulfate, hydroxypropyl methylcellulose or poly(vinyl alcohol), preservatives such as sorbic acid, EDTA or benzylchronium chloride, and the usual quantities of diluents and/or carriers. The single stranded oligonucleotide can also be administered to the interior of the eye, and can be introduced by a needle or other delivery device which can introduce it to a selected area or structure.

[0237] Pulmonary delivery compositions can be delivered by inhalation by the patient of a dispersion so that the composition, preferably single stranded oligonucleotides, within the dispersion can reach the lung where it can be readily absorbed through the alveolar region directly into blood circulation. Pulmonary delivery can be effective both for systemic delivery and for localized delivery to treat diseases of the lungs.

[0238] Pulmonary delivery can be achieved by different approaches, including the use of nebulized, aerosolized, micellular and dry powder-based formulations. Delivery can be achieved with liquid nebulizers, aerosol-based inhalers, and dry powder dispersion devices. Metered-dose devices are preferred. One of the benefits of using an atomizer or inhaler is that the potential for contamination is minimized because the devices are self-contained. Dry powder dispersion devices, for example, deliver agents that may be readily formulated as dry powders. A single stranded oligonucleotide composition may be stably stored as lyophilized or spray-dried powders by itself or in combination with suitable powder carriers. The delivery of a composition for inhalation can be mediated by a dosing timing element which can include a timer, a dose counter, time measuring device, or a time indicator which when incorporated into the device enables dose tracking, compliance monitoring, and/or dose triggering to a patient during administration of the aerosol medicament.

[0239] The term “powder” means a composition that consists of finely dispersed solid particles that are free flowing and capable of being readily dispersed in an inhalation device and subsequently inhaled by a subject so that the particles reach the lungs to permit penetration into the alveoli. Thus, the powder is said to be “respirable.” Preferably the average particle size is less than about 10 μm in diameter preferably with a relatively uniform spheroidal shape distribution. More preferably the diameter is less than about 7.5 μm and most preferably less than about 5.0 μm. Usually the particle size distribution is between about 0.1 μm and about 5 μm in diameter, particularly about 0.3 μm to about 5 μm.

[0240] The term “dry” means that the composition has a moisture content below about 10% by weight (% w) water, usually below about 5% w and preferably less it than about 3% w. A dry composition can be such that the particles are readily dispersible in an inhalation device to form an aerosol.

[0241] The types of pharmaceutical excipients that are useful as carrier include stabilizers such as human serum albumin (HSA), bulking agents such as carbohydrates, amino acids and polypeptides; pH adjusters or buffers; salts such as sodium chloride; and the like. These carriers may be in a crystalline or amorphous form or may be a mixture of the two.

[0242] Suitable pH adjusters or buffers include organic salts prepared from organic acids and bases, such as sodium citrate, sodium ascorbate, and the like; sodium citrate is preferred. Pulmonary administration of a micellar single stranded oligonucleotide formulation may be achieved through metered dose spray devices with propellants such as tetrafluoroethane, heptafluoroethane, dimethylfluoropropane, tetrafluoropropane, butane, isobutane, dimethyl ether and other non-CFC and CFC propellants.

[0243] Exemplary devices include devices which are introduced into the vasculature, e.g., devices inserted into the lumen of a vascular tissue, or which devices themselves form a part of the vasculature, including stents, catheters, heart valves, and other vascular devices. These devices, e.g., catheters or stents, can be placed in the vasculature of the lung, heart, or leg.

[0244] Other devices include non-vascular devices, e.g., devices implanted in the peritoneum, or in organ or glandular tissue, e.g., artificial organs. The device can release a therapeutic substance in addition to a single stranded oligonucleotide, e.g., a device can release insulin.

[0245] In one embodiment, unit doses or measured doses of a composition that includes single stranded oligonucleotide are dispensed by an implanted device. The device can include a sensor that monitors a parameter within a subject. For example, the device can include pump, e.g., and, optionally, associated electronics.

[0246] Tissue, e.g., cells or organs can be treated with a single stranded oligonucleotide, ex vivo and then administered or implanted in a subject. The tissue can be autologous, allogeneic, or xenogeneic tissue. E.g., tissue can be treated to reduce graft v. host disease. In other embodiments, the tissue is allogeneic and the tissue is treated to treat a disorder characterized by unwanted gene expression in that tissue. E.g., tissue, e.g., hematopoietic cells, e.g., bone marrow hematopoietic cells, can be treated to inhibit unwanted cell proliferation. Introduction of treated tissue, whether autologous or transplant, can be combined with other therapies. In some implementations, the single stranded oligonucleotide treated cells are insulated from other cells, e.g., by a semi-permeable porous barrier that prevents the cells from leaving the implant, but enables molecules from the body to reach the cells and molecules produced by the cells to enter the body. In one embodiment, the porous barrier is formed from alginate.

[0247] In one embodiment, a contraceptive device is coated with or contains a single stranded oligonucleotide. Exemplary devices include condoms, diaphragms, IUD (implantable uterine devices, sponges, vaginal sheaths, and birth control devices.

### Dosage

[0248] In one aspect, the invention features a method of administering a single stranded oligonucleotide (e.g., as a compound or as a component of a composition) to a subject (e.g., a human subject). In one embodiment, the unit dose is between about 10 mg and 25 mg per kg of bodyweight. In one embodiment, the unit dose is between about 1 mg and 100 mg per kg of bodyweight. In one embodiment, the unit dose is between about 0.1 mg and 500 mg per kg of bodyweight. In some embodiments, the unit dose is more than 0.001, 0.005, 0.01, 0.05, 0.1, 0.5, 1, 2, 5, 10, 25, 50 or 100 mg per kg of bodyweight.

[0249] The defined amount can be an amount effective to treat or prevent a disease or disorder, e.g., a disease or disorder associated with the target gene. The unit dose, for example, can be administered by injection (e.g., intravenous or intramuscular), an inhaled dose, or a topical application.

[0250] In some embodiments, the unit dose is administered daily. In some embodiments, less frequently than once a day, e.g., less than every 2, 4, 8 or 30 days. In another embodiment, the unit dose is not administered with a frequency (e.g., not a regular frequency). For example, the unit dose may be administered a single time. In some embodiments, the unit dose is administered more than once a day, e.g., once an hour, two hours, four hours, eight hours, twelve hours, etc.

[0251] In one embodiment, a subject is administered an initial dose and one or more maintenance doses of a single stranded oligonucleotide. The maintenance dose or doses are generally lower than the initial dose, e.g., one-half less of the initial dose. A maintenance regimen can include treating the subject with a dose or doses ranging from 0.0001 to 100 mg/kg of body weight per day, e.g., 100, 10, 1, 0.1, 0.01, 0.001, or 0.0001 mg per kg of bodyweight per day. The maintenance doses may be administered no more than once every 1, 5, 10, or 30 days. Further, the treatment regimen may last for a period of time which will vary depending upon the nature of the particular disease, its severity and the overall condition of the patient. In some embodiments the dosage may be delivered no more than once per day, e.g., no more than once per 24, 36, 48, or more hours, e.g., no more than once for every 5 or 8 days. Following treatment, the patient can be monitored for changes in his condition and for alleviation of the symptoms of the disease state. The dosage of the oligonucleotide may either be increased in the event the patient does not respond significantly to current dosage levels, or the dose may be decreased if an alleviation of the symptoms of the disease state is observed, if the disease state has been ablated, or if undesired side-effects are observed.

[0252] The effective dose can be administered in a single dose or in two or more doses, as desired or considered appropriate under the specific circumstances. If desired to facilitate repeated or frequent infusions, implantation of a delivery device, e.g., a pump, semi-permanent stent (e.g., intravenous, intraperitoneal, intracisternal or intracapsular), or reservoir may be advisable.

[0253] In some embodiments, the oligonucleotide pharmaceutical composition includes a plurality of single stranded oligonucleotide species. In another embodiment, the single stranded oligonucleotide species has sequences that are non-overlapping and non-adjacent to another species with respect to a naturally occurring target sequence (e.g., a PRC2-associated region). In another embodiment, the plurality of single stranded oligonucleotide species is specific for different PRC2-associated regions. In another embodiment, the single stranded oligonucleotide is allele specific. In some cases, a patient is treated with a single stranded oligonucleotide in conjunction with other therapeutic modalities.

[0254] Following successful treatment, it may be desirable to have the patient undergo maintenance therapy to prevent the recurrence of the disease state, wherein the compound of the invention is administered in maintenance doses, ranging from 0.0001 mg to 100 mg per kg of body weight.

[0255] The concentration of the single stranded oligonucleotide composition is an amount sufficient to be effective in treating or preventing a disorder or to regulate a physiological condition in humans. The concentration or amount of single stranded oligonucleotide administered will depend on the parameters determined for the agent and the method of administration, e.g. nasal, buccal, pulmonary. For example, nasal formulations may tend to require much lower concentrations of some ingredients in order to avoid irritation or burning of the nasal passages. It is sometimes desirable to dilute an oral formulation up to 10-100 times in order to provide a suitable nasal formulation.

[0256] Certain factors may influence the dosage required to effectively treat a subject, including but not limited to the severity of the disease or disorder, previous treatments, the general health and/or age of the subject, and other diseases present. Moreover, treatment of a subject with a therapeutically effective amount of a single stranded oligonucleotide can include a single treatment or, preferably, can include a series of treatments. It will also be appreciated that the effective dosage of a single stranded oligonucleotide used for treatment may increase or decrease over the course of a particular treatment. For example, the subject can be monitored after administering a single stranded oligonucleotide composition. Based on information from the monitoring, an additional amount of the single stranded oligonucleotide composition can be administered.

[0257] Dosing is dependent on severity and responsiveness of the disease condition to be treated, with the course of treatment lasting from several days to several months, or until a cure is effected or a diminution of disease state is achieved. Optimal dosing schedules can be calculated from measurements of target gene expression levels in the body of the patient. Persons of ordinary skill can easily determine optimum dosages, dosing methodologies and repetition rates. Optimum dosages may vary depending on the relative potency of individual compounds, and can generally be estimated based on EC50s found to be effective in in vitro and in vivo animal models. In some embodiments, the animal models include transgenic animals that express a human target gene. In another embodiment, the composition for testing includes a single stranded oligonucleotide that is complementary, at least in an internal region, to a sequence that is conserved between a target gene in the animal model and the target gene in a human.

[0258] In one embodiment, the administration of the single stranded oligonucleotide composition is parenteral, e.g. intravenous (e.g., as a bolus or as a diffusible infusion), intradermal, intraperitoneal, intramuscular, intrathecal, intraventricular, intracranial, subcutaneous, transmucosal, buccal, sublingual, endoscopic, rectal, oral, vaginal, topical, pulmonary, intranasal, urethral or ocular. Administration can be provided by the subject or by another person, e.g., a health care provider. The composition can be provided in measured doses or in a dispenser which delivers a metered dose. Selected modes of delivery are discussed in more detail below.

### Kits

[0259] In certain aspects of the invention, kits are provided, comprising a container housing a composition comprising a single stranded oligonucleotide. In some embodiments, the composition is a pharmaceutical composition comprising a single stranded oligonucleotide and a pharmaceutically acceptable carrier. In some embodiments, the individual components of the pharmaceutical composition may be provided in one container. Alternatively, it may be desirable to provide the components of the pharmaceutical composition separately in two or more containers, e.g., one container for single stranded oligonucleotides, and at least another for a carrier compound. The kit may be packaged in a number of different configurations such as one or more containers in a single box. The different components can be combined, e.g., according to instructions provided with the kit. The components can be combined according to a method described herein, e.g., to prepare and administer a pharmaceutical composition. The kit can also include a delivery device.

[0260] The present invention is further illustrated by the following Examples, which in no way should be construed as further limiting. The entire contents of all of the references (including literature references, issued patents, published patent applications, and co-pending patent applications) cited throughout this application are hereby expressly incorporated by reference.

### EXAMPLES

[0261] The invention is further described in the following examples, which do not limit the scope of the invention described in the claims.

### Materials and Methods:

### Real Time PCR

[0262] RNA was harvested from the cells using Promega SV 96 Total RNA Isolation system or Trizol omitting the DNAse step. In separate pilot experiments, 50 ng of RNA was determined to be sufficient template for the reverse transcriptase reaction. RNA harvested from cells was normalized so that 50 ng of RNA was input to each reverse transcription reaction. For the few samples that were too dilute to reach this limit, the maximum input volume was added. Reverse transcriptase reaction was performed using the Superscript II kit and real time PCR performed on cDNA samples using icycler SYBR green chemistry (Biorad). A baseline level of mRNA expression for each target gene was determined through quantitative PCR as outlined above. Baseline levels were also determined for mRNA of various housekeeping genes which are constitutively expressed. A “control” housekeeping gene with approximately the same level of baseline expression as the target gene was chosen for comparison purposes.

### ELISA

[0263] An ELISA assay using a commercially available kit [DEP00, RnD Systems] was used according to the manufacturer's instructions to determine secreted protein present in cellular supernatant. Fold induction of protein was determined by normalizing protein levels induced by oligonucleotides to the protein levels induced by control (Lipofectamine alone).

### Cell Culture

[0264] Human hepatocyte Hep3B, human hepatocyte HepG2 cells, mouse hepatoma Hepa1-6 cells, and human renal proximal tubule epithelial cells (RPTEC) were cultured using conditions known in the art (see, e.g. Current Protocols in Cell Biology). Details of the cell lines used in the experiments described herein are provided in Table 5.

TABLE 5
Cell lines

| Cell | | | | | | | Culture |
|---|---|---|---|---|---|---|---|
| Line | Source | Species | Gender | Type | Tissue | Status | Conditions |
| Hep3B | ATCC | human | M | hepatocytes | liver | immortalized | Eagle's MEM + |
| | | | | | | | 10% FBS |
| RPTEC | Lonza | human | N/A | proximal | kidney | primary | Clonetics ™ |
| | | | | tubule | | | REGM ™ |
| | | | | epithelial | | | BulletKit ™ (CC- |
| | | | | cells | | | 3190) |
| HepG2 | ATCC | human | M | hepatocytes | liver | immortalized | Eagle's MEM + |
| | | | | | | | 10% FBS |
| Hepa1-6 | ATCC | mouse | N/A | hepatocytes | liver | immortalized | DMEM + 10% |
| | | | | | | | FBS |
| blood | from C57BI/6 | mouse | N/A | multiple cell | blood | primary | |
| mus | mice (mice | | | types | | | |
| C57BI | obtained from | | | | | | |
| | Jackson Labs) | | | | | | |
| liv mus | from C57BI/6 | mouse | N/A | multiple cell | liver | primary | |
| C57BI | mice (mice | | | types | | | |
| | obtained from | | | | | | |
| | Jackson Labs) | | | | | | |
| kid mus | from C57BI/6 | mouse | N/A | multiple cell | kidney | primary | |
| C57BI | mice (mice | | | types | | | |
| | obtained from | | | | | | |
| | Jackson Labs) | | | | | | |

### Oligonucleotide Design

[0265] Oligonucleotides were designed within PRC2-interacting regions in order to upregulate target genes listed in Table 4. The sequence and structure of each oligonucleotide is shown in Table 2. The following table provides a description of the nucleotide analogs, modifications and intranucleotide linkages used for certain oligonucleotides tested and described in Table 2.

TABLE 3
Oligonucleotide Modifications

| Symbol | Feature Description |
|---|---|
| bio | 5′ biotin |
| dAs | DNA w/3′ thiophosphate |
| dCs | DNA w/3′ thiophosphate |
| dGs | DNA w/3′ thiophosphate |
| dTs | DNA w/3′ thiophosphate |
| dG | DNA |
| enaAs | ENA w/3′ thiophosphate |
| enaCs | ENA w/3′ thiophosphate |
| enaGs | ENA w/3′ thiophosphate |
| enaTs | ENA w/3′ thiophosphate |
| fluAs | 2′-fluoro w/3′ thiophosphate |
| fluCs | 2′-fluoro w/3′ thiophosphate |
| fluGs | 2′-fluoro w/3′ thiophosphate |
| fluUs | 2′-fluoro w/3′ thiophosphate |
| lnaAs | LNA w/3′ thiophosphate |
| lnaCs | LNA w/3′ thiophosphate |
| lnaGs | LNA w/3′ thiophosphate |
| lnaTs | LNA w/3′ thiophosphate |
| omeAs | 2′-OMe w/3′ thiophosphate |
| omeCs | 2′-OMe w/3′ thiophosphate |
| omeGs | 2′-OMe w/3′ thiophosphate |
| omeTs | 2′-OMe w/3′ thiophosphate |
| lnaAs-Sup | LNA w/3′ thiophosphate at 3′ terminus |
| lnaCs-Sup | LNA w/3′ thiophosphate at 3′ terminus |
| lnaGs-Sup | LNA w/3′ thiophosphate at 3′ terminus |
| lnaTs-Sup | LNA w/3′ thiophosphate at 3′ terminus |
| lnaA-Sup | LNA w/3′ OH at 3′ terminus |
| lnaC-Sup | LNA w/3′ OH at 3′ terminus |
| lnaG-Sup | LNA w/3′ OH at 3′ terminus |
| lnaT-Sup | LNA w/3′ OH at 3′ terminus |
| omeA-Sup | 2′-OMe w/3′ OH at 3′ terminus |
| omeC-Sup | 2′-OMe w/3′ OH at 3′ terminus |
| omeG-Sup | 2′-OMe w/3′ OH at 3′ terminus |
| omeU-Sup | 2′-OMe w/3′ OH at 3′ terminus |
| dAs-Sup | DNA w/3′ thiophosphate at 3′ terminus |
| dCs-Sup | DNA w/3′ thiophosphate at 3′ terminus |
| dGs-Sup | DNA w/3′ thiophosphate at 3′ terminus |
| dTs-Sup | DNA w/3′ thiophosphate at 3′ terminus |
| dA-Sup | DNA w/3′ OH at 3′ terminus |
| dC-Sup | DNA w/3′ OH at 3′ terminus |
| dG-Sup | DNA w/3′ OH at 3′ terminus |
| dT-Sup | DNA w/3′ OH at 3′ terminus |

In Vitro Transfection of Cells with Oligonucleotides

[0266] Cells were seeded into each well of 24-well plates at a density of 25,000 cells per 500 uL and transfections were performed with Lipofectamine and the single stranded oligonucleotides. Control wells contained Lipofectamine alone. At 48 hours post-transfection, approximately 200 uL of cell culture supernatants were stored at −80 C for ELISA. At 48 hours post-transfection, RNA was harvested from the cells and quantitative PCR was carried out as outlined above. The percent induction of target mRNA expression by each oligonucleotide was determined by normalizing mRNA levels in the presence of the oligonucleotide to the mRNA levels in the presence of control (Lipofectamine alone). This was compared side-by-side with the increase in mRNA expression of the “control” housekeeping gene.

### In Vivo Delivery of Single Stranded Oligonucleotides

[0267] Male C57B16/J mice [6-8 wks old and 20-25 g] were administered subcutaneously a single injection of oligonucleotide, at a dose of either 10 mg/kg or 25 mg/kg in 100 μl of sterile phosphate buffered saline. At a time point 48 hours after injection biological samples were take and tested for target protein levels using an ELISA.

### Results:

### In Vitro Delivery of Single Stranded Oligonucleotides Upregulated Gene Expression

[0268] Oligonucleotides were designed as candidates for upregulating gene expression of target genes listed in Table 4. Single stranded oligonucleotides were designed to be complementary to a PRC2-interacting region. The oligonucleotides were tested in at least duplicate. The sequence and structural features of the oligonucleotides are set forth in Table 2. Briefly, cells were transfected in vitro with the oligonucleotides as described above. Gene or expression in cells or protein levels following treatment was evaluated by qRT-PCR or ELISA. Oligonucleotides that upregulated expression of target genes listed in Table 4 were identified. Further details are outlined in Table 2.

### In Vivo Delivery of Single Stranded Oligonucleotides Upregulated Gene Expression

[0269] Certain oligonucleotides that elicited a response in vitro were further tested in vivo. C57B/6 mice were injected subcutaneously with oligonucleotides as described above. 48 hours after injection, protein levels were measured as described above. Further details are outlined in Table 2.

### Tables

TABLE 1
Hexamers that are not seed sequences of human miRNAs

AAAAAA, AAAAAG, AAAACA, AAAAGA, AAAAGC, AAAAGG, AAAAUA, AAACAA, AAACAC, AAACAG,
AAACAU, AAACCC, AAACCU, AAACGA, AAACGC, AAACGU, AAACUA, AAACUC, AAACUU, AAAGAU,
AAAGCC, AAAGGA, AAAGGG, AAAGUC, AAAUAC, AAAUAU, AAAUCG, AAAUCU, AAAUGC, AAAUGU,
AAAUUA, AAAUUG, AACAAC, AACAAG, AACAAU, AACACA, AACACG, AACAGA, AACAGC, AACAGG,
AACAUC, AACAUG, AACCAA, AACCAC, AACCAG, AACCAU, AACCCC, AACCCG, AACCGA, AACCGC,
AACCGG, AACCUA, AACCUU, AACGAA, AACGAC, AACGAG, AACGAU, AACGCU, AACGGG, AACGGU,
AACGUA, AACGUC, AACGUG, AACGUU, AACUAU, AACUCA, AACUCC, AACUCG, AACUGA, AACUGC,
AACUGU, AACUUA, AACUUC, AACUUG, AACUUU, AAGAAA, AAGAAG, AAGAAU, AAGACG, AAGAGA,
AAGAGC, AAGAGG, AAGAGU, AAGAUU, AAGCAA, AAGCAC, AAGCAG, AAGCAU, AAGCCA, AAGCCC,
AAGCCG, AAGCCU, AAGCGA, AAGCGG, AAGCGU, AAGCUA, AAGGAA, AAGGAC, AAGGCU, AAGGGC,
AAGGGU, AAGGUU, AAGUAA, AAGUAC, AAGUAU, AAGUCC, AAGUCG, AAGUGA, AAGUGG, AAGUUA,
AAGUUU, AAUAAA, AAUAAC, AAUAAG, AAUAAU, AAUACA, AAUACC, AAUACG, AAUAGA, AAUAGC,
AAUAGG, AAUAGU, AAUAUC, AAUAUU, AAUCAA, AAUCAU, AAUCCA, AAUCCC, AAUCCG, AAUCGA,
AAUCGC, AAUCGU, AAUCUA, AAUCUG, AAUCUU, AAUGAA, AAUGAC, AAUGAG, AAUGAU, AAUGCG,
AAUGCU, AAUGGA, AAUGGU, AAUGUA, AAUGUC, AAUGUG, AAUUAA, AAUUAC, AAUUAG, AAUUCC,
AAUUCG, AAUUGA, AAUUGG, AAUUGU, AAUUUC, AAUUUG, ACAAAA, ACAAAC, ACAAAG, ACAAAU,
ACAACC, ACAACG, ACAACU, ACAAGA, ACAAGC, ACAAGU, ACAAUC, ACAAUG, ACAAUU, ACACAG,
ACACCA, ACACCC, ACACCG, ACACCU, ACACGA, ACACGC, ACACGU, ACACUC, ACACUG, ACACUU,
ACAGAA, ACAGAC, ACAGCC, ACAGCG, ACAGCU, ACAGGG, ACAGUC, ACAGUG, ACAGUU, ACAUAA,
ACAUAC, ACAUCC, ACAUCG, ACAUCU, ACAUGA, ACAUGC, ACAUGU, ACAUUG, ACAUUU, ACCAAA,
ACCAAC, ACCAAG, ACCAAU, ACCACC, ACCACG, ACCAGA, ACCAGU, ACCAUA, ACCAUG, ACCAUU,
ACCCAA, ACCCAC, ACCCCA, ACCCCG, ACCCGA, ACCCGC, ACCCUA, ACCCUC, ACCCUU, ACCGAA,
ACCGAC, ACCGAU, ACCGCA, ACCGCC, ACCGCG, ACCGCU, ACCGGA, ACCGGC, ACCGGU, ACCGUA,
ACCGUC, ACCGUG, ACCGUU, ACCUAA, ACCUAC, ACCUAG, ACCUAU, ACCUCA, ACCUCC, ACCUCG,
ACCUCU, ACCUGA, ACCUGC, ACCUGU, ACCUUA, ACCUUC, ACCUUU, ACGAAA, ACGAAC, ACGAAG,
ACGAAU, ACGACA, ACGACC, ACGACG, ACGACU, ACGAGA, ACGAGC, ACGAGG, ACGAGU, ACGAUA,
ACGAUC, ACGAUG, ACGAUU, ACGCAA, ACGCAG, ACGCAU, ACGCCC, ACGCCG, ACGCCU, ACGCGA,
ACGCGG, ACGCGU, ACGCUA, ACGCUG, ACGCUU, ACGGAA, ACGGAC, ACGGAG, ACGGAU, ACGGCC,
ACGGCG, ACGGCU, ACGGGC, ACGGGG, ACGGGU, ACGGUA, ACGGUC, ACGGUG, ACGGUU, ACGUAA,
ACGUAC, ACGUAU, ACGUCC, ACGUCG, ACGUCU, ACGUGA, ACGUGC, ACGUGG, ACGUGU, ACGUUA,
ACGUUC, ACGUUG, ACGUUU, ACUAAA, ACUAAG, ACUAAU, ACUACA, ACUACC, ACUACG, ACUACU,
ACUAGG, ACUAUC, ACUAUG, ACUAUU, ACUCAU, ACUCCC, ACUCCG, ACUCCU, ACUCGA, ACUCGC,
ACUCGG, ACUCUC, ACUCUU, ACUGAG, ACUGAU, ACUGCC, ACUGCG, ACUGCU, ACUGGG, ACUGGU,
ACUGUC, ACUUAA, ACUUAC, ACUUAU, ACUUCA, ACUUCC, ACUUCG, ACUUCU, ACUUGA, ACUUGC,
ACUUGU, ACUUUA, ACUUUC, ACUUUG, AGAAAA, AGAAAC, AGAAAG, AGAACC, AGAACG, AGAACU,
AGAAGC, AGAAGU, AGAAUA, AGAAUC, AGAAUG, AGAAUU, AGACAA, AGACAC, AGACAU, AGACCA,
AGACCC, AGACCG, AGACCU, AGACGA, AGACGC, AGACGU, AGACUA, AGACUC, AGACUU, AGAGAC,
AGAGAG, AGAGAU, AGAGCC, AGAGCG, AGAGCU, AGAGGC, AGAGGG, AGAGGU, AGAGUA, AGAGUU,
AGAUAC, AGAUAG, AGAUAU, AGAUCC, AGAUCG, AGAUCU, AGAUGA, AGAUGC, AGAUGG, AGAUUA,
AGAUUC, AGAUUG, AGAUUU, AGCAAC, AGCACA, AGCACG, AGCACU, AGCAGA, AGCAUA, AGCAUC,
AGCAUG, AGCCAA, AGCCAU, AGCCCA, AGCCGA, AGCCGC, AGCCGG, AGCCGU, AGCCUA, AGCCUC,
AGCGAA, AGCGAG, AGCGAU, AGCGCA, AGCGCC, AGCGCG, AGCGCU, AGCGGA, AGCGGC, AGCGGU,
AGCGUA, AGCGUC, AGCGUG, AGCGUU, AGCUAA, AGCUAC, AGCUAG, AGCUAU, AGCUCA, AGCUCC,
AGCUCG, AGCUCU, AGCUGA, AGCUGG, AGCUGU, AGCUUC, AGCUUU, AGGAAU, AGGACC, AGGACG,
AGGAGA, AGGAGU, AGGAUA, AGGCAA, AGGCAU, AGGCCG, AGGCGA, AGGCGC, AGGCGG, AGGCUA,
AGGCUC, AGGCUU, AGGGAC, AGGGAU, AGGGGA, AGGGGU, AGGGUA, AGGGUG, AGGUAA,
AGGUAC, AGGUCA, AGGUCC, AGGUCU, AGGUGA, AGGUGC, AGGUGG, AGGUGU, AGGUUC,
AGGUUG, AGUAAA, AGUAAG, AGUAAU, AGUACA, AGUACG, AGUAGC, AGUAGG, AGUAUA, AGUAUC,
AGUAUG, AGUAUU, AGUCAA, AGUCAC, AGUCAG, AGUCAU, AGUCCA, AGUCCG, AGUCCU, AGUCGA,
AGUCGC, AGUCGG, AGUCGU, AGUCUA, AGUCUC, AGUCUG, AGUCUU, AGUGAA, AGUGAC, AGUGCG,
AGUGGG, AGUGUC, AGUUAA, AGUUAC, AGUUAG, AGUUCC, AGUUCG, AGUUGA, AGUUGC,
AGUUGU, AGUUUA, AGUUUC, AGUUUG, AGUUUU, AUAAAC, AUAAAU, AUAACA, AUAACC, AUAACG,
AUAACU, AUAAGA, AUAAGC, AUAAGG, AUAAGU, AUAAUC, AUAAUG, AUAAUU, AUACAC, AUACAG,
AUACAU, AUACCA, AUACCC, AUACCG, AUACGA, AUACGC, AUACGG, AUACGU, AUACUA, AUACUC,
AUACUG, AUACUU, AUAGAA, AUAGAC, AUAGAU, AUAGCA, AUAGCG, AUAGCU, AUAGGA, AUAGGU,
AUAGUA, AUAGUC, AUAGUG, AUAGUU, AUAUAC, AUAUAG, AUAUCC, AUAUCG, AUAUCU, AUAUGA,
AUAUGC, AUAUGG, AUAUGU, AUAUUC, AUAUUG, AUAUUU, AUCAAA, AUCAAC, AUCAAG, AUCAAU,
AUCACA, AUCACC, AUCACG, AUCAGC, AUCAGG, AUCCAA, AUCCAU, AUCCCC, AUCCCG, AUCCGA,
AUCCGC, AUCCGG, AUCCUA, AUCCUC, AUCCUG, AUCGAA, AUCGAC, AUCGAG, AUCGAU, AUCGCA,
AUCGCC, AUCGCG, AUCGCU, AUCGGC, AUCGGG, AUCGGU, AUCGUC, AUCGUG, AUCGUU, AUCUAA,
AUCUAC, AUCUAG, AUCUAU, AUCUCC, AUCUCG, AUCUGU, AUCUUG, AUCUUU, AUGAAA, AUGAAC,
AUGAAG, AUGAAU, AUGACC, AUGACU, AUGAGG, AUGAGU, AUGAUA, AUGAUC, AUGAUU, AUGCAA,
AUGCAG, AUGCCA, AUGCCC, AUGCCG, AUGCGA, AUGCGG, AUGCGU, AUGCUC, AUGCUU, AUGGAC,
AUGGCC, AUGGGA, AUGGGC, AUGGGU, AUGGUC, AUGGUG, AUGUAC, AUGUAU, AUGUCA,
AUGUCC, AUGUCG, AUGUGU, AUGUUA, AUGUUC, AUUAAA, AUUAAC, AUUAAG, AUUAAU, AUUACA,
AUUACC, AUUACG, AUUACU, AUUAGA, AUUAGC, AUUAGG, AUUAGU, AUUAUA, AUUAUC, AUUAUG,
AUUCAC, AUUCCA, AUUCCG, AUUCCU, AUUCGA, AUUCGC, AUUCGG, AUUCGU, AUUCUA, AUUCUC,
AUUCUU, AUUGAA, AUUGAC, AUUGAU, AUUGCC, AUUGCG, AUUGCU, AUUGGA, AUUGGC,
AUUGGG, AUUGGU, AUUGUA, AUUGUC, AUUGUG, AUUGUU, AUUUAA, AUUUAG, AUUUAU,
AUUUCC, AUUUCG, AUUUCU, AUUUGA, AUUUGC, AUUUGU, AUUUUA, AUUUUC, AUUUUG,
AUUUUU, CAAAAG, CAAACA, CAAACC, CAAACG, CAAACU, CAAAGA, CAAAGG, CAAAUA, CAAAUU,
CAACAC, CAACAU, CAACCA, CAACCC, CAACCG, CAACGA, CAACGC, CAACGG, CAACGU, CAACUA,
CAACUC, CAACUG, CAACUU, CAAGAA, CAAGAC, CAAGAU, CAAGCA, CAAGCC, CAAGCG, CAAGCU,
CAAGGA, CAAGGG, CAAGUC, CAAGUG, CAAGUU, CAAUAA, CAAUAC, CAAUAG, CAAUCC, CAAUCG,
CAAUCU, CAAUGA, CAAUGC, CAAUGG, CAAUGU, CAAUUC, CAAUUG, CAAUUU, CACAAU, CACACA,
CACACG, CACACU, CACAGA, CACAGC, CACAGG, CACAUA, CACAUC, CACAUU, CACCAA, CACCAC,
CACCAU, CACCCA, CACCCC, CACCCG, CACCGA, CACCGC, CACCGG, CACCGU, CACCUA, CACCUU,
CACGAA, CACGAC, CACGAG, CACGAU, CACGCA, CACGCC, CACGCU, CACGGA, CACGGC, CACGGG,
CACGGU, CACGUA, CACGUC, CACGUG, CACGUU, CACUAA, CACUAG, CACUAU, CACUCA, CACUCG,
CACUGA, CACUGC, CACUGG, CACUUA, CACUUC, CACUUU, CAGAAA, CAGAAG, CAGAAU, CAGACC,
CAGACG, CAGAGC, CAGAUA, CAGAUC, CAGCCG, CAGCCU, CAGCGA, CAGCGC, CAGCGG, CAGCGU,
CAGCUC, CAGCUU, CAGGAU, CAGGGG, CAGGGU, CAGGUA, CAGGUC, CAGGUU, CAGUAC, CAGUCG,
CAGUUG, CAUAAA, CAUAAC, CAUAAG, CAUAAU, CAUACA, CAUACC, CAUACG, CAUACU, CAUAGA,
CAUAGG, CAUAGU, CAUAUA, CAUAUC, CAUAUG, CAUCAA, CAUCAC, CAUCAG, CAUCAU, CAUCCA,
CAUCCC, CAUCCG, CAUCGA, CAUCGC, CAUCGG, CAUCGU, CAUCUA, CAUCUC, CAUCUG, CAUCUU,
CAUGAA, CAUGAC, CAUGAG, CAUGAU, CAUGCA, CAUGCC, CAUGCG, CAUGCU, CAUGGC, CAUGGG,
CAUGGU, CAUGUA, CAUGUC, CAUGUU, CAUUAA, CAUUAC, CAUUAG, CAUUCA, CAUUCC, CAUUCG,
CAUUCU, CAUUGA, CAUUGG, CAUUUC, CAUUUG, CAUUUU, CCAAAA, CCAAAC, CCAAAG, CCAAAU,
CCAACA, CCAACC, CCAACG, CCAACU, CCAAGA, CCAAGC, CCAAGG, CCAAUC, CCAAUG, CCAAUU,
CCACAA, CCACAC, CCACAG, CCACAU, CCACCA, CCACCC, CCACCG, CCACCU, CCACGA, CCACGC,
CCACGG, CCACGU, CCACUA, CCACUC, CCACUU, CCAGAA, CCAGAC, CCAGAG, CCAGCC, CCAGGU,
CCAGUC, CCAGUU, CCAUAA, CCAUAC, CCAUAG, CCAUAU, CCAUCA, CCAUCC, CCAUCU, CCAUGA,
CCAUGC, CCAUGG, CCAUUC, CCAUUG, CCAUUU, CCCAAC, CCCAAG, CCCAAU, CCCACA, CCCAGA,
CCCAGC, CCCAGU, CCCAUA, CCCAUC, CCCAUG, CCCAUU, CCCCAA, CCCCAG, CCCCAU, CCCCCC,
CCCCCG, CCCCCU, CCCCGA, CCCCGC, CCCCGU, CCCCUA, CCCCUC, CCCGAA, CCCGAC, CCCGAU,
CCCGCA, CCCGCU, CCCGGA, CCCGGC, CCCGUA, CCCGUG, CCCGUU, CCCUAA, CCCUAG, CCCUCA,
CCCUCU, CCCUGC, CCCUUA, CCCUUC, CCCUUU, CCGAAA, CCGAAC, CCGAAU, CCGACA, CCGACC,
CCGACG, CCGACU, CCGAGA, CCGAGG, CCGAGU, CCGAUA, CCGAUC, CCGAUG, CCGAUU, CCGCAA,
CCGCAC, CCGCAG, CCGCAU, CCGCCA, CCGCCC, CCGCCG, CCGCCU, CCGCGA, CCGCGC, CCGCGG,
CCGCGU, CCGCUA, CCGCUC, CCGCUG, CCGCUU, CCGGAA, CCGGAU, CCGGCA, CCGGCC, CCGGCG,
CCGGCU, CCGGGA, CCGGGC, CCGGGG, CCGGGU, CCGGUA, CCGGUC, CCGGUG, CCGUAA, CCGUAG,
CCGUAU, CCGUCA, CCGUCC, CCGUCG, CCGUGA, CCGUGU, CCGUUA, CCGUUC, CCGUUG, CCGUUU,
CCUAAC, CCUAAG, CCUAAU, CCUACA, CCUACC, CCUACG, CCUACU, CCUAGA, CCUAGC, CCUAGG,
CCUAGU, CCUAUA, CCUAUC, CCUAUG, CCUAUU, CCUCAA, CCUCAC, CCUCAG, CCUCAU, CCUCCA,
CCUCCC, CCUCCG, CCUCGA, CCUCGC, CCUCGG, CCUCGU, CCUCUA, CCUCUG, CCUGAC, CCUGAU,
CCUGCA, CCUGGG, CCUGGU, CCUGUU, CCUUAA, CCUUAC, CCUUAG, CCUUAU, CCUUCG, CCUUGA,
CCUUGU, CCUUUA, CCUUUC, CCUUUU, CGAAAA, CGAAAC, CGAAAG, CGAAAU, CGAACA, CGAACC,
CGAACG, CGAACU, CGAAGA, CGAAGC, CGAAGG, CGAAGU, CGAAUA, CGAAUC, CGAAUG, CGAAUU,
CGACAA, CGACAC, CGACAU, CGACCA, CGACCU, CGACGA, CGACGC, CGACGG, CGACGU, CGACUA,
CGACUG, CGACUU, CGAGAA, CGAGAC, CGAGAG, CGAGAU, CGAGCA, CGAGCC, CGAGCG, CGAGCU,
CGAGGC, CGAGGG, CGAGGU, CGAGUA, CGAGUC, CGAGUG, CGAGUU, CGAUAA, CGAUAC, CGAUAG,
CGAUAU, CGAUCA, CGAUCC, CGAUCG, CGAUCU, CGAUGA, CGAUGC, CGAUGG, CGAUGU, CGAUUA,
CGAUUC, CGAUUG, CGAUUU, CGCAAA, CGCAAC, CGCAAG, CGCAAU, CGCACA, CGCACC, CGCACG,
CGCAGA, CGCAGC, CGCAGG, CGCAGU, CGCAUA, CGCAUC, CGCAUG, CGCAUU, CGCCAA, CGCCAC,
CGCCAG, CGCCAU, CGCCCA, CGCCCC, CGCCCG, CGCCGA, CGCCGC, CGCCGG, CGCCGU, CGCCUA,
CGCCUG, CGCCUU, CGCGAA, CGCGAC, CGCGAG, CGCGAU, CGCGCA, CGCGCC, CGCGCG, CGCGCU,
CGCGGA, CGCGGC, CGCGGG, CGCGGU, CGCGUA, CGCGUC, CGCGUG, CGCGUU, CGCUAA, CGCUAC,
CGCUAG, CGCUAU, CGCUCA, CGCUCC, CGCUCG, CGCUCU, CGCUGA, CGCUGC, CGCUGG, CGCUGU,
CGCUUA, CGCUUC, CGCUUG, CGGAAA, CGGAAC, CGGAAG, CGGACA, CGGACC, CGGACG, CGGACU,
CGGAGC, CGGAGG, CGGAGU, CGGAUA, CGGAUU, CGGCAA, CGGCAC, CGGCAG, CGGCCA, CGGCCC,
CGGCCG, CGGCGC, CGGCGG, CGGCGU, CGGCUA, CGGCUC, CGGCUG, CGGCUU, CGGGAA, CGGGAC,
CGGGAG, CGGGAU, CGGGCA, CGGGCC, CGGGCG, CGGGCU, CGGGGU, CGGGUA, CGGGUC, CGGGUG,
CGGUAA, CGGUAC, CGGUAG, CGGUAU, CGGUCA, CGGUCG, CGGUCU, CGGUGA, CGGUGG, CGGUGU,
CGGUUA, CGGUUC, CGGUUG, CGGUUU, CGUAAA, CGUAAC, CGUAAG, CGUAAU, CGUACA, CGUACG,
CGUACU, CGUAGA, CGUAGC, CGUAGG, CGUAGU, CGUAUA, CGUAUC, CGUAUG, CGUAUU, CGUCAA,
CGUCAC, CGUCAG, CGUCAU, CGUCCA, CGUCCC, CGUCCG, CGUCCU, CGUCGA, CGUCGG, CGUCGU,
CGUCUA, CGUCUC, CGUCUG, CGUCUU, CGUGAA, CGUGAC, CGUGAG, CGUGAU, CGUGCC, CGUGCG,
CGUGCU, CGUGGA, CGUGGG, CGUGGU, CGUGUA, CGUGUG, CGUUAA, CGUUAC, CGUUAG,
CGUUAU, CGUUCA, CGUUCC, CGUUCG, CGUUCU, CGUUGA, CGUUGC, CGUUGU, CGUUUA, CGUUUC,
CGUUUU, CUAAAA, CUAAAC, CUAAAU, CUAACA, CUAACC, CUAACG, CUAACU, CUAAGA, CUAAGC,
CUAAGU, CUAAUA, CUAAUC, CUAAUG, CUACAC, CUACAU, CUACCA, CUACCC, CUACCG, CUACCU,
CUACGA, CUACGC, CUACGG, CUACGU, CUACUA, CUACUC, CUACUG, CUAGAA, CUAGAG, CUAGAU,
CUAGCA, CUAGCC, CUAGCG, CUAGCU, CUAGGA, CUAGGG, CUAGGU, CUAGUG, CUAGUU, CUAUAA,
CUAUAG, CUAUAU, CUAUCA, CUAUCC, CUAUCG, CUAUCU, CUAUGA, CUAUGC, CUAUGG, CUAUGU,
CUAUUA, CUAUUG, CUCAAC, CUCAAG, CUCAAU, CUCACC, CUCACG, CUCAGC, CUCAUA, CUCAUC,
CUCAUG, CUCAUU, CUCCAC, CUCCCC, CUCCCG, CUCCGA, CUCCGC, CUCCGG, CUCCUA, CUCCUC,
CUCCUU, CUCGAA, CUCGAC, CUCGAG, CUCGAU, CUCGCA, CUCGCC, CUCGCG, CUCGGG, CUCGGU,
CUCGUA, CUCGUC, CUCGUG, CUCGUU, CUCUAA, CUCUAC, CUCUAU, CUCUCA, CUCUCC, CUCUCU,
CUCUGC, CUCUGU, CUCUUA, CUCUUG, CUGAAG, CUGACC, CUGACG, CUGAGC, CUGAUA, CUGAUC,
CUGCCG, CUGCCU, CUGCGA, CUGCUA, CUGCUU, CUGGAG, CUGGAU, CUGGCG, CUGGGU, CUGUAC,
CUGUCA, CUGUCC, CUGUCG, CUGUGG, CUGUGU, CUGUUA, CUGUUU, CUUAAC, CUUAAG, CUUAAU,
CUUACC, CUUACG, CUUAGA, CUUAGC, CUUAGG, CUUAGU, CUUAUA, CUUAUC, CUUAUG, CUUAUU,
CUUCAG, CUUCAU, CUUCCA, CUUCCC, CUUCCG, CUUCCU, CUUCGA, CUUCGC, CUUCGG, CUUCGU,
CUUCUA, CUUGAC, CUUGAG, CUUGAU, CUUGCA, CUUGCC, CUUGCG, CUUGCU, CUUGGC, CUUGGU,
CUUGUU, CUUUAC, CUUUAG, CUUUAU, CUUUCA, CUUUCG, CUUUCU, CUUUGA, CUUUGC, CUUUGU,
CUUUUA, CUUUUC, CUUUUG, CUUUUU, GAAAAA, GAAAAG, GAAAAU, GAAACC, GAAACG, GAAAGA,
GAAAGC, GAAAGU, GAAAUA, GAAAUC, GAAAUG, GAAAUU, GAACAA, GAACAC, GAACAG, GAACAU,
GAACCA, GAACCC, GAACCG, GAACCU, GAACGA, GAACGC, GAACGG, GAACGU, GAACUA, GAACUG,
GAACUU, GAAGAC, GAAGAG, GAAGCA, GAAGCG, GAAGCU, GAAGUC, GAAUAA, GAAUAC, GAAUAG,
GAAUAU, GAAUCC, GAAUCG, GAAUCU, GAAUGA, GAAUGC, GAAUGU, GAAUUA, GAAUUC, GAAUUU,
GACAAA, GACAAG, GACAAU, GACACC, GACAGA, GACAGG, GACAUA, GACAUG, GACAUU, GACCAA,
GACCAC, GACCAG, GACCCA, GACCCC, GACCCG, GACCGC, GACCGG, GACCGU, GACCUA, GACCUC,
GACCUU, GACGAA, GACGAC, GACGAG, GACGAU, GACGCA, GACGCC, GACGCG, GACGCU, GACGGA,
GACGGC, GACGGG, GACGGU, GACGUA, GACGUC, GACGUG, GACGUU, GACUAA, GACUAC, GACUAG,
GACUAU, GACUCA, GACUCC, GACUCG, GACUGG, GACUGU, GACUUA, GACUUG, GACUUU, GAGAAU,
GAGAGA, GAGAGC, GAGAGG, GAGAUA, GAGAUC, GAGCAA, GAGCAU, GAGCCA, GAGCGA, GAGCGG,
GAGCGU, GAGGGU, GAGGUC, GAGGUG, GAGUAA, GAGUAG, GAGUCC, GAGUUC, GAGUUU,
GAUAAA, GAUAAC, GAUAAG, GAUAAU, GAUACA, GAUACC, GAUACG, GAUACU, GAUAGA, GAUAGC,
GAUAGG, GAUAGU, GAUAUA, GAUCAA, GAUCAC, GAUCAU, GAUCCA, GAUCCC, GAUCCU, GAUCGC,
GAUCGG, GAUCGU, GAUCUA, GAUCUG, GAUCUU, GAUGAA, GAUGAC, GAUGAG, GAUGCA, GAUGCC,
GAUGCG, GAUGCU, GAUGGC, GAUGGG, GAUGGU, GAUGUG, GAUGUU, GAUUAA, GAUUAC,
GAUUAG, GAUUAU, GAUUCA, GAUUCG, GAUUCU, GAUUGA, GAUUGC, GAUUUA, GAUUUC,
GAUUUG, GAUUUU, GCAAAC, GCAAAG, GCAAAU, GCAACA, GCAACC, GCAAGC, GCAAGU, GCAAUA,
GCAAUC, GCAAUG, GCAAUU, GCACAA, GCACAC, GCACAG, GCACCC, GCACCG, GCACCU, GCACGA,
GCACGC, GCACGU, GCACUA, GCACUC, GCACUG, GCACUU, GCAGAU, GCAGCC, GCAGCG, GCAGGC,
GCAGUA, GCAGUC, GCAGUG, GCAGUU, GCAUAA, GCAUAG, GCAUAU, GCAUCG, GCAUCU, GCAUGA,
GCAUGC, GCAUGG, GCAUGU, GCAUUA, GCAUUC, GCAUUG, GCAUUU, GCCAAA, GCCAAC, GCCAAU,
GCCACA, GCCACC, GCCACG, GCCAGA, GCCAGU, GCCAUA, GCCAUC, GCCAUG, GCCAUU, GCCCAA,
GCCCAC, GCCCAG, GCCCCG, GCCCGA, GCCCGG, GCCCGU, GCCGAA, GCCGAC, GCCGAG, GCCGAU,
GCCGCA, GCCGCU, GCCGGA, GCCGGC, GCCGGG, GCCGGU, GCCGUA, GCCGUC, GCCGUG, GCCGUU,
GCCUAA, GCCUAU, GCCUCA, GCCUCC, GCCUCG, GCCUGA, GCCUUA, GCCUUU, GCGAAA, GCGAAC,
GCGAAG, GCGAAU, GCGACC, GCGACG, GCGACU, GCGAGA, GCGAGC, GCGAGG, GCGAGU, GCGAUA,
GCGAUC, GCGAUG, GCGAUU, GCGCAA, GCGCAC, GCGCAG, GCGCAU, GCGCCA, GCGCCC, GCGCCU,
GCGCGA, GCGCGU, GCGCUA, GCGCUC, GCGCUG, GCGCUU, GCGGAA, GCGGAC, GCGGAU, GCGGCA,
GCGGCC, GCGGCU, GCGGGA, GCGGUA, GCGGUC, GCGGUU, GCGUAA, GCGUAC, GCGUAG, GCGUAU,
GCGUCA, GCGUCC, GCGUCG, GCGUCU, GCGUGA, GCGUGC, GCGUGG, GCGUGU, GCGUUA, GCGUUC,
GCGUUG, GCGUUU, GCUAAA, GCUAAC, GCUAAG, GCUAAU, GCUACC, GCUACG, GCUACU, GCUAGA,
GCUAGG, GCUAGU, GCUAUA, GCUAUC, GCUAUU, GCUCAA, GCUCAC, GCUCAG, GCUCAU, GCUCCA,
GCUCCC, GCUCCG, GCUCGA, GCUCGC, GCUCGU, GCUCUA, GCUCUC, GCUCUU, GCUGAA, GCUGAC,
GCUGAU, GCUGCA, GCUGCC, GCUGCG, GCUGCU, GCUGUG, GCUGUU, GCUUAC, GCUUAG, GCUUAU,
GCUUCA, GCUUCG, GCUUGA, GCUUGG, GCUUGU, GCUUUA, GCUUUG, GGAAAG, GGAACA, GGAACC,
GGAACG, GGAACU, GGAAGU, GGAAUA, GGAAUC, GGAAUU, GGACAA, GGACAC, GGACAG, GGACAU,
GGACCG, GGACGA, GGACGC, GGACGU, GGACUA, GGACUC, GGACUU, GGAGAC, GGAGCA, GGAGCG,
GGAGGG, GGAGUA, GGAUAA, GGAUAC, GGAUCA, GGAUCC, GGAUCG, GGAUCU, GGAUGC, GGAUUA,
GGAUUG, GGCAAU, GGCACA, GGCACU, GGCAGA, GGCAUA, GGCAUC, GGCCAC, GGCCAG, GGCCCC,
GGCCGA, GGCCGC, GGCCGU, GGCCUA, GGCCUG, GGCCUU, GGCGAA, GGCGAG, GGCGAU, GGCGCA,
GGCGCU, GGCGGU, GGCGUA, GGCGUC, GGCGUG, GGCGUU, GGCUAA, GGCUAC, GGCUAG, GGCUAU,
GGCUCC, GGCUCG, GGCUGA, GGCUUA, GGCUUC, GGCUUG, GGGAAU, GGGACA, GGGAGA, GGGAGU,
GGGAUA, GGGAUU, GGGCAA, GGGCAC, GGGCAG, GGGCCG, GGGCGG, GGGGCC, GGGGGG,
GGGGGU, GGGGUA, GGGUAC, GGGUAU, GGGUCA, GGGUCC, GGGUCG, GGGUGA, GGGUGC,
GGGUUA, GGGUUG, GGUAAA, GGUAAC, GGUAAG, GGUAAU, GGUACA, GGUACC, GGUACG,
GGUACU, GGUAGC, GGUAGG, GGUAGU, GGUAUA, GGUAUC, GGUAUG, GGUCAA, GGUCAC,
GGUCAG, GGUCAU, GGUCCA, GGUCCG, GGUCCU, GGUCGA, GGUCGC, GGUCGG, GGUCGU, GGUCUC,
GGUCUU, GGUGAA, GGUGAC, GGUGAU, GGUGCA, GGUGCC, GGUGGC, GGUGUA, GGUGUC,
GGUUAA, GGUUAG, GGUUAU, GGUUCA, GGUUCC, GGUUCG, GGUUGC, GGUUUC, GGUUUU,
GUAAAA, GUAAAG, GUAAAU, GUAACC, GUAACG, GUAACU, GUAAGA, GUAAGC, GUAAGG, GUAAGU,
GUAAUA, GUAAUC, GUAAUG, GUAAUU, GUACAA, GUACAC, GUACAG, GUACAU, GUACCA, GUACCC,
GUACCG, GUACCU, GUACGA, GUACGC, GUACGG, GUACGU, GUACUA, GUACUC, GUACUG, GUACUU,
GUAGAA, GUAGAC, GUAGCA, GUAGCC, GUAGCG, GUAGCU, GUAGGA, GUAGGC, GUAGGG,
GUAGGU, GUAGUA, GUAGUC, GUAUAA, GUAUAC, GUAUAG, GUAUAU, GUAUCA, GUAUCG,
GUAUCU, GUAUGA, GUAUGC, GUAUGG, GUAUUA, GUAUUG, GUAUUU, GUCAAA, GUCAAG,
GUCAAU, GUCACA, GUCACC, GUCACG, GUCAGA, GUCAGC, GUCAGG, GUCAUA, GUCAUC, GUCAUG,
GUCCAA, GUCCAC, GUCCAU, GUCCCC, GUCCCU, GUCCGA, GUCCGC, GUCCGG, GUCCGU, GUCCUA,
GUCCUG, GUCCUU, GUCGAA, GUCGAC, GUCGAG, GUCGAU, GUCGCA, GUCGCC, GUCGCG, GUCGCU,
GUCGGA, GUCGGC, GUCGGG, GUCGGU, GUCGUA, GUCGUC, GUCGUU, GUCUAA, GUCUAG, GUCUCA,
GUCUCC, GUCUCG, GUCUGA, GUCUGG, GUCUGU, GUCUUC, GUCUUU, GUGAAA, GUGAAC, GUGAAG,
GUGACC, GUGACG, GUGAGA, GUGAGC, GUGAGU, GUGAUC, GUGAUG, GUGAUU, GUGCAC,
GUGCAU, GUGCCC, GUGCCG, GUGCGA, GUGCGG, GUGCGU, GUGCUA, GUGCUC, GUGCUG,
GUGGAG, GUGGCG, GUGGCU, GUGGGU, GUGGUC, GUGGUG, GUGUAA, GUGUAG, GUGUCG,
GUGUGA, GUGUGC, GUGUGU, GUGUUG, GUGUUU, GUUAAA, GUUAAC, GUUAAG, GUUACA,
GUUACC, GUUACG, GUUACU, GUUAGA, GUUAGC, GUUAGU, GUUAUA, GUUAUC, GUUAUG,
GUUAUU, GUUCAA, GUUCAC, GUUCAG, GUUCCA, GUUCCG, GUUCGA, GUUCGC, GUUCGG, GUUCGU,
GUUCUA, GUUCUG, GUUGAA, GUUGAC, GUUGAG, GUUGAU, GUUGCG, GUUGCU, GUUGGA,
GUUGGC, GUUGGU, GUUGUC, GUUGUG, GUUGUU, GUUUAA, GUUUAC, GUUUAG, GUUUAU,
GUUUCA, GUUUCC, GUUUCU, GUUUGA, GUUUGC, GUUUGG, GUUUGU, GUUUUA, GUUUUC,
GUUUUU, UAAAAA, UAAAAC, UAAAAG, UAAAAU, UAAACA, UAAACC, UAAACG, UAAACU, UAAAGA,
UAAAGG, UAAAGU, UAAAUA, UAAAUC, UAAAUG, UAAAUU, UAACAA, UAACAC, UAACAG, UAACCA,
UAACCC, UAACCG, UAACCU, UAACGA, UAACGC, UAACGG, UAACGU, UAACUA, UAACUG, UAACUU,
UAAGAG, UAAGAU, UAAGCA, UAAGCC, UAAGCG, UAAGCU, UAAGGA, UAAGGC, UAAGGG, UAAGGU,
UAAGUA, UAAGUC, UAAGUG, UAAGUU, UAAUAA, UAAUCA, UAAUCC, UAAUCG, UAAUCU, UAAUGA,
UAAUGG, UAAUGU, UAAUUA, UAAUUC, UAAUUG, UACAAC, UACAAG, UACAAU, UACACC, UACACG,
UACACU, UACAGA, UACAGC, UACAUA, UACAUC, UACAUU, UACCAA, UACCAC, UACCAG, UACCAU,
UACCCC, UACCCG, UACCCU, UACCGA, UACCGC, UACCGG, UACCGU, UACCUA, UACCUG, UACGAA,
UACGAC, UACGAG, UACGAU, UACGCA, UACGCC, UACGCG, UACGCU, UACGGC, UACGGG, UACGGU,
UACGUA, UACGUC, UACGUG, UACGUU, UACUAA, UACUAC, UACUAG, UACUAU, UACUCA, UACUCC,
UACUCG, UACUCU, UACUGA, UACUGC, UACUGG, UACUUA, UACUUG, UACUUU, UAGAAA, UAGAAG,
UAGAAU, UAGACA, UAGACG, UAGAGA, UAGAGC, UAGAGU, UAGAUA, UAGAUC, UAGAUG, UAGCAU,
UAGCCC, UAGCCG, UAGCCU, UAGCGA, UAGCGC, UAGCGU, UAGCUA, UAGCUC, UAGCUG, UAGGAA,
UAGGAU, UAGGCG, UAGGCU, UAGGGU, UAGGUC, UAGGUG, UAGGUU, UAGUAA, UAGUAC,
UAGUAG, UAGUAU, UAGUCA, UAGUCG, UAGUGU, UAGUUA, UAGUUC, UAGUUG, UAGUUU,
UAUAAC, UAUAAG, UAUACU, UAUAGA, UAUAGC, UAUAGG, UAUAGU, UAUAUA, UAUAUC, UAUAUG,
UAUAUU, UAUCAA, UAUCAC, UAUCAU, UAUCCA, UAUCCC, UAUCCG, UAUCCU, UAUCGA, UAUCGC,
UAUCGG, UAUCGU, UAUCUA, UAUCUC, UAUCUG, UAUCUU, UAUGAA, UAUGAC, UAUGAG,
UAUGAU, UAUGCA, UAUGCG, UAUGCU, UAUGGA, UAUGGC, UAUGUC, UAUGUG, UAUGUU,
UAUUAG, UAUUCA, UAUUCC, UAUUCG, UAUUCU, UAUUGA, UAUUGG, UAUUUA, UAUUUC,
UAUUUG, UAUUUU, UCAAAA, UCAAAC, UCAAAG, UCAACC, UCAACU, UCAAGA, UCAAGC, UCAAUA,
UCAAUC, UCAAUG, UCAAUU, UCACCC, UCACCG, UCACCU, UCACGA, UCACGC, UCACGG, UCACGU,
UCACUA, UCACUC, UCACUU, UCAGAA, UCAGAC, UCAGAG, UCAGCG, UCAGCU, UCAGGA, UCAGGC,
UCAGGU, UCAGUC, UCAGUU, UCAUAA, UCAUCA, UCAUCC, UCAUCG, UCAUGC, UCAUGG, UCAUGU,
UCAUUA, UCAUUG, UCCAAA, UCCAAC, UCCAAG, UCCAAU, UCCACA, UCCACC, UCCACG, UCCAGC,
UCCAGG, UCCAUA, UCCAUC, UCCAUU, UCCCAA, UCCCAG, UCCCAU, UCCCCC, UCCCCG, UCCCCU,
UCCCGA, UCCCGC, UCCCGG, UCCCGU, UCCCUA, UCCCUC, UCCGAA, UCCGAC, UCCGAG, UCCGAU,
UCCGCA, UCCGCC, UCCGGA, UCCGGC, UCCGGU, UCCGUA, UCCGUC, UCCGUG, UCCUAA, UCCUCA,
UCCUCG, UCCUCU, UCCUGC, UCCUGU, UCCUUA, UCCUUC, UCCUUU, UCGAAA, UCGAAC, UCGAAG,
UCGAAU, UCGACA, UCGACC, UCGACG, UCGACU, UCGAGA, UCGAGC, UCGAGG, UCGAUA, UCGAUC,
UCGAUG, UCGAUU, UCGCAA, UCGCAC, UCGCAG, UCGCAU, UCGCCA, UCGCCC, UCGCCG, UCGCCU,
UCGCGA, UCGCGC, UCGCGU, UCGCUA, UCGCUC, UCGGAA, UCGGAC, UCGGAG, UCGGAU, UCGGCA,
UCGGCU, UCGGGG, UCGGGU, UCGGUC, UCGGUG, UCGGUU, UCGUAA, UCGUAC, UCGUAG,
UCGUAU, UCGUCA, UCGUCC, UCGUCG, UCGUCU, UCGUGA, UCGUGU, UCGUUA, UCGUUC, UCGUUG,
UCGUUU, UCUAAC, UCUAAG, UCUAAU, UCUACA, UCUACC, UCUACG, UCUACU, UCUAGC, UCUAGG,
UCUAGU, UCUAUA, UCUAUC, UCUAUG, UCUAUU, UCUCAG, UCUCAU, UCUCCG, UCUCGC, UCUCGG,
UCUCGU, UCUCUC, UCUGAA, UCUGAU, UCUGCA, UCUGCG, UCUGCU, UCUGGC, UCUGGU, UCUGUC,
UCUGUG, UCUGUU, UCUUAA, UCUUAC, UCUUAG, UCUUAU, UCUUCA, UCUUCC, UCUUCG, UCUUCU,
UCUUGC, UCUUGG, UCUUGU, UCUUUA, UCUUUC, UCUUUG, UCUUUU, UGAAAA, UGAAAC,
UGAACA, UGAACC, UGAAGG, UGAAUC, UGAAUG, UGACAA, UGACAC, UGACAG, UGACCA, UGACCC,
UGACCG, UGACGA, UGACGC, UGACGG, UGACGU, UGACUA, UGACUC, UGACUU, UGAGAG, UGAGAU,
UGAGCA, UGAGCC, UGAGCU, UGAGGC, UGAGGU, UGAGUA, UGAGUU, UGAUAC, UGAUAG,
UGAUAU, UGAUCA, UGAUCG, UGAUCU, UGAUGA, UGAUGC, UGAUGG, UGAUGU, UGAUUA,
UGAUUC, UGAUUG, UGAUUU, UGCAAC, UGCAAG, UGCACA, UGCACG, UGCAGG, UGCAGU, UGCAUC,
UGCCCA, UGCCCC, UGCCCG, UGCCGA, UGCCGC, UGCCGG, UGCCGU, UGCCUA, UGCCUC, UGCCUG,
UGCCUU, UGCGAA, UGCGAC, UGCGAU, UGCGCC, UGCGCG, UGCGCU, UGCGGC, UGCGGG, UGCGGU,
UGCGUA, UGCGUC, UGCGUG, UGCGUU, UGCUAC, UGCUAU, UGCUCC, UGCUCG, UGCUGC, UGCUGG,
UGCUGU, UGCUUA, UGCUUU, UGGAAC, UGGAAG, UGGAGC, UGGAUC, UGGAUU, UGGCAA,
UGGCAC, UGGCAG, UGGCCG, UGGCCU, UGGCGA, UGGCGC, UGGCGU, UGGCUA, UGGCUC, UGGCUU,
UGGGAA, UGGGCA, UGGGCC, UGGGGC, UGGGUC, UGGUAA, UGGUAG, UGGUAU, UGGUCC,
UGGUCG, UGGUCU, UGGUGA, UGGUGC, UGGUGG, UGGUGU, UGGUUA, UGGUUG, UGUAAA,
UGUAAC, UGUAAG, UGUACC, UGUACG, UGUACU, UGUAGA, UGUAGC, UGUAGU, UGUAUC,
UGUAUU, UGUCAA, UGUCAC, UGUCAG, UGUCAU, UGUCCA, UGUCCC, UGUCCG, UGUCGA, UGUCGC,
UGUCGG, UGUCGU, UGUCUA, UGUCUC, UGUGAC, UGUGAG, UGUGAU, UGUGCA, UGUGGU,
UGUGUA, UGUGUU, UGUUAC, UGUUAG, UGUUAU, UGUUCA, UGUUCC, UGUUCG, UGUUGG,
UGUUGU, UGUUUA, UGUUUC, UGUUUG, UGUUUU, UUAAAA, UUAAAC, UUAAAG, UUAAAU,
UUAACC, UUAACG, UUAACU, UUAAGU, UUAAUA, UUAAUC, UUAAUG, UUAAUU, UUACAA, UUACAC,
UUACAG, UUACAU, UUACCA, UUACCC, UUACCG, UUACCU, UUACGA, UUACGC, UUACGG, UUACGU,
UUACUA, UUACUC, UUACUG, UUACUU, UUAGAA, UUAGAC, UUAGCC, UUAGCG, UUAGCU, UUAGGC,
UUAGGU, UUAGUA, UUAGUC, UUAGUU, UUAUAA, UUAUAC, UUAUAG, UUAUAU, UUAUCC,
UUAUCG, UUAUCU, UUAUGA, UUAUGG, UUAUGU, UUAUUA, UUAUUC, UUAUUG, UUAUUU,
UUCAAC, UUCAAU, UUCACA, UUCACC, UUCACG, UUCACU, UUCAGC, UUCAGG, UUCAGU, UUCAUA,
UUCAUC, UUCAUG, UUCAUU, UUCCAA, UUCCCA, UUCCCG, UUCCGA, UUCCGU, UUCCUU, UUCGAA,
UUCGAC, UUCGAG, UUCGAU, UUCGCA, UUCGCC, UUCGCG, UUCGCU, UUCGGA, UUCGGC, UUCGGG,
UUCGGU, UUCGUA, UUCGUC, UUCGUG, UUCGUU, UUCUAC, UUCUAG, UUCUCA, UUCUCG,
UUCUGG, UUCUUA, UUCUUU, UUGAAA, UUGAAC, UUGAAG, UUGAAU, UUGACC, UUGACG,
UUGACU, UUGAGA, UUGAGC, UUGAGU, UUGAUA, UUGAUC, UUGAUG, UUGAUU, UUGCAA,
UUGCAC, UUGCAG, UUGCAU, UUGCCC, UUGCCG, UUGCGA, UUGCGC, UUGCGG, UUGCGU, UUGCUA,
UUGCUC, UUGCUG, UUGCUU, UUGGAA, UUGGAG, UUGGCC, UUGGCG, UUGGCU, UUGGGC,
UUGGGU, UUGGUA, UUGGUG, UUGUAA, UUGUAC, UUGUCA, UUGUCG, UUGUCU, UUGUGC,
UUGUGG, UUGUUA, UUGUUG, UUGUUU, UUUAAA, UUUAAC, UUUAAG, UUUAAU, UUUACA,
UUUACC, UUUACG, UUUACU, UUUAGA, UUUAGC, UUUAGG, UUUAGU, UUUAUA, UUUAUC,
UUUAUG, UUUAUU, UUUCAU, UUUCCA, UUUCCG, UUUCCU, UUUCGA, UUUCGC, UUUCGG,
UUUCGU, UUUCUA, UUUCUC, UUUCUG, UUUCUU, UUUGAA, UUUGAC, UUUGAG, UUUGAU,
UUUGCC, UUUGCU, UUUGGA, UUUGGC, UUUGGG, UUUGGU, UUUGUA, UUUGUC, UUUGUU,
UUUUAA, UUUUAG, UUUUAU, UUUUCC, UUUUCG, UUUUCU, UUUUGA, UUUUGC, UUUUGG,
UUUUGU, UUUUUA, UUUUUC, UUUUUU

TABLE 2
Oligonucleotide sequences made for testing in the lab.

| | | RQ | Gene | Expt | Cell | | Assay | Base | Formatted | |
|---|---|---|---|---|---|---|---|---|---|---|
| Oligo ID | RQ | SE | Name | Type | Line/Tissue | [Oligo] | Type | Sequence | Sequence | Coordinates_g |
| APOE- | 0.533162505 | NA | APOE | in | Hep3B | 20 | qRTP | GCUUG | dGs; lnaCs; | APOE:1989L15 |
| 1 | | | | vitro | | | CR | CUCCAC | dTs; lnaTs; | |
| | | | | | | | | CUUG | dGs; lnaCs; | |
| | | | | | | | | | dTs; lnaCs; | |
| | | | | | | | | | dCs; | |
| | | | | | | | | | lnaAs; dCs; | |
| | | | | | | | | | lnaCs; | |
| | | | | | | | | | dTs; lnaTs; | |
| | | | | | | | | | dG-Sup | |
| APOE- | 0.70560684 | NA | APOE | in | Hep3B | 20 | qRTP | GCUUG | dGs; lnaCs; | APOE:1989L15 |
| 1 | | | | vitro | | | CR | CUCCAC | dTs; lnaTs; | |
| | | | | | | | | CUUG | dGs; lnaCs; | |
| | | | | | | | | | dTs; lnaCs; | |
| | | | | | | | | | dCs; | |
| | | | | | | | | | lnaAs; dCs; | |
| | | | | | | | | | lnaCs; | |
| | | | | | | | | | dTs; lnaTs; | |
| | | | | | | | | | dG-Sup | |
| APOE- | 0.46979017 | 0.105431794 | APOE | in | Hep3B | 50 | qRTP | GCUUG | dGs; lnaCs; | APOE:1989L15 |
| 1 | | | | vitro | | | CR | CUCCAC | dTs; lnaTs; | |
| | | | | | | | | CUUG | dGs; lnaCs; | |
| | | | | | | | | | dTs; lnaCs; | |
| | | | | | | | | | dCs; | |
| | | | | | | | | | lnaAs; dCs; | |
| | | | | | | | | | lnaCs; | |
| | | | | | | | | | dTs; lnaTs; | |
| | | | | | | | | | dG-Sup | |
| APOE- | 0.836310609 | 0.020946809 | APOE | in | RPTEC | 10 | qRTP | GCUUG | dGs; lnaCs; | APOE:1989L15 |
| 1 | | | | vitro | | | CR | CUCCAC | dTs; lnaTs; | |
| | | | | | | | | CUUG | dGs; lnaCs; | |
| | | | | | | | | | dTs; lnaCs; | |
| | | | | | | | | | dCs; | |
| | | | | | | | | | lnaAs; dCs; | |
| | | | | | | | | | lnaCs; | |
| | | | | | | | | | dTs; lnaTs; | |
| | | | | | | | | | dG-Sup | |
| APOE- | 0.70560684 | NA | APOE | in | Hep3B | 20 | qRTP | GCUUG | dGs; lnaCs; | APOE:1989L15 |
| 1 | | | | vitro | | | CR | CUCCAC | dTs; lnaTs; | |
| | | | | | | | | CUUG | dGs; lnaCs; | |
| | | | | | | | | | dTs; lnaCs; | |
| | | | | | | | | | dCs; | |
| | | | | | | | | | lnaAs; dCs; | |
| | | | | | | | | | lnaCs; | |
| | | | | | | | | | dTs; lnaTs; | |
| | | | | | | | | | dG-Sup | |
| APOE- | 0.46979017 | 0.104903665 | APOE | in | Hep3B | 50 | qRTP | GCUUG | dGs; lnaCs; | APOE:1989L15 |
| 1 | | | | vitro | | | CR | CUCCAC | dTs; lnaTs; | |
| | | | | | | | | CUUG | dGs; lnaCs; | |
| | | | | | | | | | dTs; lnaCs; | |
| | | | | | | | | | dCs; | |
| | | | | | | | | | lnaAs; dCs; | |
| | | | | | | | | | lnaCs; | |
| | | | | | | | | | dTs; lnaTs; | |
| | | | | | | | | | dG-Sup | |
| APOE- | 0.946761815 | 0.060930197 | APOE | in | HepG2 | 20 | qRTP | GCUUG | dGs; lnaCs; | APOE:1989L15 |
| 1 | | | | vitro | | | CR | CUCCAC | dTs; lnaTs; | |
| | | | | | | | | CUUG | dGs; lnaCs; | |
| | | | | | | | | | dTs; lnaCs; | |
| | | | | | | | | | dCs; | |
| | | | | | | | | | lnaAs; dCs; | |
| | | | | | | | | | lnaCs; | |
| | | | | | | | | | dTs; lnaTs; | |
| | | | | | | | | | dG-Sup | |
| APOE- | 2.406290601 | 0.290316873 | APOE | in | HepG2 | 50 | qRTP | GCUUG | dGs; lnaCs; | APOE:1989L15 |
| 1 | | | | vitro | | | CR | CUCCAC | dTs; lnaTs; | |
| | | | | | | | | CUUG | dGs; lnaCs; | |
| | | | | | | | | | dTs; lnaCs; | |
| | | | | | | | | | dCs; | |
| | | | | | | | | | lnaAs; dCs; | |
| | | | | | | | | | lnaCs; | |
| | | | | | | | | | dTs; lnaTs; | |
| | | | | | | | | | dG-Sup | |
| APOE- | 0.863511917 | 0.073119973 | APOE | in | Hep3B | 20 | qRTP | UGUCU | dTs; lnaGs; | APOE:71932L15 |
| 2 | | | | vitro | | | CR | CCACCC | dTs; lnaCs; | |
| | | | | | | | | GCUU | dTs; lnaCs; | |
| | | | | | | | | | dCs; lnaAs; | |
| | | | | | | | | | dCs; | |
| | | | | | | | | | lnaCs; dCs; | |
| | | | | | | | | | lnaGs; dCs; | |
| | | | | | | | | | lnaTs; | |
| | | | | | | | | | dT-Sup | |
| APOE- | 0.807764383 | 0.025505898 | APOE | in | Hep3B | 20 | qRTP | UGUCU | dTs; lnaGs; | APOE:71932L15 |
| 2 | | | | vitro | | | CR | CCACCC | dTs; lnaCs; | |
| | | | | | | | | GCUU | dTs; lnaCs; | |
| | | | | | | | | | dCs; lnaAs; | |
| | | | | | | | | | dCs; | |
| | | | | | | | | | lnaCs; dCs; | |
| | | | | | | | | | lnaGs; dCs; | |
| | | | | | | | | | lnaTs; | |
| | | | | | | | | | dT-Sup | |
| APOE- | 0.595874927 | 0.027650661 | APOE | in | Hep3B | 50 | qRTP | UGUCU | dTs; lnaGs; | APOE:71932L15 |
| 2 | | | | vitro | | | CR | CCACCC | dTs; lnaCs; | |
| | | | | | | | | GCUU | dTs; lnaCs; | |
| | | | | | | | | | dCs; lnaAs; | |
| | | | | | | | | | dCs; | |
| | | | | | | | | | lnaCs; dCs; | |
| | | | | | | | | | lnaGs; dCs; | |
| | | | | | | | | | lnaTs; | |
| | | | | | | | | | dT-Sup | |
| APOE- | 0.787936302 | 0.124110842 | APOE | in | RPTEC | 10 | qRTP | UGUCU | dTs; lnaGs; | APOE:71932L15 |
| 2 | | | | vitro | | | CR | CCACCC | dTs; lnaCs; | |
| | | | | | | | | GCUU | dTs; lnaCs; | |
| | | | | | | | | | dCs; lnaAs; | |
| | | | | | | | | | dCs; | |
| | | | | | | | | | lnaCs; dCs; | |
| | | | | | | | | | lnaGs; dCs; | |
| | | | | | | | | | lnaTs; | |
| | | | | | | | | | dT-Sup | |
| APOE- | 0.689029315 | 0.00527346 | APOE | in | RPTEC | 30 | qRTP | UGUCU | dTs; lnaGs; | APOE:71932L15 |
| 2 | | | | vitro | | | CR | CCACCC | dTs; lnaCs; | |
| | | | | | | | | GCUU | dTs; lnaCs; | |
| | | | | | | | | | dCs; lnaAs; | |
| | | | | | | | | | dCs; | |
| | | | | | | | | | lnaCs; dCs; | |
| | | | | | | | | | lnaGs; dCs; | |
| | | | | | | | | | lnaTs; | |
| | | | | | | | | | dT-Sup | |
| APOE- | 0.807764383 | 0.025293511 | APOE | in | Hep3B | 20 | qRTP | UGUCU | dTs; lnaGs; | APOE:71932L15 |
| 2 | | | | vitro | | | CR | CCACCC | dTs; lnaCs; | |
| | | | | | | | | GCUU | dTs; lnaCs; | |
| | | | | | | | | | dCs; lnaAs; | |
| | | | | | | | | | dCs; | |
| | | | | | | | | | lnaCs; dCs; | |
| | | | | | | | | | lnaGs; dCs; | |
| | | | | | | | | | lnaTs; | |
| | | | | | | | | | dT-Sup | |
| APOE- | 0.595874927 | 0.027512153 | APOE | in | Hep3B | 50 | qRTP | UGUCU | dTs; lnaGs; | APOE:71932L15 |
| 2 | | | | vitro | | | CR | CCACCC | dTs; lnaCs; | |
| | | | | | | | | GCUU | dTs; lnaCs; | |
| | | | | | | | | | dCs; lnaAs; | |
| | | | | | | | | | dCs; | |
| | | | | | | | | | lnaCs; dCs; | |
| | | | | | | | | | lnaGs; dCs; | |
| | | | | | | | | | lnaTs; | |
| | | | | | | | | | dT-Sup | |
| APOE- | 0.84368505 | 0.058246957 | APOE | in | HepG2 | 20 | qRTP | UGUCU | dTs; lnaGs; | APOE:71932L15 |
| 2 | | | | vitro | | | CR | CCACCC | dTs; lnaCs; | |
| | | | | | | | | GCUU | dTs; lnaCs; | |
| | | | | | | | | | dCs; lnaAs; | |
| | | | | | | | | | dCs; | |
| | | | | | | | | | lnaCs; dCs; | |
| | | | | | | | | | lnaGs; dCs; | |
| | | | | | | | | | lnaTs; | |
| | | | | | | | | | dT-Sup | |
| APOE- | 2.502956418 | 0.152325363 | APOE | in | HepG2 | 50 | qRTP | UGUCU | dTs; lnaGs; | APOE:71932L15 |
| 2 | | | | vitro | | | CR | CCACCC | dTs; lnaCs; | |
| | | | | | | | | GCUU | dTs; lnaCs; | |
| | | | | | | | | | dCs; lnaAs; | |
| | | | | | | | | | dCs; | |
| | | | | | | | | | lnaCs; dCs; | |
| | | | | | | | | | lnaGs; dCs; | |
| | | | | | | | | | lnaTs; | |
| | | | | | | | | | dT-Sup | |
| APOE- | 0.702888129 | 0.064408365 | APOE | in | Hep3B | 20 | qRTP | GCUCC | dGs; lnaCs; | APOE:2009L15 |
| 3 | | | | vitro | | | CR | GGCUC | dTs; lnaCs; | |
| | | | | | | | | UGUCU | dCs; lnaGs; | |
| | | | | | | | | | dGs; | |
| | | | | | | | | | lnaCs; dTs; | |
| | | | | | | | | | lnaCs; dTs; | |
| | | | | | | | | | lnaGs; | |
| | | | | | | | | | dTs; lnaCs; | |
| | | | | | | | | | dT-Sup | |
| APOE- | 0.974216068 | 0.036666114 | APOE | in | Hep3B | 20 | qRTP | GCUCC | dGs; lnaCs; | APOE:2009L15 |
| 3 | | | | vitro | | | CR | GGCUC | dTs; lnaCs; | |
| | | | | | | | | UGUCU | dCs; lnaGs; | |
| | | | | | | | | | dGs; | |
| | | | | | | | | | lnaCs; dTs; | |
| | | | | | | | | | lnaCs; dTs; | |
| | | | | | | | | | lnaGs; | |
| | | | | | | | | | dTs; lnaCs; | |
| | | | | | | | | | dT-Sup | |
| APOE- | 0.634749796 | 0.024816778 | APOE | in | Hep3B | 50 | qRTP | GCUCC | dGs; lnaCs; | APOE:2009L15 |
| 3 | | | | vitro | | | CR | GGCUC | dTs; lnaCs; | |
| | | | | | | | | UGUCU | dCs; lnaGs; | |
| | | | | | | | | | dGs; | |
| | | | | | | | | | lnaCs; dTs; | |
| | | | | | | | | | lnaCs; dTs; | |
| | | | | | | | | | lnaGs; | |
| | | | | | | | | | dTs; lnaCs; | |
| | | | | | | | | | dT-Sup | |
| APOE- | 0.714834334 | 0.022708 | APOE | in | RPTEC | 10 | qRTP | GCUCC | dGs; lnaCs; | APOE:2009L15 |
| 3 | | | | vitro | | | CR | GGCUC | dTs; lnaCs; | |
| | | | | | | | | UGUCU | dCs; lnaGs; | |
| | | | | | | | | | dGs; | |
| | | | | | | | | | lnaCs; dTs; | |
| | | | | | | | | | lnaCs; dTs; | |
| | | | | | | | | | lnaGs; | |
| | | | | | | | | | dTs; lnaCs; | |
| | | | | | | | | | dT-Sup | |
| APOE- | 0.999862821 | 0.199872089 | APOE | in | RPTEC | 30 | qRTP | GCUCC | dGs; lnaCs; | APOE:2009L15 |
| 3 | | | | vitro | | | CR | GGCUC | dTs; lnaCs; | |
| | | | | | | | | UGUCU | dCs; lnaGs; | |
| | | | | | | | | | dGs; | |
| | | | | | | | | | lnaCs; dTs; | |
| | | | | | | | | | lnaCs; dTs; | |
| | | | | | | | | | lnaGs; | |
| | | | | | | | | | dTs; lnaCs; | |
| | | | | | | | | | dT-Sup | |
| APOE- | 0.974216068 | 0.036360797 | APOE | in | Hep3B | 20 | qRTP | GCUCC | dGs; lnaCs; | APOE:2009L15 |
| 3 | | | | vitro | | | CR | GGCUC | dTs; lnaCs; | |
| | | | | | | | | UGUCU | dCs; lnaGs; | |
| | | | | | | | | | dGs; | |
| | | | | | | | | | lnaCs; dTs; | |
| | | | | | | | | | lnaCs; dTs; | |
| | | | | | | | | | lnaGs; | |
| | | | | | | | | | dTs; lnaCs; | |
| | | | | | | | | | dT-Sup | |
| APOE- | 0.634749796 | 0.024692466 | APOE | in | Hep3B | 50 | qRTP | GCUCC | dGs; lnaCs; | APOE:2009L15 |
| 3 | | | | vitro | | | CR | GGCUC | dTs; lnaCs; | |
| | | | | | | | | UGUCU | dCs; lnaGs; | |
| | | | | | | | | | dGs; | |
| | | | | | | | | | lnaCs; dTs; | |
| | | | | | | | | | lnaCs; dTs; | |
| | | | | | | | | | lnaGs; | |
| | | | | | | | | | dTs; lnaCs; | |
| | | | | | | | | | dT-Sup | |
| APOE- | 0.640439463 | 0.050632152 | APOE | in | HepG2 | 20 | qRTP | GCUCC | dGs; lnaCs; | APOE:2009L15 |
| 3 | | | | vitro | | | CR | GGCUC | dTs; lnaCs; | |
| | | | | | | | | UGUCU | dCs; lnaGs; | |
| | | | | | | | | | dGs; | |
| | | | | | | | | | lnaCs; dTs; | |
| | | | | | | | | | lnaCs; dTs; | |
| | | | | | | | | | lnaGs; | |
| | | | | | | | | | dTs; lnaCs; | |
| | | | | | | | | | dT-Sup | |
| APOE- | 1.640373101 | 0.104925798 | APOE | in | HepG2 | 50 | qRTP | GCUCC | dGs; lnaCs; | APOE:2009L15 |
| 3 | | | | vitro | | | CR | GGCUC | dTs; lnaCs; | |
| | | | | | | | | UGUCU | dCs; lnaGs; | |
| | | | | | | | | | dGs; | |
| | | | | | | | | | lnaCs; dTs; | |
| | | | | | | | | | lnaCs; dTs; | |
| | | | | | | | | | lnaGs; | |
| | | | | | | | | | dTs; lnaCs; | |
| | | | | | | | | | dT-Sup | |
| APOE- | 0.569551245 | 0.452310473 | APOE | in | Hep3B | 20 | qRTP | AGGCG | dAs; lnaGs; | APOE:2022L15 |
| 4 | | | | vitro | | | CR | CAGCU | dGs; lnaCs; | |
| | | | | | | | | CGGGC | dGs; lnaCs; | |
| | | | | | | | | | dAs; lnaGs; | |
| | | | | | | | | | dCs; | |
| | | | | | | | | | lnaTs; dCs; | |
| | | | | | | | | | lnaGs; dGs; | |
| | | | | | | | | | lnaGs; | |
| | | | | | | | | | dC-Sup | |
| APOE- | 0.954960214 | 0.03539844 | APOE | in | Hep3B | 20 | qRTP | AGGCG | dAs; lnaGs; | APOE:2022L15 |
| 4 | | | | vitro | | | CR | CAGCU | dGs; lnaCs; | |
| | | | | | | | | CGGGC | dGs; lnaCs; | |
| | | | | | | | | | dAs; lnaGs; | |
| | | | | | | | | | dCs; | |
| | | | | | | | | | lnaTs; dCs; | |
| | | | | | | | | | lnaGs; dGs; | |
| | | | | | | | | | lnaGs; | |
| | | | | | | | | | dC-Sup | |
| APOE- | 0.797695703 | 0.059826009 | APOE | in | Hep3B | 50 | qRTP | AGGCG | dAs; lnaGs; | APOE:2022L15 |
| 4 | | | | vitro | | | CR | CAGCU | dGs; lnaCs; | |
| | | | | | | | | CGGGC | dGs; lnaCs; | |
| | | | | | | | | | dAs; lnaGs; | |
| | | | | | | | | | dCs; | |
| | | | | | | | | | lnaTs; dCs; | |
| | | | | | | | | | lnaGs; dGs; | |
| | | | | | | | | | lnaGs; | |
| | | | | | | | | | dC-Sup | |
| APOE- | 0.712511599 | 0.040552265 | APOE | in | RPTEC | 10 | qRTP | AGGCG | dAs; lnaGs; | APOE:2022L15 |
| 4 | | | | vitro | | | CR | CAGCU | dGs; lnaCs; | |
| | | | | | | | | CGGGC | dGs; lnaCs; | |
| | | | | | | | | | dAs; lnaGs; | |
| | | | | | | | | | dCs; | |
| | | | | | | | | | lnaTs; dCs; | |
| | | | | | | | | | lnaGs; dGs; | |
| | | | | | | | | | lnaGs; | |
| | | | | | | | | | dC-Sup | |
| APOE- | 0.779379909 | 0.111000046 | APOE | in | RPTEC | 30 | qRTP | AGGCG | dAs; lnaGs; | APOE:2022L15 |
| 4 | | | | vitro | | | CR | CAGCU | dGs; lnaCs; | |
| | | | | | | | | CGGGC | dGs; lnaCs; | |
| | | | | | | | | | dAs; lnaGs; | |
| | | | | | | | | | dCs; | |
| | | | | | | | | | lnaTs; dCs; | |
| | | | | | | | | | lnaGs; dGs; | |
| | | | | | | | | | lnaGs; | |
| | | | | | | | | | dC-Sup | |
| APOE- | 0.954960214 | 0.035103679 | APOE | in | Hep3B | 20 | qRTP | AGGCG | dAs; lnaGs; | APOE:2022L15 |
| 4 | | | | vitro | | | CR | CAGCU | dGs; lnaCs; | |
| | | | | | | | | CGGGC | dGs; lnaCs; | |
| | | | | | | | | | dAs; lnaGs; | |
| | | | | | | | | | dCs; | |
| | | | | | | | | | lnaTs; dCs; | |
| | | | | | | | | | lnaGs; dGs; | |
| | | | | | | | | | lnaGs; | |
| | | | | | | | | | dC-Sup | |
| APOE- | 0.797695703 | 0.059526328 | APOE | in | Hep3B | 50 | qRTP | AGGCG | dAs; lnaGs; | APOE:2022L15 |
| 4 | | | | vitro | | | CR | CAGCU | dGs; lnaCs; | |
| | | | | | | | | CGGGC | dGs; lnaCs; | |
| | | | | | | | | | dAs; lnaGs; | |
| | | | | | | | | | dCs; | |
| | | | | | | | | | lnaTs; dCs; | |
| | | | | | | | | | lnaGs; dGs; | |
| | | | | | | | | | lnaGs; | |
| | | | | | | | | | dC-Sup | |
| APOE- | 0.942757949 | 0.060410117 | APOE | in | HepG2 | 20 | qRTP | AGGCG | dAs; lnaGs; | APOE:2022L15 |
| 4 | | | | vitro | | | CR | CAGCU | dGs; lnaCs; | |
| | | | | | | | | CGGGC | dGs; lnaCs; | |
| | | | | | | | | | dAs; lnaGs; | |
| | | | | | | | | | dCs; | |
| | | | | | | | | | lnaTs; dCs; | |
| | | | | | | | | | lnaGs; dGs; | |
| | | | | | | | | | lnaGs; | |
| | | | | | | | | | dC-Sup | |
| APOE- | 2.283498266 | 0.331988966 | APOE | in | HepG2 | 50 | qRTP | AGGCG | dAs; lnaGs; | APOE:2022L15 |
| 4 | | | | vitro | | | CR | CAGCU | dGs; lnaCs; | |
| | | | | | | | | CGGGC | dGs; lnaCs; | |
| | | | | | | | | | dAs; lnaGs; | |
| | | | | | | | | | dCs; | |
| | | | | | | | | | lnaTs; dCs; | |
| | | | | | | | | | lnaGs; dGs; | |
| | | | | | | | | | lnaGs; | |
| | | | | | | | | | dC-Sup | |
| APOE- | 0.526792604 | 0.467151639 | APOE | in | Hep3B | 20 | qRTP | UCUGC | dTs; lnaCs; | APOE:2039L15 |
| 5 | | | | vitro | | | CR | CACUC | dTs; lnaGs; | |
| | | | | | | | | GGUCU | dCs; lnaCs; | |
| | | | | | | | | | dAs; lnaCs; | |
| | | | | | | | | | dTs; | |
| | | | | | | | | | lnaCs; dGs; | |
| | | | | | | | | | lnaGs; | |
| | | | | | | | | | dTs; lnaCs; | |
| | | | | | | | | | dT-Sup | |
| APOE- | 0.966404134 | NA | APOE | in | Hep3B | 20 | qRTP | UCUGC | dTs; lnaCs; | APOE:2039L15 |
| 5 | | | | vitro | | | CR | CACUC | dTs; lnaGs; | |
| | | | | | | | | GGUCU | dCs; lnaCs; | |
| | | | | | | | | | dAs; lnaCs; | |
| | | | | | | | | | dTs; | |
| | | | | | | | | | lnaCs; dGs; | |
| | | | | | | | | | lnaGs; | |
| | | | | | | | | | dTs; lnaCs; | |
| | | | | | | | | | dT-Sup | |
| APOE- | 0.735569461 | 0.049996844 | APOE | in | Hep3B | 50 | qRTP | UCUGC | dTs; lnaCs; | APOE:2039L15 |
| 5 | | | | vitro | | | CR | CACUC | dTs; lnaGs; | |
| | | | | | | | | GGUCU | dCs; lnaCs; | |
| | | | | | | | | | dAs; lnaCs; | |
| | | | | | | | | | dTs; | |
| | | | | | | | | | lnaCs; dGs; | |
| | | | | | | | | | lnaGs; | |
| | | | | | | | | | dTs; lnaCs; | |
| | | | | | | | | | dT-Sup | |
| APOE- | 0.646368611 | 0.024946007 | APOE | in | RPTEC | 10 | qRTP | UCUGC | dTs; lnaCs; | APOE:2039L15 |
| 5 | | | | vitro | | | CR | CACUC | dTs; lnaGs; | |
| | | | | | | | | GGUCU | dCs; lnaCs; | |
| | | | | | | | | | dAs; lnaCs; | |
| | | | | | | | | | dTs; | |
| | | | | | | | | | lnaCs; dGs; | |
| | | | | | | | | | lnaGs; | |
| | | | | | | | | | dTs; lnaCs; | |
| | | | | | | | | | dT-Sup | |
| APOE- | 0.622794624 | 0.059946404 | APOE | in | RPTEC | 30 | qRTP | UCUGC | dTs; lnaCs; | APOE:2039L15 |
| 5 | | | | vitro | | | CR | CACUC | dTs; lnaGs; | |
| | | | | | | | | GGUCU | dCs; lnaCs; | |
| | | | | | | | | | dAs; lnaCs; | |
| | | | | | | | | | dTs; | |
| | | | | | | | | | lnaCs; dGs; | |
| | | | | | | | | | lnaGs; | |
| | | | | | | | | | dTs; lnaCs; | |
| | | | | | | | | | dT-Sup | |
| APOE- | 0.966404134 | NA | APOE | in | Hep3B | 20 | qRTP | UCUGC | dTs; lnaCs; | APOE:2039L15 |
| 5 | | | | vitro | | | CR | CACUC | dTs; lnaGs; | |
| | | | | | | | | GGUCU | dCs; lnaCs; | |
| | | | | | | | | | dAs; lnaCs; | |
| | | | | | | | | | dTs; | |
| | | | | | | | | | lnaCs; dGs; | |
| | | | | | | | | | lnaGs; | |
| | | | | | | | | | dTs; lnaCs; | |
| | | | | | | | | | dT-Sup | |
| APOE- | 0.735569461 | 0.0497464 | APOE | in | Hep3B | 50 | qRTP | UCUGC | dTs; lnaCs; | APOE:2039L15 |
| 5 | | | | vitro | | | CR | CACUC | dTs; lnaGs; | |
| | | | | | | | | GGUCU | dCs; lnaCs; | |
| | | | | | | | | | dAs; lnaCs; | |
| | | | | | | | | | dTs; | |
| | | | | | | | | | lnaCs; dGs; | |
| | | | | | | | | | lnaGs; | |
| | | | | | | | | | dTs; lnaCs; | |
| | | | | | | | | | dT-Sup | |
| APOE- | 0.809861562 | 0.073546889 | APOE | in | HepG2 | 20 | qRTP | UCUGC | dTs; lnaCs; | APOE:2039L15 |
| 5 | | | | vitro | | | CR | CACUC | dTs; lnaGs; | |
| | | | | | | | | GGUCU | dCs; lnaCs; | |
| | | | | | | | | | dAs; lnaCs; | |
| | | | | | | | | | dTs; | |
| | | | | | | | | | lnaCs; dGs; | |
| | | | | | | | | | lnaGs; | |
| | | | | | | | | | dTs; lnaCs; | |
| | | | | | | | | | dT-Sup | |
| APOE- | 1.755800936 | 0.220809034 | APOE | in | HepG2 | 50 | qRTP | UCUGC | dTs; lnaCs; | APOE:2039L15 |
| 5 | | | | vitro | | | CR | CACUC | dTs; lnaGs; | |
| | | | | | | | | GGUCU | dCs; lnaCs; | |
| | | | | | | | | | dAs; lnaCs; | |
| | | | | | | | | | dTs; | |
| | | | | | | | | | lnaCs; dGs; | |
| | | | | | | | | | lnaGs; | |
| | | | | | | | | | dTs; lnaCs; | |
| | | | | | | | | | dT-Sup | |
| APOE- | 0.430062358 | 0.028935995 | APOE | in | Hep3B | 20 | qRTP | CCAGC | dCs; lnaCs; | APOE:2053L15 |
| 6 | | | | vitro | | | CR | GCUGG | dAs; lnaGs; | |
| | | | | | | | | CCGCU | dCs; lnaGs; | |
| | | | | | | | | | dCs; lnaTs; | |
| | | | | | | | | | dGs; | |
| | | | | | | | | | lnaGs; dCs; | |
| | | | | | | | | | lnaCs; | |
| | | | | | | | | | dGs; lnaCs; | |
| | | | | | | | | | dT-Sup | |
| APOE- | 1.066566585 | 0.040669438 | APOE | in | Hep3B | 20 | qRTP | CCAGC | dCs; lnaCs; | APOE:2053L15 |
| 6 | | | | vitro | | | CR | GCUGG | dAs; lnaGs; | |
| | | | | | | | | CCGCU | dCs; lnaGs; | |
| | | | | | | | | | dCs; lnaTs; | |
| | | | | | | | | | dGs; | |
| | | | | | | | | | lnaGs; dCs; | |
| | | | | | | | | | lnaCs; | |
| | | | | | | | | | dGs; lnaCs; | |
| | | | | | | | | | dT-Sup | |
| APOE- | 0.627777175 | 0.027854683 | APOE | in | Hep3B | 50 | qRTP | CCAGC | dCs; lnaCs; | APOE:2053L15 |
| 6 | | | | vitro | | | CR | GCUGG | dAs; lnaGs; | |
| | | | | | | | | CCGCU | dCs; lnaGs; | |
| | | | | | | | | | dCs; lnaTs; | |
| | | | | | | | | | dGs; | |
| | | | | | | | | | lnaGs; dCs; | |
| | | | | | | | | | lnaCs; | |
| | | | | | | | | | dGs; lnaCs; | |
| | | | | | | | | | dT-Sup | |
| APOE- | 0.640782088 | 0.065935855 | APOE | in | RPTEC | 10 | qRTP | CCAGC | dCs; lnaCs; | APOE:2053L15 |
| 6 | | | | vitro | | | CR | GCUGG | dAs; lnaGs; | |
| | | | | | | | | CCGCU | dCs; lnaGs; | |
| | | | | | | | | | dCs; lnaTs; | |
| | | | | | | | | | dGs; | |
| | | | | | | | | | lnaGs; dCs; | |
| | | | | | | | | | lnaCs; | |
| | | | | | | | | | dGs; lnaCs; | |
| | | | | | | | | | dT-Sup | |
| APOE- | 0.617822393 | 0.082004667 | APOE | in | RPTEC | 30 | qRTP | CCAGC | dCs; lnaCs; | APOE:2053L15 |
| 6 | | | | vitro | | | CR | GCUGG | dAs; lnaGs; | |
| | | | | | | | | CCGCU | dCs; lnaGs; | |
| | | | | | | | | | dCs; lnaTs; | |
| | | | | | | | | | dGs; | |
| | | | | | | | | | lnaGs; dCs; | |
| | | | | | | | | | lnaCs; | |
| | | | | | | | | | dGs; lnaCs; | |
| | | | | | | | | | dT-Sup | |
| APOE- | 1.066566585 | 0.040330785 | APOE | in | Hep3B | 20 | qRTP | CCAGC | dCs; lnaCs; | APOE:2053L15 |
| 6 | | | | vitro | | | CR | GCUGG | dAs; lnaGs; | |
| | | | | | | | | CCGCU | dCs; lnaGs; | |
| | | | | | | | | | dCs; lnaTs; | |
| | | | | | | | | | dGs; | |
| | | | | | | | | | lnaGs; dCs; | |
| | | | | | | | | | lnaCs; | |
| | | | | | | | | | dGs; lnaCs; | |
| | | | | | | | | | dT-Sup | |
| APOE- | 0.627777175 | 0.027715153 | APOE | in | Hep3B | 50 | qRTP | CCAGC | dCs; lnaCs; | APOE:2053L15 |
| 6 | | | | vitro | | | CR | GCUGG | dAs; lnaGs; | |
| | | | | | | | | CCGCU | dCs; lnaGs; | |
| | | | | | | | | | dCs; lnaTs; | |
| | | | | | | | | | dGs; | |
| | | | | | | | | | lnaGs; dCs; | |
| | | | | | | | | | lnaCs; | |
| | | | | | | | | | dGs; lnaCs; | |
| | | | | | | | | | dT-Sup | |
| APOE- | 0.894131192 | 0.053239264 | APOE | in | HepG2 | 20 | qRTP | CCAGC | dCs; lnaCs; | APOE:2053L15 |
| 6 | | | | vitro | | | CR | GCUGG | dAs; lnaGs; | |
| | | | | | | | | CCGCU | dCs; lnaGs; | |
| | | | | | | | | | dCs; lnaTs; | |
| | | | | | | | | | dGs; | |
| | | | | | | | | | lnaGs; dCs; | |
| | | | | | | | | | lnaCs; | |
| | | | | | | | | | dGs; lnaCs; | |
| | | | | | | | | | dT-Sup | |
| APOE- | 1.787077249 | 0.059026202 | APOE | in | HepG2 | 50 | qRTP | CCAGC | dCs; lnaCs; | APOE:2053L15 |
| 6 | | | | vitro | | | CR | GCUGG | dAs; lnaGs; | |
| | | | | | | | | CCGCU | dCs; lnaGs; | |
| | | | | | | | | | dCs; lnaTs; | |
| | | | | | | | | | dGs; | |
| | | | | | | | | | lnaGs; dCs; | |
| | | | | | | | | | lnaCs; | |
| | | | | | | | | | dGs; lnaCs; | |
| | | | | | | | | | dT-Sup | |
| APOE- | 0.855558609 | 0.225930513 | APOE | in | Hep3B | 20 | qRTP | UCCACC | lnaTs; lnaCs; | APOE:1990L8 |
| 7 | | | | vitro | | | CR | UU | lnaCs; | |
| | | | | | | | | | lnaAs; lnaCs; | |
| | | | | | | | | | lnaCs; | |
| | | | | | | | | | lnaTs; lnaT- | |
| | | | | | | | | | Sup | |
| APOE- | 0.958463214 | 0.078782454 | APOE | in | Hep3B | 20 | qRTP | UCCACC | lnaTs; lnaCs; | APOE:1990L8 |
| 7 | | | | vitro | | | CR | UU | lnaCs; | |
| | | | | | | | | | lnaAs; lnaCs; | |
| | | | | | | | | | lnaCs; | |
| | | | | | | | | | lnaTs; lnaT- | |
| | | | | | | | | | Sup | |
| APOE- | 0.700462536 | 0.009957278 | APOE | in | Hep3B | 50 | qRTP | UCCACC | lnaTs; lnaCs; | APOE:1990L8 |
| 7 | | | | vitro | | | CR | UU | lnaCs; | |
| | | | | | | | | | lnaAs; lnaCs; | |
| | | | | | | | | | lnaCs; | |
| | | | | | | | | | lnaTs; lnaT- | |
| | | | | | | | | | Sup | |
| APOE- | 1.055485266 | 0.023779312 | APOE | in | RPTEC | 10 | qRTP | UCCACC | lnaTs; lnaCs; | APOE:1990L8 |
| 7 | | | | vitro | | | CR | UU | lnaCs; | |
| | | | | | | | | | lnaAs; lnaCs; | |
| | | | | | | | | | lnaCs; | |
| | | | | | | | | | lnaTs; lnaT- | |
| | | | | | | | | | Sup | |
| APOE- | 2.55895218 | | APOE | in | RPTEC | 30 | qRTP | UCCACC | lnaTs; lnaCs; | APOE:1990L8 |
| 7 | | | | vitro | | | CR | UU | lnaCs; | |
| | | | | | | | | | lnaAs; lnaCs; | |
| | | | | | | | | | lnaCs; | |
| | | | | | | | | | lnaTs; lnaT- | |
| | | | | | | | | | Sup | |
| APOE- | 0.958463214 | 0.078126437 | APOE | in | Hep3B | 20 | qRTP | UCCACC | lnaTs; lnaCs; | APOE:1990L8 |
| 7 | | | | vitro | | | CR | UU | lnaCs; | |
| | | | | | | | | | lnaAs; lnaCs; | |
| | | | | | | | | | lnaCs; | |
| | | | | | | | | | lnaTs; lnaT- | |
| | | | | | | | | | Sup | |
| APOE- | 0.700462536 | 0.0099074 | APOE | in | Hep3B | 50 | qRTP | UCCACC | lnaTs; lnaCs; | APOE:1990L8 |
| 7 | | | | vitro | | | CR | UU | lnaCs; | |
| | | | | | | | | | lnaAs; lnaCs; | |
| | | | | | | | | | lnaCs; | |
| | | | | | | | | | lnaTs; lnaT- | |
| | | | | | | | | | Sup | |
| APOE- | 1.040383106 | 0.090870561 | APOE | in | HepG2 | 20 | qRTP | UCCACC | lnaTs; lnaCs; | APOE:1990L8 |
| 7 | | | | vitro | | | CR | UU | lnaCs; | |
| | | | | | | | | | lnaAs; lnaCs; | |
| | | | | | | | | | lnaCs; | |
| | | | | | | | | | lnaTs; lnaT- | |
| | | | | | | | | | Sup | |
| APOE- | 2.408050476 | 0.177516416 | APOE | in | HepG2 | 50 | qRTP | UCCACC | lnaTs; lnaCs; | APOE:1990L8 |
| 7 | | | | vitro | | | CR | UU | lnaCs; | |
| | | | | | | | | | lnaAs; lnaCs; | |
| | | | | | | | | | lnaCs; | |
| | | | | | | | | | lnaTs; lnaT- | |
| | | | | | | | | | Sup | |
| APOE- | 1.08613742 | 0.199221531 | APOE | in | Hep3B | 20 | qRTP | CUCUG | lnaCs; lnaTs; | APOE:2009L8 |
| 8 | | | | vitro | | | CR | UCU | lnaCs; | |
| | | | | | | | | | lnaTs; lnaGs; | |
| | | | | | | | | | lnaTs; | |
| | | | | | | | | | lnaCs; lnaT- | |
| | | | | | | | | | Sup | |
| APOE- | 1.220258505 | 0.09564323 | APOE | in | Hep3B | 20 | qRTP | CUCUG | lnaCs; lnaTs; | APOE:2009L8 |
| 8 | | | | vitro | | | CR | UCU | lnaCs; | |
| | | | | | | | | | lnaTs; lnaGs; | |
| | | | | | | | | | lnaTs; | |
| | | | | | | | | | lnaCs; lnaT- | |
| | | | | | | | | | Sup | |
| APOE- | 0.609354309 | 0.008333761 | APOE | in | Hep3B | 50 | qRTP | CUCUG | lnaCs; lnaTs; | APOE:2009L8 |
| 8 | | | | vitro | | | CR | UCU | lnaCs; | |
| | | | | | | | | | lnaTs; lnaGs; | |
| | | | | | | | | | lnaTs; | |
| | | | | | | | | | lnaCs; lnaT- | |
| | | | | | | | | | Sup | |
| APOE- | 0.799129842 | 0.082491691 | APOE | in | RPTEC | 10 | qRTP | CUCUG | lnaCs; lnaTs; | APOE:2009L8 |
| 8 | | | | vitro | | | CR | UCU | lnaCs; | |
| | | | | | | | | | lnaTs; lnaGs; | |
| | | | | | | | | | lnaTs; | |
| | | | | | | | | | lnaCs; lnaT- | |
| | | | | | | | | | Sup | |
| APOE- | 0.59420968 | 0.076606161 | APOE | in | RPTEC | 30 | qRTP | CUCUG | lnaCs; lnaTs; | APOE:2009L8 |
| 8 | | | | vitro | | | CR | UCU | lnaCs; | |
| | | | | | | | | | lnaTs; lnaGs; | |
| | | | | | | | | | lnaTs; | |
| | | | | | | | | | lnaCs; lnaT- | |
| | | | | | | | | | Sup | |
| APOE- | 1.220258505 | 0.094846814 | APOE | in | Hep3B | 20 | qRTP | CUCUG | lnaCs; lnaTs; | APOE:2009L8 |
| 8 | | | | vitro | | | CR | UCU | lnaCs; | |
| | | | | | | | | | lnaTs; lnaGs; | |
| | | | | | | | | | lnaTs; | |
| | | | | | | | | | lnaCs; lnaT- | |
| | | | | | | | | | Sup | |
| APOE- | 0.609354309 | 0.008292015 | APOE | in | Hep3B | 50 | qRTP | CUCUG | lnaCs; lnaTs; | APOE:2009L8 |
| 8 | | | | vitro | | | CR | UCU | lnaCs; | |
| | | | | | | | | | lnaTs; lnaGs; | |
| | | | | | | | | | lnaTs; | |
| | | | | | | | | | lnaCs; lnaT- | |
| | | | | | | | | | Sup | |
| APOE- | 0.525689611 | 0.006236498 | APOE | in | HepG2 | 20 | qRTP | CUCUG | lnaCs; lnaTs; | APOE:2009L8 |
| 8 | | | | vitro | | | CR | UCU | lnaCs; | |
| | | | | | | | | | lnaTs; lnaGs; | |
| | | | | | | | | | lnaTs; | |
| | | | | | | | | | lnaCs; lnaT- | |
| | | | | | | | | | Sup | |
| APOE- | NA | NA | APOE | in | HepG2 | 50 | qRTP | CUCUG | lnaCs; lnaTs; | APOE:2009L8 |
| 8 | | | | vitro | | | CR | UCU | lnaCs; | |
| | | | | | | | | | lnaTs; lnaGs; | |
| | | | | | | | | | lnaTs; | |
| | | | | | | | | | lnaCs; lnaT- | |
| | | | | | | | | | Sup | |
| APOE- | 0.368030459 | NA | APOE | in | Hep3B | 20 | qRTP | CCGCU | dCs; lnaCs; | APOE:17L15 |
| 9 | | | | vitro | | | CR | GGGGC | dGs; lnaCs; | |
| | | | | | | | | UGAGU | dTs; lnaGs; | |
| | | | | | | | | | dGs; | |
| | | | | | | | | | lnaGs; dGs; | |
| | | | | | | | | | lnaCs; dTs; | |
| | | | | | | | | | lnaGs; | |
| | | | | | | | | | dAs; lnaGs; | |
| | | | | | | | | | dT-Sup | |
| APOE- | 0.710548178 | 0.016905004 | APOE | in | Hep3B | 20 | qRTP | CCGCU | dCs; lnaCs; | APOE:17L15 |
| 9 | | | | vitro | | | CR | GGGGC | dGs; lnaCs; | |
| | | | | | | | | UGAGU | dTs; lnaGs; | |
| | | | | | | | | | dGs; | |
| | | | | | | | | | lnaGs; dGs; | |
| | | | | | | | | | lnaCs; dTs; | |
| | | | | | | | | | lnaGs; | |
| | | | | | | | | | dAs; lnaGs; | |
| | | | | | | | | | dT-Sup | |
| APOE- | 0.595453906 | 0.013277217 | APOE | in | Hep3B | 50 | qRTP | CCGCU | dCs; lnaCs; | APOE:17L15 |
| 9 | | | | vitro | | | CR | GGGGC | dGs; lnaCs; | |
| | | | | | | | | UGAGU | dTs; lnaGs; | |
| | | | | | | | | | dGs; | |
| | | | | | | | | | lnaGs; dGs; | |
| | | | | | | | | | lnaCs; dTs; | |
| | | | | | | | | | lnaGs; | |
| | | | | | | | | | dAs; lnaGs; | |
| | | | | | | | | | dT-Sup | |
| APOE- | 0.761479907 | 0.108284732 | APOE | in | RPTEC | 10 | qRTP | CCGCU | dCs; lnaCs; | APOE:17L15 |
| 9 | | | | vitro | | | CR | GGGGC | dGs; lnaCs; | |
| | | | | | | | | UGAGU | dTs; lnaGs; | |
| | | | | | | | | | dGs; | |
| | | | | | | | | | lnaGs; dGs; | |
| | | | | | | | | | lnaCs; dTs; | |
| | | | | | | | | | lnaGs; | |
| | | | | | | | | | dAs; lnaGs; | |
| | | | | | | | | | dT-Sup | |
| APOE- | 0.724107157 | 0.092342758 | APOE | in | RPTEC | 30 | qRTP | CCGCU | dCs; lnaCs; | APOE:17L15 |
| 9 | | | | vitro | | | CR | GGGGC | dGs; lnaCs; | |
| | | | | | | | | UGAGU | dTs; lnaGs; | |
| | | | | | | | | | dGs; | |
| | | | | | | | | | lnaGs; dGs; | |
| | | | | | | | | | lnaCs; dTs; | |
| | | | | | | | | | lnaGs; | |
| | | | | | | | | | dAs; lnaGs; | |
| | | | | | | | | | dT-Sup | |
| APOE- | 0.710548178 | 0.016764237 | APOE | in | Hep3B | 20 | qRTP | CCGCU | dCs; lnaCs; | APOE:17L15 |
| 9 | | | | vitro | | | CR | GGGGC | dGs; lnaCs; | |
| | | | | | | | | UGAGU | dTs; lnaGs; | |
| | | | | | | | | | dGs; | |
| | | | | | | | | | lnaGs; dGs; | |
| | | | | | | | | | lnaCs; dTs; | |
| | | | | | | | | | lnaGs; | |
| | | | | | | | | | dAs; lnaGs; | |
| | | | | | | | | | dT-Sup | |
| APOE- | 0.595453906 | 0.013210709 | APOE | in | Hep3B | 50 | qRTP | CCGCU | dCs; lnaCs; | APOE:17L15 |
| 9 | | | | vitro | | | CR | GGGGC | dGs; lnaCs; | |
| | | | | | | | | UGAGU | dTs; lnaGs; | |
| | | | | | | | | | dGs; | |
| | | | | | | | | | lnaGs; dGs; | |
| | | | | | | | | | lnaCs; dTs; | |
| | | | | | | | | | lnaGs; | |
| | | | | | | | | | dAs; lnaGs; | |
| | | | | | | | | | dT-Sup | |
| APOE- | 0.616390073 | 0.015426426 | APOE | in | HepG2 | 20 | qRTP | CCGCU | dCs; lnaCs; | APOE:17L15 |
| 9 | | | | vitro | | | CR | GGGGC | dGs; lnaCs; | |
| | | | | | | | | UGAGU | dTs; lnaGs; | |
| | | | | | | | | | dGs; | |
| | | | | | | | | | lnaGs; dGs; | |
| | | | | | | | | | lnaCs; dTs; | |
| | | | | | | | | | lnaGs; | |
| | | | | | | | | | dAs; lnaGs; | |
| | | | | | | | | | dT-Sup | |
| APOE- | 1.507762626 | 0.05147385 | APOE | in | HepG2 | 50 | qRTP | CCGCU | dCs; lnaCs; | APOE:17L15 |
| 9 | | | | vitro | | | CR | GGGGC | dGs; lnaCs; | |
| | | | | | | | | UGAGU | dTs; lnaGs; | |
| | | | | | | | | | dGs; | |
| | | | | | | | | | lnaGs; dGs; | |
| | | | | | | | | | lnaCs; dTs; | |
| | | | | | | | | | lnaGs; | |
| | | | | | | | | | dAs; lnaGs; | |
| | | | | | | | | | dT-Sup | |
| APOE- | 0.799871949 | 0.012064195 | APOE | in | Hep3B | 20 | qRTP | GGACG | dGs; lnaGs; | APOE:32L15 |
| 10 | | | | vitro | | | CR | UCCUU | dAs; lnaCs; | |
| | | | | | | | | CACCU | dGs; lnaTs; | |
| | | | | | | | | | dCs; lnaCs; | |
| | | | | | | | | | dTs; | |
| | | | | | | | | | lnaTs; dCs; | |
| | | | | | | | | | lnaAs; dCs; | |
| | | | | | | | | | lnaCs; | |
| | | | | | | | | | dT-Sup | |
| APOE- | 1.080698826 | NA | APOE | in | Hep3B | 20 | qRTP | GGACG | dGs; lnaGs; | APOE:32L15 |
| 10 | | | | vitro | | | CR | UCCUU | dAs; lnaCs; | |
| | | | | | | | | CACCU | dGs; lnaTs; | |
| | | | | | | | | | dCs; lnaCs; | |
| | | | | | | | | | dTs; | |
| | | | | | | | | | lnaTs; dCs; | |
| | | | | | | | | | lnaAs; dCs; | |
| | | | | | | | | | lnaCs; | |
| | | | | | | | | | dT-Sup | |
| APOE- | 0.741557764 | 0.079444651 | APOE | in | Hep3B | 50 | qRTP | GGACG | dGs; lnaGs; | APOE:32L15 |
| 10 | | | | vitro | | | CR | UCCUU | dAs; lnaCs; | |
| | | | | | | | | CACCU | dGs; lnaTs; | |
| | | | | | | | | | dCs; lnaCs; | |
| | | | | | | | | | dTs; | |
| | | | | | | | | | lnaTs; dCs; | |
| | | | | | | | | | lnaAs; dCs; | |
| | | | | | | | | | lnaCs; | |
| | | | | | | | | | dT-Sup | |
| APOE- | 1.037907537 | 0.108340441 | APOE | in | RPTEC | 10 | qRTP | GGACG | dGs; lnaGs; | APOE:32L15 |
| 10 | | | | vitro | | | CR | UCCUU | dAs; lnaCs; | |
| | | | | | | | | CACCU | dGs; lnaTs; | |
| | | | | | | | | | dCs; lnaCs; | |
| | | | | | | | | | dTs; | |
| | | | | | | | | | lnaTs; dCs; | |
| | | | | | | | | | lnaAs; dCs; | |
| | | | | | | | | | lnaCs; | |
| | | | | | | | | | dT-Sup | |
| APOE- | 0.684172546 | 0.116325323 | APOE | in | RPTEC | 30 | qRTP | GGACG | dGs; lnaGs; | APOE:32L15 |
| 10 | | | | vitro | | | CR | UCCUU | dAs; lnaCs; | |
| | | | | | | | | CACCU | dGs; lnaTs; | |
| | | | | | | | | | dCs; lnaCs; | |
| | | | | | | | | | dTs; | |
| | | | | | | | | | lnaTs; dCs; | |
| | | | | | | | | | lnaAs; dCs; | |
| | | | | | | | | | lnaCs; | |
| | | | | | | | | | dT-Sup | |
| APOE- | 1.080698826 | NA | APOE | in | Hep3B | 20 | qRTP | GGACG | dGs; lnaGs; | APOE:32L15 |
| 10 | | | | vitro | | | CR | UCCUU | dAs; lnaCs; | |
| | | | | | | | | CACCU | dGs; lnaTs; | |
| | | | | | | | | | dCs; lnaCs; | |
| | | | | | | | | | dTs; | |
| | | | | | | | | | lnaTs; dCs; | |
| | | | | | | | | | lnaAs; dCs; | |
| | | | | | | | | | lnaCs; | |
| | | | | | | | | | dT-Sup | |
| APOE- | 0.741557764 | 0.079046697 | APOE | in | Hep3B | 50 | qRTP | GGACG | dGs; lnaGs; | APOE:32L15 |
| 10 | | | | vitro | | | CR | UCCUU | dAs; lnaCs; | |
| | | | | | | | | CACCU | dGs; lnaTs; | |
| | | | | | | | | | dCs; lnaCs; | |
| | | | | | | | | | dTs; | |
| | | | | | | | | | lnaTs; dCs; | |
| | | | | | | | | | lnaAs; dCs; | |
| | | | | | | | | | lnaCs; | |
| | | | | | | | | | dT-Sup | |
| APOE- | 0.958920462 | 0.0263857 | APOE | in | HepG2 | 20 | qRTP | GGACG | dGs; lnaGs; | APOE:32L15 |
| 10 | | | | vitro | | | CR | UCCUU | dAs; lnaCs; | |
| | | | | | | | | CACCU | dGs; lnaTs; | |
| | | | | | | | | | dCs; lnaCs; | |
| | | | | | | | | | dTs; | |
| | | | | | | | | | lnaTs; dCs; | |
| | | | | | | | | | lnaAs; dCs; | |
| | | | | | | | | | lnaCs; | |
| | | | | | | | | | dT-Sup | |
| APOE- | 2.706288849 | 0.140097272 | APOE | in | HepG2 | 50 | qRTP | GGACG | dGs; lnaGs; | APOE:32L15 |
| 10 | | | | vitro | | | CR | UCCUU | dAs; lnaCs; | |
| | | | | | | | | CACCU | dGs; lnaTs; | |
| | | | | | | | | | dCs; lnaCs; | |
| | | | | | | | | | dTs; | |
| | | | | | | | | | lnaTs; dCs; | |
| | | | | | | | | | lnaAs; dCs; | |
| | | | | | | | | | lnaCs; | |
| | | | | | | | | | dT-Sup | |
| APOE- | 0.588131985 | 0.669316106 | APOE | in | Hep3B | 20 | qRTP | GGCUG | lnaGs; lnaGs; | APOE:17L8 |
| 11 | | | | vitro | | | CR | AGU | lnaCs; | |
| | | | | | | | | | lnaTs; lnaGs; | |
| | | | | | | | | | lnaAs; | |
| | | | | | | | | | lnaGs; lnaT- | |
| | | | | | | | | | Sup | |
| APOE- | 1.27621172 | 0.050449208 | APOE | in | Hep3B | 20 | qRTP | GGCUG | lnaGs; lnaGs; | APOE:17L8 |
| 11 | | | | vitro | | | CR | AGU | lnaCs; | |
| | | | | | | | | | lnaTs; lnaGs; | |
| | | | | | | | | | lnaAs; | |
| | | | | | | | | | lnaGs; lnaT- | |
| | | | | | | | | | Sup | |
| APOE- | 0.839568601 | 0.130404444 | APOE | in | Hep3B | 50 | qRTP | GGCUG | lnaGs; lnaGs; | APOE:17L8 |
| 11 | | | | vitro | | | CR | AGU | lnaCs; | |
| | | | | | | | | | lnaTs; lnaGs; | |
| | | | | | | | | | lnaAs; | |
| | | | | | | | | | lnaGs; lnaT- | |
| | | | | | | | | | Sup | |
| APOE- | 0.92802708 | 0.07174081 | APOE | in | RPTEC | 10 | qRTP | GGCUG | lnaGs; lnaGs; | APOE:17L8 |
| 11 | | | | vitro | | | CR | AGU | lnaCs; | |
| | | | | | | | | | lnaTs; lnaGs; | |
| | | | | | | | | | lnaAs; | |
| | | | | | | | | | lnaGs; lnaT- | |
| | | | | | | | | | Sup | |
| APOE- | 0.661476384 | 0.086694178 | APOE | in | RPTEC | 30 | qRTP | GGCUG | lnaGs; lnaGs; | APOE:17L8 |
| 11 | | | | vitro | | | CR | AGU | lnaCs; | |
| | | | | | | | | | lnaTs; lnaGs; | |
| | | | | | | | | | lnaAs; | |
| | | | | | | | | | lnaGs; lnaT- | |
| | | | | | | | | | Sup | |
| APOE- | 1.27621172 | 0.05002912 | APOE | in | Hep3B | 20 | qRTP | GGCUG | lnaGs; lnaGs; | APOE:17L8 |
| 11 | | | | vitro | | | CR | AGU | lnaCs; | |
| | | | | | | | | | lnaTs; lnaGs; | |
| | | | | | | | | | lnaAs; | |
| | | | | | | | | | lnaGs; lnaT- | |
| | | | | | | | | | Sup | |
| APOE- | 0.839568601 | 0.129751222 | APOE | in | Hep3B | 50 | qRTP | GGCUG | lnaGs; lnaGs; | APOE:17L8 |
| 11 | | | | vitro | | | CR | AGU | lnaCs; | |
| | | | | | | | | | lnaTs; lnaGs; | |
| | | | | | | | | | lnaAs; | |
| | | | | | | | | | lnaGs; lnaT- | |
| | | | | | | | | | Sup | |
| APOE- | 0.987507539 | 0.041413772 | APOE | in | HepG2 | 20 | qRTP | GGCUG | lnaGs; lnaGs; | APOE:17L8 |
| 11 | | | | vitro | | | CR | AGU | lnaCs; | |
| | | | | | | | | | lnaTs; lnaGs; | |
| | | | | | | | | | lnaAs; | |
| | | | | | | | | | lnaGs; lnaT- | |
| | | | | | | | | | Sup | |
| APOE- | 2.215508476 | 0.159473774 | APOE | in | HepG2 | 50 | qRTP | GGCUG | lnaGs; lnaGs; | APOE:17L8 |
| 11 | | | | vitro | | | CR | AGU | lnaCs; | |
| | | | | | | | | | lnaTs; lnaGs; | |
| | | | | | | | | | lnaAs; | |
| | | | | | | | | | lnaGs; lnaT- | |
| | | | | | | | | | Sup | |
| APOE- | 1.039988392 | 0.658038927 | APOE | in | Hep3B | 20 | qRTP | GGGAA | lnaGs; lnaGs; | APOE:810L8 |
| 12 | | | | vitro | | | CR | GGA | lnaGs; | |
| | | | | | | | | | lnaAs; lnaAs; | |
| | | | | | | | | | lnaGs; | |
| | | | | | | | | | lnaGs; lnaA- | |
| | | | | | | | | | Sup | |
| APOE- | 1.075689977 | 0.016227514 | APOE | in | Hep3B | 20 | qRTP | GGGAA | lnaGs; lnaGs; | APOE:810L8 |
| 12 | | | | vitro | | | CR | GGA | lnaGs; | |
| | | | | | | | | | lnaAs; lnaAs; | |
| | | | | | | | | | lnaGs; | |
| | | | | | | | | | lnaGs; lnaA- | |
| | | | | | | | | | Sup | |
| APOE- | 1.008848065 | 0.058776995 | APOE | in | Hep3B | 50 | qRTP | GGGAA | lnaGs; lnaGs; | APOE:810L8 |
| 12 | | | | vitro | | | CR | GGA | lnaGs; | |
| | | | | | | | | | lnaAs; lnaAs; | |
| | | | | | | | | | lnaGs; | |
| | | | | | | | | | lnaGs; lnaA- | |
| | | | | | | | | | Sup | |
| APOE- | 0.891288828 | 0.15202812 | APOE | in | RPTEC | 10 | qRTP | GGGAA | lnaGs; lnaGs; | APOE:810L8 |
| 12 | | | | vitro | | | CR | GGA | lnaGs; | |
| | | | | | | | | | lnaAs; lnaAs; | |
| | | | | | | | | | lnaGs; | |
| | | | | | | | | | lnaGs; lnaA- | |
| | | | | | | | | | Sup | |
| APOE- | 0.674119337 | 0.021658893 | APOE | in | RPTEC | 30 | qRTP | GGGAA | lnaGs; lnaGs; | APOE:810L8 |
| 12 | | | | vitro | | | CR | GGA | lnaGs; | |
| | | | | | | | | | lnaAs; lnaAs; | |
| | | | | | | | | | lnaGs; | |
| | | | | | | | | | lnaGs; lnaA- | |
| | | | | | | | | | Sup | |
| APOE- | 1.075689977 | 0.016092388 | APOE | in | Hep3B | 20 | qRTP | GGGAA | lnaGs; lnaGs; | APOE:810L8 |
| 12 | | | | vitro | | | CR | GGA | lnaGs; | |
| | | | | | | | | | lnaAs; lnaAs; | |
| | | | | | | | | | lnaGs; | |
| | | | | | | | | | lnaGs; lnaA- | |
| | | | | | | | | | Sup | |
| APOE- | 1.008848065 | 0.058482569 | APOE | in | Hep3B | 50 | qRTP | GGGAA | lnaGs; lnaGs; | APOE:810L8 |
| 12 | | | | vitro | | | CR | GGA | lnaGs; | |
| | | | | | | | | | lnaAs; lnaAs; | |
| | | | | | | | | | lnaGs; | |
| | | | | | | | | | lnaGs; lnaA- | |
| | | | | | | | | | Sup | |
| APOE- | 1.131119601 | 0.099256531 | APOE | in | HepG2 | 20 | qRTP | GGGAA | lnaGs; lnaGs; | APOE:810L8 |
| 12 | | | | vitro | | | CR | GGA | lnaGs; | |
| | | | | | | | | | lnaAs; lnaAs; | |
| | | | | | | | | | lnaGs; | |
| | | | | | | | | | lnaGs; lnaA- | |
| | | | | | | | | | Sup | |
| APOE- | 2.729359414 | 0.259116308 | APOE | in | HepG2 | 50 | qRTP | GGGAA | lnaGs; lnaGs; | APOE:810L8 |
| 12 | | | | vitro | | | CR | GGA | lnaGs; | |
| | | | | | | | | | lnaAs; lnaAs; | |
| | | | | | | | | | lnaGs; | |
| | | | | | | | | | lnaGs; lnaA- | |
| | | | | | | | | | Sup | |
| APOE- | 0.545943898 | 0.316482567 | APOE | in | Hep3B | 20 | qRTP | GCACAC | dGs; lnaCs; | APOE:2891L15 |
| 13 | | | | vitro | | | CR | GUCCU | dAs; lnaCs; | |
| | | | | | | | | CCAU | dAs; lnaCs; | |
| | | | | | | | | | dGs; lnaTs; | |
| | | | | | | | | | dCs; | |
| | | | | | | | | | lnaCs; dTs; | |
| | | | | | | | | | lnaCs; dCs; | |
| | | | | | | | | | lnaAs; | |
| | | | | | | | | | dT-Sup | |
| APOE- | 1.059620108 | 0.056469866 | APOE | in | Hep3B | 20 | qRTP | GCACAC | dGs; lnaCs; | APOE:2891L15 |
| 13 | | | | vitro | | | CR | GUCCU | dAs; lnaCs; | |
| | | | | | | | | CCAU | dAs; lnaCs; | |
| | | | | | | | | | dGs; lnaTs; | |
| | | | | | | | | | dCs; | |
| | | | | | | | | | lnaCs; dTs; | |
| | | | | | | | | | lnaCs; dCs; | |
| | | | | | | | | | lnaAs; | |
| | | | | | | | | | dT-Sup | |
| APOE- | 0.84031578 | NA | APOE | in | Hep3B | 50 | qRTP | GCACAC | dGs; lnaCs; | APOE:2891L15 |
| 13 | | | | vitro | | | CR | GUCCU | dAs; lnaCs; | |
| | | | | | | | | CCAU | dAs; lnaCs; | |
| | | | | | | | | | dGs; lnaTs; | |
| | | | | | | | | | dCs; | |
| | | | | | | | | | lnaCs; dTs; | |
| | | | | | | | | | lnaCs; dCs; | |
| | | | | | | | | | lnaAs; | |
| | | | | | | | | | dT-Sup | |
| APOE- | 1.967825344 | 0.275274688 | APOE | in | RPTEC | 10 | qRTP | GCACAC | dGs; lnaCs; | APOE:2891L15 |
| 13 | | | | vitro | | | CR | GUCCU | dAs; lnaCs; | |
| | | | | | | | | CCAU | dAs; lnaCs; | |
| | | | | | | | | | dGs; lnaTs; | |
| | | | | | | | | | dCs; | |
| | | | | | | | | | lnaCs; dTs; | |
| | | | | | | | | | lnaCs; dCs; | |
| | | | | | | | | | lnaAs; | |
| | | | | | | | | | dT-Sup | |
| APOE- | 1.618774184 | 0.225216789 | APOE | in | RPTEC | 30 | qRTP | GCACAC | dGs; lnaCs; | APOE:2891L15 |
| 13 | | | | vitro | | | CR | GUCCU | dAs; lnaCs; | |
| | | | | | | | | CCAU | dAs; lnaCs; | |
| | | | | | | | | | dGs; lnaTs; | |
| | | | | | | | | | dCs; | |
| | | | | | | | | | lnaCs; dTs; | |
| | | | | | | | | | lnaCs; dCs; | |
| | | | | | | | | | lnaAs; | |
| | | | | | | | | | dT-Sup | |
| APOE- | 1.059620108 | 0.055999644 | APOE | in | Hep3B | 20 | qRTP | GCACAC | dGs; lnaCs; | APOE:2891L15 |
| 13 | | | | vitro | | | CR | GUCCU | dAs; lnaCs; | |
| | | | | | | | | CCAU | dAs; lnaCs; | |
| | | | | | | | | | dGs; lnaTs; | |
| | | | | | | | | | dCs; | |
| | | | | | | | | | lnaCs; dTs; | |
| | | | | | | | | | lnaCs; dCs; | |
| | | | | | | | | | lnaAs; | |
| | | | | | | | | | dT-Sup | |
| APOE- | 0.84031578 | NA | APOE | in | Hep3B | 50 | qRTP | GCACAC | dGs; lnaCs; | APOE:2891L15 |
| 13 | | | | vitro | | | CR | GUCCU | dAs; lnaCs; | |
| | | | | | | | | CCAU | dAs; lnaCs; | |
| | | | | | | | | | dGs; lnaTs; | |
| | | | | | | | | | dCs; | |
| | | | | | | | | | lnaCs; dTs; | |
| | | | | | | | | | lnaCs; dCs; | |
| | | | | | | | | | lnaAs; | |
| | | | | | | | | | dT-Sup | |
| APOE- | 0.840885931 | 0.008657885 | APOE | in | HepG2 | 20 | qRTP | GCACAC | dGs; lnaCs; | APOE:2891L15 |
| 13 | | | | vitro | | | CR | GUCCU | dAs; lnaCs; | |
| | | | | | | | | CCAU | dAs; lnaCs; | |
| | | | | | | | | | dGs; lnaTs; | |
| | | | | | | | | | dCs; | |
| | | | | | | | | | lnaCs; dTs; | |
| | | | | | | | | | lnaCs; dCs; | |
| | | | | | | | | | lnaAs; | |
| | | | | | | | | | dT-Sup | |
| APOE- | 2.138430071 | 0.079189368 | APOE | in | HepG2 | 50 | qRTP | GCACAC | dGs; lnaCs; | APOE:2891L15 |
| 13 | | | | vitro | | | CR | GUCCU | dAs; lnaCs; | |
| | | | | | | | | CCAU | dAs; lnaCs; | |
| | | | | | | | | | dGs; lnaTs; | |
| | | | | | | | | | dCs; | |
| | | | | | | | | | lnaCs; dTs; | |
| | | | | | | | | | lnaCs; dCs; | |
| | | | | | | | | | lnaAs; | |
| | | | | | | | | | dT-Sup | |
| APOE- | 0.534881522 | 0.199000097 | APOE | in | Hep3B | 20 | qRTP | GCAUG | dGs; lnaCs; | APOE:2931L15 |
| 14 | | | | vitro | | | CR | GCCUG | dAs; lnaTs; | |
| | | | | | | | | CACCU | dGs; lnaGs; | |
| | | | | | | | | | dCs; lnaCs; | |
| | | | | | | | | | dTs; | |
| | | | | | | | | | lnaGs; dCs; | |
| | | | | | | | | | lnaAs; | |
| | | | | | | | | | dCs; lnaCs; | |
| | | | | | | | | | dT-Sup | |
| APOE- | 0.84169135 | 0.080339227 | APOE | in | Hep3B | 20 | qRTP | GCAUG | dGs; lnaCs; | APOE:2931L15 |
| 14 | | | | vitro | | | CR | GCCUG | dAs; lnaTs; | |
| | | | | | | | | CACCU | dGs; lnaGs; | |
| | | | | | | | | | dCs; lnaCs; | |
| | | | | | | | | | dTs; | |
| | | | | | | | | | lnaGs; dCs; | |
| | | | | | | | | | lnaAs; | |
| | | | | | | | | | dCs; lnaCs; | |
| | | | | | | | | | dT-Sup | |
| APOE- | 1.150125208 | 0.039338411 | APOE | in | Hep3B | 50 | qRTP | GCAUG | dGs; lnaCs; | APOE:2931L15 |
| 14 | | | | vitro | | | CR | GCCUG | dAs; lnaTs; | |
| | | | | | | | | CACCU | dGs; lnaGs; | |
| | | | | | | | | | dCs; lnaCs; | |
| | | | | | | | | | dTs; | |
| | | | | | | | | | lnaGs; dCs; | |
| | | | | | | | | | lnaAs; | |
| | | | | | | | | | dCs; lnaCs; | |
| | | | | | | | | | dT-Sup | |
| APOE- | 0.988989351 | 0.051506359 | APOE | in | RPTEC | 10 | qRTP | GCAUG | dGs; lnaCs; | APOE:2931L15 |
| 14 | | | | vitro | | | CR | GCCUG | dAs; lnaTs; | |
| | | | | | | | | CACCU | dGs; lnaGs; | |
| | | | | | | | | | dCs; lnaCs; | |
| | | | | | | | | | dTs; | |
| | | | | | | | | | lnaGs; dCs; | |
| | | | | | | | | | lnaAs; | |
| | | | | | | | | | dCs; lnaCs; | |
| | | | | | | | | | dT-Sup | |
| APOE- | 1.201529374 | 0.511616102 | APOE | in | RPTEC | 30 | qRTP | GCAUG | dGs; lnaCs; | APOE:2931L15 |
| 14 | | | | vitro | | | CR | GCCUG | dAs; lnaTs; | |
| | | | | | | | | CACCU | dGs; lnaGs; | |
| | | | | | | | | | dCs; lnaCs; | |
| | | | | | | | | | dTs; | |
| | | | | | | | | | lnaGs; dCs; | |
| | | | | | | | | | lnaAs; | |
| | | | | | | | | | dCs; lnaCs; | |
| | | | | | | | | | dT-Sup | |
| APOE- | 0.84169135 | 0.079670246 | APOE | in | Hep3B | 20 | qRTP | GCAUG | dGs; lnaCs; | APOE:2931L15 |
| 14 | | | | vitro | | | CR | GCCUG | dAs; lnaTs; | |
| | | | | | | | | CACCU | dGs; lnaGs; | |
| | | | | | | | | | dCs; lnaCs; | |
| | | | | | | | | | dTs; | |
| | | | | | | | | | lnaGs; dCs; | |
| | | | | | | | | | lnaAs; | |
| | | | | | | | | | dCs; lnaCs; | |
| | | | | | | | | | dT-Sup | |
| APOE- | 1.150125208 | 0.039141358 | APOE | in | Hep3B | 50 | qRTP | GCAUG | dGs; lnaCs; | APOE:2931L15 |
| 14 | | | | vitro | | | CR | GCCUG | dAs; lnaTs; | |
| | | | | | | | | CACCU | dGs; lnaGs; | |
| | | | | | | | | | dCs; lnaCs; | |
| | | | | | | | | | dTs; | |
| | | | | | | | | | lnaGs; dCs; | |
| | | | | | | | | | lnaAs; | |
| | | | | | | | | | dCs; lnaCs; | |
| | | | | | | | | | dT-Sup | |
| APOE- | 0.967865253 | 0.046404454 | APOE | in | HepG2 | 20 | qRTP | GCAUG | dGs; lnaCs; | APOE:2931L15 |
| 14 | | | | vitro | | | CR | GCCUG | dAs; lnaTs; | |
| | | | | | | | | CACCU | dGs; lnaGs; | |
| | | | | | | | | | dCs; lnaCs; | |
| | | | | | | | | | dTs; | |
| | | | | | | | | | lnaGs; dCs; | |
| | | | | | | | | | lnaAs; | |
| | | | | | | | | | dCs; lnaCs; | |
| | | | | | | | | | dT-Sup | |
| APOE- | 2.462419652 | 0.064120076 | APOE | in | HepG2 | 50 | qRTP | GCAUG | dGs; lnaCs; | APOE:2931L15 |
| 14 | | | | vitro | | | CR | GCCUG | dAs; lnaTs; | |
| | | | | | | | | CACCU | dGs; lnaGs; | |
| | | | | | | | | | dCs; lnaCs; | |
| | | | | | | | | | dTs; | |
| | | | | | | | | | lnaGs; dCs; | |
| | | | | | | | | | lnaAs; | |
| | | | | | | | | | dCs; lnaCs; | |
| | | | | | | | | | dT-Sup | |
| APOE- | 0.886287674 | 0.485227705 | APOE | in | Hep3B | 20 | qRTP | CCGCU | dCs; lnaCs; | APOE:2996L15 |
| 15 | | | | vitro | | | CR | UACGC | dGs; lnaCs; | |
| | | | | | | | | AGCUU | dTs; lnaTs; | |
| | | | | | | | | | dAs; lnaCs; | |
| | | | | | | | | | dGs; | |
| | | | | | | | | | lnaCs; dAs; | |
| | | | | | | | | | lnaGs; | |
| | | | | | | | | | dCs; lnaTs; | |
| | | | | | | | | | dT-Sup | |
| APOE- | 0.925998022 | 0.097552457 | APOE | in | Hep3B | 20 | qRTP | CCGCU | dCs; lnaCs; | APOE:2996L15 |
| 15 | | | | vitro | | | CR | UACGC | dGs; lnaCs; | |
| | | | | | | | | AGCUU | dTs; lnaTs; | |
| | | | | | | | | | dAs; lnaCs; | |
| | | | | | | | | | dGs; | |
| | | | | | | | | | lnaCs; dAs; | |
| | | | | | | | | | lnaGs; | |
| | | | | | | | | | dCs; lnaTs; | |
| | | | | | | | | | dT-Sup | |
| APOE- | 0.786793888 | 0.171244036 | APOE | in | Hep3B | 50 | qRTP | CCGCU | dCs; lnaCs; | APOE:2996L15 |
| 15 | | | | vitro | | | CR | UACGC | dGs; lnaCs; | |
| | | | | | | | | AGCUU | dTs; lnaTs; | |
| | | | | | | | | | dAs; lnaCs; | |
| | | | | | | | | | dGs; | |
| | | | | | | | | | lnaCs; dAs; | |
| | | | | | | | | | lnaGs; | |
| | | | | | | | | | dCs; lnaTs; | |
| | | | | | | | | | dT-Sup | |
| APOE- | 1.032697477 | 0.023428783 | APOE | in | RPTEC | 10 | qRTP | CCGCU | dCs; lnaCs; | APOE:2996L15 |
| 15 | | | | vitro | | | CR | UACGC | dGs; lnaCs; | |
| | | | | | | | | AGCUU | dTs; lnaTs; | |
| | | | | | | | | | dAs; lnaCs; | |
| | | | | | | | | | dGs; | |
| | | | | | | | | | lnaCs; dAs; | |
| | | | | | | | | | lnaGs; | |
| | | | | | | | | | dCs; lnaTs; | |
| | | | | | | | | | dT-Sup | |
| APOE- | 3.096697685 | | APOE | in | RPTEC | 30 | qRTP | CCGCU | dCs; lnaCs; | APOE:2996L15 |
| 15 | | | | vitro | | | CR | UACGC | dGs; lnaCs; | |
| | | | | | | | | AGCUU | dTs; lnaTs; | |
| | | | | | | | | | dAs; lnaCs; | |
| | | | | | | | | | dGs; | |
| | | | | | | | | | lnaCs; dAs; | |
| | | | | | | | | | lnaGs; | |
| | | | | | | | | | dCs; lnaTs; | |
| | | | | | | | | | dT-Sup | |
| APOE- | 0.925998022 | 0.096740143 | APOE | in | Hep3B | 20 | qRTP | CCGCU | dCs; lnaCs; | APOE:2996L15 |
| 15 | | | | vitro | | | CR | UACGC | dGs; lnaCs; | |
| | | | | | | | | AGCUU | dTs; lnaTs; | |
| | | | | | | | | | dAs; lnaCs; | |
| | | | | | | | | | dGs; | |
| | | | | | | | | | lnaCs; dAs; | |
| | | | | | | | | | lnaGs; | |
| | | | | | | | | | dCs; lnaTs; | |
| | | | | | | | | | dT-Sup | |
| APOE- | 0.786793888 | 0.170386241 | APOE | in | Hep3B | 50 | qRTP | CCGCU | dCs; lnaCs; | APOE:2996L15 |
| 15 | | | | vitro | | | CR | UACGC | dGs; lnaCs; | |
| | | | | | | | | AGCUU | dTs; lnaTs; | |
| | | | | | | | | | dAs; lnaCs; | |
| | | | | | | | | | dGs; | |
| | | | | | | | | | lnaCs; dAs; | |
| | | | | | | | | | lnaGs; | |
| | | | | | | | | | dCs; lnaTs; | |
| | | | | | | | | | dT-Sup | |
| APOE- | 1.090933908 | 0.199559146 | APOE | in | HepG2 | 20 | qRTP | CCGCU | dCs; lnaCs; | APOE:2996L15 |
| 15 | | | | vitro | | | CR | UACGC | dGs; lnaCs; | |
| | | | | | | | | AGCUU | dTs; lnaTs; | |
| | | | | | | | | | dAs; lnaCs; | |
| | | | | | | | | | dGs; | |
| | | | | | | | | | lnaCs; dAs; | |
| | | | | | | | | | lnaGs; | |
| | | | | | | | | | dCs; lnaTs; | |
| | | | | | | | | | dT-Sup | |
| APOE- | 2.435345921 | 0.184559674 | APOE | in | HepG2 | 50 | qRTP | CCGCU | dCs; lnaCs; | APOE:2996L15 |
| 15 | | | | vitro | | | CR | UACGC | dGs; lnaCs; | |
| | | | | | | | | AGCUU | dTs; lnaTs; | |
| | | | | | | | | | dAs; lnaCs; | |
| | | | | | | | | | dGs; | |
| | | | | | | | | | lnaCs; dAs; | |
| | | | | | | | | | lnaGs; | |
| | | | | | | | | | dCs; lnaTs; | |
| | | | | | | | | | dT-Sup | |
| APOE- | 1.231747105 | NA | APOE | in | Hep3B | 20 | qRTP | CGCUC | dCs; lnaGs; | APOE:3070L15 |
| 16 | | | | vitro | | | CR | GGCGC | dCs; lnaTs; | |
| | | | | | | | | CCUCG | dCs; lnaGs; | |
| | | | | | | | | | dGs; | |
| | | | | | | | | | lnaCs; dGs; | |
| | | | | | | | | | lnaCs; dCs; | |
| | | | | | | | | | lnaCs; | |
| | | | | | | | | | dTs; lnaCs; | |
| | | | | | | | | | dG-Sup | |
| APOE- | 1.092773967 | 0.035146389 | APOE | in | Hep3B | 20 | qRTP | CGCUC | dCs; lnaGs; | APOE:3070L15 |
| 16 | | | | vitro | | | CR | GGCGC | dCs; lnaTs; | |
| | | | | | | | | CCUCG | dCs; lnaGs; | |
| | | | | | | | | | dGs; | |
| | | | | | | | | | lnaCs; dGs; | |
| | | | | | | | | | lnaCs; dCs; | |
| | | | | | | | | | lnaCs; | |
| | | | | | | | | | dTs; lnaCs; | |
| | | | | | | | | | dG-Sup | |
| APOE- | 0.672991352 | 0.06097305 | APOE | in | Hep3B | 50 | qRTP | CGCUC | dCs; lnaGs; | APOE:3070L15 |
| 16 | | | | vitro | | | CR | GGCGC | dCs; lnaTs; | |
| | | | | | | | | CCUCG | dCs; lnaGs; | |
| | | | | | | | | | dGs; | |
| | | | | | | | | | lnaCs; dGs; | |
| | | | | | | | | | lnaCs; dCs; | |
| | | | | | | | | | lnaCs; | |
| | | | | | | | | | dTs; lnaCs; | |
| | | | | | | | | | dG-Sup | |
| APOE- | 1.580690773 | 0.216264502 | APOE | in | RPTEC | 10 | qRTP | CGCUC | dCs; lnaGs; | APOE:3070L15 |
| 16 | | | | vitro | | | CR | GGCGC | dCs; lnaTs; | |
| | | | | | | | | CCUCG | dCs; lnaGs; | |
| | | | | | | | | | dGs; | |
| | | | | | | | | | lnaCs; dGs; | |
| | | | | | | | | | lnaCs; dCs; | |
| | | | | | | | | | lnaCs; | |
| | | | | | | | | | dTs; lnaCs; | |
| | | | | | | | | | dG-Sup | |
| APOE- | 1.00277201 | 0.056489527 | APOE | in | RPTEC | 30 | qRTP | CGCUC | dCs; lnaGs; | APOE:3070L15 |
| 16 | | | | vitro | | | CR | GGCGC | dCs; lnaTs; | |
| | | | | | | | | CCUCG | dCs; lnaGs; | |
| | | | | | | | | | dGs; | |
| | | | | | | | | | lnaCs; dGs; | |
| | | | | | | | | | lnaCs; dCs; | |
| | | | | | | | | | lnaCs; | |
| | | | | | | | | | dTs; lnaCs; | |
| | | | | | | | | | dG-Sup | |
| APOE- | 1.092773967 | 0.034853726 | APOE | in | Hep3B | 20 | qRTP | CGCUC | dCs; lnaGs; | APOE:3070L15 |
| 16 | | | | vitro | | | CR | GGCGC | dCs; lnaTs; | |
| | | | | | | | | CCUCG | dCs; lnaGs; | |
| | | | | | | | | | dGs; | |
| | | | | | | | | | lnaCs; dGs; | |
| | | | | | | | | | lnaCs; dCs; | |
| | | | | | | | | | lnaCs; | |
| | | | | | | | | | dTs; lnaCs; | |
| | | | | | | | | | dG-Sup | |
| APOE- | 0.672991352 | 0.060667624 | APOE | in | Hep3B | 50 | qRTP | CGCUC | dCs; lnaGs; | APOE:3070L15 |
| 16 | | | | vitro | | | CR | GGCGC | dCs; lnaTs; | |
| | | | | | | | | CCUCG | dCs; lnaGs; | |
| | | | | | | | | | dGs; | |
| | | | | | | | | | lnaCs; dGs; | |
| | | | | | | | | | lnaCs; dCs; | |
| | | | | | | | | | lnaCs; | |
| | | | | | | | | | dTs; lnaCs; | |
| | | | | | | | | | dG-Sup | |
| APOE- | 0.84838039 | 0.038507129 | APOE | in | HepG2 | 20 | qRTP | CGCUC | dCs; lnaGs, | APOE:3070L15 |
| 16 | | | | vitro | | | CR | GGCGC | dCs; lnaTs; | |
| | | | | | | | | CCUCG | dCs; lnaGs; | |
| | | | | | | | | | dGs; | |
| | | | | | | | | | lnaCs; dGs; | |
| | | | | | | | | | lnaCs; dCs; | |
| | | | | | | | | | lnaCs; | |
| | | | | | | | | | dTs; lnaCs; | |
| | | | | | | | | | dG-Sup | |
| APOE- | 2.561395251 | 0.23158815 | APOE | in | HepG2 | 50 | qRTP | CGCUC | dCs; lnaGs; | APOE:3070L15 |
| 16 | | | | vitro | | | CR | GGCGC | dCs; lnaTs; | |
| | | | | | | | | CCUCG | dCs; lnaGs; | |
| | | | | | | | | | dGs; | |
| | | | | | | | | | lnaCs; dGs; | |
| | | | | | | | | | lnaCs; dCs; | |
| | | | | | | | | | lnaCs; | |
| | | | | | | | | | dTs; lnaCs; | |
| | | | | | | | | | dG-Sup | |
| APOE- | 0.302303542 | 0.062351984 | APOE | in | Hep3B | 20 | qRTP | GCGCA | dGs; lnaCs; | APOE:3200L15 |
| 17 | | | | vitro | | | CR | GCCGC | dGs; lnaCs; | |
| | | | | | | | | UCGCC | dAs; lnaGs; | |
| | | | | | | | | | dCs; lnaCs; | |
| | | | | | | | | | dGs; | |
| | | | | | | | | | lnaCs; dTs; | |
| | | | | | | | | | lnaCs; dGs; | |
| | | | | | | | | | lnaCs; | |
| | | | | | | | | | dC-Sup | |
| APOE- | 0.862830257 | 0.21302759 | APOE | in | Hep3B | 20 | qRTP | GCGCA | dGs; lnaCs; | APOE:3200L15 |
| 17 | | | | vitro | | | CR | GCCGC | dGs; lnaCs; | |
| | | | | | | | | UCGCC | dAs; lnaGs; | |
| | | | | | | | | | dCs; lnaCs; | |
| | | | | | | | | | dGs; | |
| | | | | | | | | | lnaCs; dTs; | |
| | | | | | | | | | lnaCs; dGs; | |
| | | | | | | | | | lnaCs; | |
| | | | | | | | | | dC-Sup | |
| APOE- | 0.413655118 | 0.026784209 | APOE | in | Hep3B | 50 | qRTP | GCGCA | dGs; lnaCs; | APOE:3200L15 |
| 17 | | | | vitro | | | CR | GCCGC | dGs; lnaCs; | |
| | | | | | | | | UCGCC | dAs; lnaGs; | |
| | | | | | | | | | dCs; lnaCs; | |
| | | | | | | | | | dGs; | |
| | | | | | | | | | lnaCs; dTs; | |
| | | | | | | | | | lnaCs; dGs; | |
| | | | | | | | | | lnaCs; | |
| | | | | | | | | | dC-Sup | |
| APOE- | 1.198157365 | 0.059765319 | APOE | in | RPTEC | 10 | qRTP | GCGCA | dGs; lnaCs; | APOE:3200L15 |
| 17 | | | | vitro | | | CR | GCCGC | dGs; lnaCs; | |
| | | | | | | | | UCGCC | dAs; lnaGs; | |
| | | | | | | | | | dCs; lnaCs; | |
| | | | | | | | | | dGs; | |
| | | | | | | | | | lnaCs; dTs; | |
| | | | | | | | | | lnaCs; dGs; | |
| | | | | | | | | | lnaCs; | |
| | | | | | | | | | dC-Sup | |
| APOE- | 1.089790584 | 0.166387349 | APOE | in | RPTEC | 30 | qRTP | GCGCA | dGs; lnaCs; | APOE:3200L15 |
| 17 | | | | vitro | | | CR | GCCGC | dGs; lnaCs; | |
| | | | | | | | | UCGCC | dAs; lnaGs; | |
| | | | | | | | | | dCs; lnaCs; | |
| | | | | | | | | | dGs; | |
| | | | | | | | | | lnaCs; dTs; | |
| | | | | | | | | | lnaCs; dGs; | |
| | | | | | | | | | lnaCs; | |
| | | | | | | | | | dC-Sup | |
| APOE- | 0.862830257 | 0.211253719 | APOE | in | Hep3B | 20 | qRTP | GCGCA | dGs; lnaCs; | APOE:3200L15 |
| 17 | | | | vitro | | | CR | GCCGC | dGs; lnaCs; | |
| | | | | | | | | UCGCC | dAs; lnaGs; | |
| | | | | | | | | | dCs; lnaCs; | |
| | | | | | | | | | dGs; | |
| | | | | | | | | | lnaCs; dTs; | |
| | | | | | | | | | lnaCs; dGs; | |
| | | | | | | | | | lnaCs; | |
| | | | | | | | | | dC-Sup | |
| APOE- | 0.413655118 | 0.026650042 | APOE | in | Hep3B | 50 | qRTP | GCGCA | dGs; lnaCs; | APOE:3200L15 |
| 17 | | | | vitro | | | CR | GCCGC | dGs; lnaCs; | |
| | | | | | | | | UCGCC | dAs; lnaGs; | |
| | | | | | | | | | dCs; lnaCs; | |
| | | | | | | | | | dGs; | |
| | | | | | | | | | lnaCs; dTs; | |
| | | | | | | | | | lnaCs; dGs; | |
| | | | | | | | | | lnaCs; | |
| | | | | | | | | | dC-Sup | |
| APOE- | 0.843541447 | 0.084714127 | APOE | in | HepG2 | 20 | qRTP | GCGCA | dGs; lnaCs; | APOE:3200L15 |
| 17 | | | | vitro | | | CR | GCCGC | dGs; lnaCs; | |
| | | | | | | | | UCGCC | dAs; lnaGs; | |
| | | | | | | | | | dCs; lnaCs; | |
| | | | | | | | | | dGs; | |
| | | | | | | | | | lnaCs; dTs; | |
| | | | | | | | | | lnaCs; dGs; | |
| | | | | | | | | | lnaCs; | |
| | | | | | | | | | dC-Sup | |
| APOE- | 2.261019459 | 0.348355895 | APOE | in | HepG2 | 50 | qRTP | GCGCA | dGs; lnaCs; | APOE:3200L15 |
| 17 | | | | vitro | | | CR | GCCGC | dGs; lnaCs; | |
| | | | | | | | | UCGCC | dAs; lnaGs; | |
| | | | | | | | | | dCs; lnaCs; | |
| | | | | | | | | | dGs; | |
| | | | | | | | | | lnaCs; dTs; | |
| | | | | | | | | | lnaCs; dGs; | |
| | | | | | | | | | lnaCs; | |
| | | | | | | | | | dC-Sup | |
| APOE- | 1.052302004 | 0.141776217 | APOE | in | Hep3B | 20 | qRTP | GGCCU | dGs; lnaGs; | APOE:3317L15 |
| 18 | | | | vitro | | | CR | GCAGG | dCs; lnaCs; | |
| | | | | | | | | CGUAU | dTs; lnaGs; | |
| | | | | | | | | | dCs; lnaAs; | |
| | | | | | | | | | dGs; | |
| | | | | | | | | | lnaGs; dCs; | |
| | | | | | | | | | lnaGs; | |
| | | | | | | | | | dTs; lnaAs; | |
| | | | | | | | | | dT-Sup | |
| APOE- | 1.064417445 | 0.078157386 | APOE | in | Hep3B | 20 | qRTP | GGCCU | dGs; lnaGs; | APOE:3317L15 |
| 18 | | | | vitro | | | CR | GCAGG | dCs; lnaCs; | |
| | | | | | | | | CGUAU | dTs; lnaGs; | |
| | | | | | | | | | dCs; lnaAs; | |
| | | | | | | | | | dGs; | |
| | | | | | | | | | lnaGs; dCs; | |
| | | | | | | | | | lnaGs; | |
| | | | | | | | | | dTs; lnaAs; | |
| | | | | | | | | | dT-Sup | |
| APOE- | 0.69097881 | 0.131221593 | APOE | in | Hep3B | 50 | qRTP | GGCCU | dGs; lnaGs; | APOE:3317L15 |
| 18 | | | | | vitro | | CR | GCAGG | dCs; lnaCs; | |
| | | | | | | | | CGUAU | dTs; lnaGs; | |
| | | | | | | | | | dCs; lnaAs; | |
| | | | | | | | | | dGs; | |
| | | | | | | | | | lnaGs; dCs; | |
| | | | | | | | | | lnaGs; | |
| | | | | | | | | | dTs; lnaAs; | |
| | | | | | | | | | dT-Sup | |
| APOE- | 1.304846033 | 0.015863967 | APOE | in | RPTEC | 10 | qRTP | GGCCU | dGs; lnaGs; | APOE:3317L15 |
| 18 | | | | vitro | | | CR | GCAGG | dCs; lnaCs; | |
| | | | | | | | | CGUAU | dTs; lnaGs; | |
| | | | | | | | | | dCs; lnaAs; | |
| | | | | | | | | | dGs; | |
| | | | | | | | | | lnaGs; dCs; | |
| | | | | | | | | | lnaGs; | |
| | | | | | | | | | dTs; lnaAs; | |
| | | | | | | | | | dT-Sup | |
| APOE- | 0.889822997 | 0.080713462 | APOE | in | RPTEC | 30 | qRTP | GGCCU | dGs; lnaGs; | APOE:3317L15 |
| 18 | | | | vitro | | | CR | GCAGG | dCs; lnaCs; | |
| | | | | | | | | CGUAU | dTs; lnaGs; | |
| | | | | | | | | | dCs; lnaAs; | |
| | | | | | | | | | dGs; | |
| | | | | | | | | | lnaGs; dCs; | |
| | | | | | | | | | lnaGs; | |
| | | | | | | | | | dTs; lnaAs; | |
| | | | | | | | | | dT-Sup | |
| APOE- | 1.064417445 | 0.077506574 | APOE | in | Hep3B | 20 | qRTP | GGCCU | dGs; lnaGs; | APOE:3317L15 |
| 18 | | | | vitro | | | CR | GCAGG | dCs; lnaCs; | |
| | | | | | | | | CGUAU | dTs; lnaGs; | |
| | | | | | | | | | dCs; lnaAs; | |
| | | | | | | | | | dGs; | |
| | | | | | | | | | lnaGs; dCs; | |
| | | | | | | | | | lnaGs; | |
| | | | | | | | | | dTs; lnaAs; | |
| | | | | | | | | | dT-Sup | |
| APOE- | 0.69097881 | 0.130564278 | APOE | in | Hep3B | 50 | qRTP | GGCCU | dGs; lnaGs; | APOE:3317L15 |
| 18 | | | | vitro | | | CR | GCAGG | dCs; lnaCs; | |
| | | | | | | | | CGUAU | dTs; lnaGs; | |
| | | | | | | | | | dCs; lnaAs; | |
| | | | | | | | | | dGs; | |
| | | | | | | | | | lnaGs; dCs; | |
| | | | | | | | | | lnaGs; | |
| | | | | | | | | | dTs; lnaAs; | |
| | | | | | | | | | dT-Sup | |
| APOE- | 1.184627336 | 0.142471992 | APOE | in | HepG2 | 20 | qRTP | GGCCU | dGs; lnaGs; | APOE:3317L15 |
| 18 | | | | vitro | | | CR | GCAGG | dCs; lnaCs; | |
| | | | | | | | | CGUAU | dTs; lnaGs; | |
| | | | | | | | | | dCs; lnaAs; | |
| | | | | | | | | | dGs; | |
| | | | | | | | | | lnaGs; dCs; | |
| | | | | | | | | | lnaGs; | |
| | | | | | | | | | dTs; lnaAs; | |
| | | | | | | | | | dT-Sup | |
| APOE- | 2.21230001 | 0.35061287 | APOE | in | HepG2 | 50 | qRTP | GGCCU | dGs; lnaGs; | APOE:3317L15 |
| 18 | | | | vitro | | | CR | GCAGG | dCs; lnaCs; | |
| | | | | | | | | CGUAU | dTs; lnaGs; | |
| | | | | | | | | | dCs; lnaAs; | |
| | | | | | | | | | dGs; | |
| | | | | | | | | | lnaGs; dCs; | |
| | | | | | | | | | lnaGs; | |
| | | | | | | | | | dTs; lnaAs; | |
| | | | | | | | | | dT-Sup | |
| APOE- | 0.482988655 | 0.470189417 | APOE | in | Hep3B | 20 | qRTP | UGUCU | dTs; lnaGs; | APOE:3369L15 |
| 19 | | | | vitro | | | CR | UCCACC | dTs; lnaCs; | |
| | | | | | | | | AGGG | dTs; lnaTs; | |
| | | | | | | | | | dCs; lnaCs; | |
| | | | | | | | | | dAs; | |
| | | | | | | | | | lnaCs; dCs; | |
| | | | | | | | | | lnaAs; dGs; | |
| | | | | | | | | | lnaGs; | |
| | | | | | | | | | dG-Sup | |
| APOE- | 0.983684759 | 0.086334481 | APOE | in | Hep3B | 20 | qRTP | UGUCU | dTs; lnaGs; | APOE:3369L15 |
| 19 | | | | vitro | | | CR | UCCACC | dTs; lnaCs; | |
| | | | | | | | | AGGG | dTs; lnaTs; | |
| | | | | | | | | | dCs; lnaCs; | |
| | | | | | | | | | dAs; | |
| | | | | | | | | | lnaCs; dCs; | |
| | | | | | | | | | lnaAs; dGs; | |
| | | | | | | | | | lnaGs; | |
| | | | | | | | | | dG-Sup | |
| APOE- | 1.204450883 | 0.177026217 | APOE | in | Hep3B | 50 | qRTP | UGUCU | dTs; lnaGs; | APOE:3369L15 |
| 19 | | | | vitro | | | CR | UCCACC | dTs; lnaCs; | |
| | | | | | | | | AGGG | dTs; lnaTs; | |
| | | | | | | | | | dCs; lnaCs; | |
| | | | | | | | | | dAs; | |
| | | | | | | | | | lnaCs; dCs; | |
| | | | | | | | | | lnaAs; dGs; | |
| | | | | | | | | | lnaGs; | |
| | | | | | | | | | dG-Sup | |
| APOE- | 0.848229563 | 0.078213922 | APOE | in | RPTEC | 10 | qRTP | UGUCU | dTs; lnaGs; | APOE:3369L15 |
| 19 | | | | vitro | | | CR | UCCACC | dTs; lnaCs; | |
| | | | | | | | | AGGG | dTs; lnaTs; | |
| | | | | | | | | | dCs; lnaCs; | |
| | | | | | | | | | dAs; | |
| | | | | | | | | | lnaCs; dCs; | |
| | | | | | | | | | lnaAs; dGs; | |
| | | | | | | | | | lnaGs; | |
| | | | | | | | | | dG-Sup | |
| APOE- | 0.817351812 | 0.019386308 | APOE | in | RPTEC | 30 | qRTP | UGUCU | dTs; lnaGs; | APOE:3369L15 |
| 19 | | | | vitro | | | CR | UCCACC | dTs; lnaCs; | |
| | | | | | | | | AGGG | dTs; lnaTs; | |
| | | | | | | | | | dCs; lnaCs; | |
| | | | | | | | | | dAs; | |
| | | | | | | | | | lnaCs; dCs; | |
| | | | | | | | | | lnaAs; dGs; | |
| | | | | | | | | | lnaGs; | |
| | | | | | | | | | dG-Sup | |
| APOE- | 0.983684759 | 0.085615578 | APOE | in | Hep3B | 20 | qRTP | UGUCU | dTs; lnaGs; | APOE:3369L15 |
| 19 | | | | vitro | | | CR | UCCACC | dTs; lnaCs; | |
| | | | | | | | | AGGG | dTs; lnaTs; | |
| | | | | | | | | | dCs; lnaCs; | |
| | | | | | | | | | dAs; | |
| | | | | | | | | | lnaCs; dCs; | |
| | | | | | | | | | lnaAs; dGs; | |
| | | | | | | | | | lnaGs; | |
| | | | | | | | | | dG-Sup | |
| APOE- | 1.204450883 | 0.176139458 | APOE | in | Hep3B | 50 | qRTP | UGUCU | dTs; lnaGs; | APOE:3369L15 |
| 19 | | | | vitro | | | CR | UCCACC | dTs; lnaCs; | |
| | | | | | | | | AGGG | dTs; lnaTs; | |
| | | | | | | | | | dCs; lnaCs; | |
| | | | | | | | | | dAs; | |
| | | | | | | | | | lnaCs; dCs; | |
| | | | | | | | | | lnaAs; dGs; | |
| | | | | | | | | | lnaGs; | |
| | | | | | | | | | dG-Sup | |
| APOE- | 1.003885835 | 0.120001484 | APOE | in | HepG2 | 20 | qRTP | UGUCU | dTs; lnaGs; | APOE:3369L15 |
| 19 | | | | vitro | | | CR | UCCACC | dTs; lnaCs; | |
| | | | | | | | | AGGG | dTs; lnaTs; | |
| | | | | | | | | | dCs; lnaCs; | |
| | | | | | | | | | dAs; | |
| | | | | | | | | | lnaCs; dCs; | |
| | | | | | | | | | lnaAs; dGs; | |
| | | | | | | | | | lnaGs; | |
| | | | | | | | | | dG-Sup | |
| APOE- | 1.95164075 | 0.088018651 | APOE | in | HepG2 | 50 | qRTP | UGUCU | dTs; lnaGs; | APOE:3369L15 |
| 19 | | | | vitro | | | CR | UCCACC | dTs; lnaCs; | |
| | | | | | | | | AGGG | dTs; lnaTs; | |
| | | | | | | | | | dCs; lnaCs; | |
| | | | | | | | | | dAs; | |
| | | | | | | | | | lnaCs; dCs; | |
| | | | | | | | | | lnaAs; dGs; | |
| | | | | | | | | | lnaGs; | |
| | | | | | | | | | dG-Sup | |
| APOE- | 1.009097359 | 0.273360497 | APOE | in | Hep3B | 20 | qRTP | CGGCG | dCs; lnaGs; | APOE:3461L15 |
| 20 | | | | vitro | | | CR | UUCAG | dGs; lnaCs; | |
| | | | | | | | | UGAUU | dGs; lnaTs; | |
| | | | | | | | | | dTs; lnaCs; | |
| | | | | | | | | | dAs; | |
| | | | | | | | | | lnaGs; dTs; | |
| | | | | | | | | | lnaGs; | |
| | | | | | | | | | dAs; lnaTs; | |
| | | | | | | | | | dT-Sup | |
| APOE- | 1.072171925 | 0.031899779 | APOE | in | Hep3B | 20 | qRTP | CGGCG | dCs; lnaGs; | APOE:3461L15 |
| 20 | | | | vitro | | | CR | UUCAG | dGs; lnaCs; | |
| | | | | | | | | UGAUU | dGs; lnaTs; | |
| | | | | | | | | | dTs; lnaCs; | |
| | | | | | | | | | dAs; | |
| | | | | | | | | | lnaGs; dTs; | |
| | | | | | | | | | lnaGs; | |
| | | | | | | | | | dAs; lnaTs; | |
| | | | | | | | | | dT-Sup | |
| APOE- | 0.907569578 | 0.052329033 | APOE | in | Hep3B | 50 | qRTP | CGGCG | dCs; lnaGs; | APOE:3461L15 |
| 20 | | | | vitro | | | CR | UUCAG | dGs; lnaCs; | |
| | | | | | | | | UGAUU | dGs; lnaTs; | |
| | | | | | | | | | dTs; lnaCs; | |
| | | | | | | | | | dAs; | |
| | | | | | | | | | lnaGs; dTs; | |
| | | | | | | | | | lnaGs; | |
| | | | | | | | | | dAs; lnaTs; | |
| | | | | | | | | | dT-Sup | |
| APOE- | 1.072294794 | 0.132531777 | APOE | in | RPTEC | 10 | qRTP | CGGCG | dCs; lnaGs; | APOE:3461L15 |
| 20 | | | | vitro | | | CR | UUCAG | dGs; lnaCs; | |
| | | | | | | | | UGAUU | dGs; lnaTs; | |
| | | | | | | | | | dTs; lnaCs; | |
| | | | | | | | | | dAs; | |
| | | | | | | | | | lnaGs; dTs; | |
| | | | | | | | | | lnaGs; | |
| | | | | | | | | | dAs; lnaTs; | |
| | | | | | | | | | dT-Sup | |
| APOE- | 0.484657021 | 0.025175589 | APOE | in | RPTEC | 30 | qRTP | CGGCG | dCs; lnaGs; | APOE:3461L15 |
| 20 | | | | vitro | | | CR | UUCAG | dGs; lnaCs; | |
| | | | | | | | | UGAUU | dGs; lnaTs; | |
| | | | | | | | | | dTs; lnaCs; | |
| | | | | | | | | | dAs; | |
| | | | | | | | | | lnaGs; dTs; | |
| | | | | | | | | | lnaGs; | |
| | | | | | | | | | dAs; lnaTs; | |
| | | | | | | | | | dT-Sup | |
| APOE- | 1.072171925 | 0.031634151 | APOE | in | Hep3B | 20 | qRTP | CGGCG | dCs; lnaGs; | APOE:3461L15 |
| 20 | | | | vitro | | | CR | UUCAG | dGs; lnaCs; | |
| | | | | | | | | UGAUU | dGs; lnaTs; | |
| | | | | | | | | | dTs; lnaCs; | |
| | | | | | | | | | dAs; | |
| | | | | | | | | | lnaGs; dTs; | |
| | | | | | | | | | lnaGs; | |
| | | | | | | | | | dAs; lnaTs; | |
| | | | | | | | | | dT-Sup | |
| APOE- | 0.907569578 | 0.052066907 | APOE | in | Hep3B | 50 | qRTP | CGGCG | dCs; lnaGs; | APOE:3461L15 |
| 20 | | | | vitro | | | CR | UUCAG | dGs; lnaCs; | |
| | | | | | | | | UGAUU | dGs; lnaTs; | |
| | | | | | | | | | dTs; lnaCs; | |
| | | | | | | | | | dAs; | |
| | | | | | | | | | lnaGs; dTs; | |
| | | | | | | | | | lnaGs; | |
| | | | | | | | | | dAs; lnaTs; | |
| | | | | | | | | | dT-Sup | |
| APOE- | 1.100554627 | 0.116078524 | APOE | in | HepG2 | 20 | qRTP | CGGCG | dCs; lnaGs; | APOE:3461L15 |
| 20 | | | | vitro | | | CR | UUCAG | dGs; lnaCs; | |
| | | | | | | | | UGAUU | dGs; lnaTs; | |
| | | | | | | | | | dTs; lnaCs; | |
| | | | | | | | | | dAs; | |
| | | | | | | | | | lnaGs; dTs; | |
| | | | | | | | | | lnaGs; | |
| | | | | | | | | | dAs; lnaTs; | |
| | | | | | | | | | dT-Sup | |
| APOE- | 2.56999463 | 0.276677002 | APOE | in | HepG2 | 50 | qRTP | CGGCG | dCs; lnaGs; | APOE:3461L15 |
| 20 | | | | vitro | | | CR | UUCAG | dGs; lnaCs; | |
| | | | | | | | | UGAUU | dGs; lnaTs; | |
| | | | | | | | | | dTs; lnaCs; | |
| | | | | | | | | | dAs; | |
| | | | | | | | | | lnaGs; dTs; | |
| | | | | | | | | | lnaGs; | |
| | | | | | | | | | dAs; lnaTs; | |
| | | | | | | | | | dT-Sup | |
| APOE- | 0.880186732 | NA | APOE | in | Hep3B | 20 | qRTP | UGUCU | lnaTs; lnaGs; | APOE:3376L8 |
| 21 | | | | vitro | | | CR | UCC | lnaTs; | |
| | | | | | | | | | lnaCs; lnaTs; | |
| | | | | | | | | | lnaTs; lnaCs; | |
| | | | | | | | | | lnaC- | |
| | | | | | | | | | Sup | |
| APOE- | 1.181458434 | 0.098647157 | APOE | in | Hep3B | 20 | qRTP | UGUCU | lnaTs; lnaGs; | APOE:3376L8 |
| 21 | | | | vitro | | | CR | UCC | lnaTs; | |
| | | | | | | | | | lnaCs; lnaTs; | |
| | | | | | | | | | lnaTs; lnaCs; | |
| | | | | | | | | | lnaC- | |
| | | | | | | | | | Sup | |
| APOE- | 1.05699439 | 0.126556057 | APOE | in | Hep3B | 50 | qRTP | UGUCU | lnaTs; lnaGs; | APOE:3376L8 |
| 21 | | | | vitro | | | CR | UCC | lnaTs; | |
| | | | | | | | | | lnaCs; lnaTs; | |
| | | | | | | | | | lnaTs; lnaCs; | |
| | | | | | | | | | lnaC- | |
| | | | | | | | | | Sup | |
| APOE- | 1.148220817 | 0.06119401 | APOE | in | RPTEC | 10 | qRTP | UGUCU | lnaTs; lnaGs; | APOE:3376L8 |
| 21 | | | | vitro | | | CR | UCC | lnaTs; | |
| | | | | | | | | | lnaCs; lnaTs; | |
| | | | | | | | | | lnaTs; lnaCs; | |
| | | | | | | | | | lnaC- | |
| | | | | | | | | | Sup | |
| APOE- | 0.744363739 | | APOE | in | RPTEC | 30 | qRTP | UGUCU | lnaTs; lnaGs; | APOE:3376L8 |
| 21 | | | | vitro | | | CR | UCC | lnaTs; | |
| | | | | | | | | | lnaCs; lnaTs; | |
| | | | | | | | | | lnaTs; lnaCs; | |
| | | | | | | | | | lnaC- | |
| | | | | | | | | | Sup | |
| APOE- | 1.181458434 | 0.097825727 | APOE | in | Hep3B | 20 | qRTP | UGUCU | lnaTs; lnaGs; | APOE:3376L8 |
| 21 | | | | vitro | | | CR | UCC | lnaTs; | |
| | | | | | | | | | lnaCs; lnaTs; | |
| | | | | | | | | | lnaTs; lnaCs; | |
| | | | | | | | | | lnaC- | |
| | | | | | | | | | Sup | |
| APOE- | 1.05699439 | 0.125922113 | APOE | in | Hep3B | 50 | qRTP | UGUCU | lnaTs; lnaGs; | APOE:3376L8 |
| 21 | | | | vitro | | | CR | UCC | lnaTs; | |
| | | | | | | | | | lnaCs; lnaTs; | |
| | | | | | | | | | lnaTs; lnaCs; | |
| | | | | | | | | | lnaC- | |
| | | | | | | | | | Sup | |
| APOE- | 0.879300786 | 0.010859644 | APOE | in | HepG2 | 20 | qRTP | UGUCU | lnaTs; lnaGs; | APOE:3376L8 |
| 21 | | | | vitro | | | CR | UCC | lnaTs; | |
| | | | | | | | | | lnaCs; lnaTs; | |
| | | | | | | | | | lnaTs; lnaCs; | |
| | | | | | | | | | lnaC- | |
| | | | | | | | | | Sup | |
| APOE- | 1.817046976 | 0.122590123 | APOE | in | HepG2 | 50 | qRTP | UGUCU | lnaTs; lnaGs; | APOE:3376L8 |
| 21 | | | | vitro | | | CR | UCC | lnaTs; | |
| | | | | | | | | | lnaCs; lnaTs; | |
| | | | | | | | | | lnaTs; lnaCs; | |
| | | | | | | | | | lnaC- | |
| | | | | | | | | | Sup | |
| APOE- | 0.655184442 | 0.413826262 | APOE | in | Hep3B | 20 | qRTP | CAGUG | lnaCs; lnaAs; | APOE:3461L8 |
| 22 | | | | vitro | | | CR | AUU | lnaGs; | |
| | | | | | | | | | lnaTs; lnaGs; | |
| | | | | | | | | | lnaAs; | |
| | | | | | | | | | lnaTs; lnaT- | |
| | | | | | | | | | Sup | |
| APOE- | 1.052256074 | 0.115088499 | APOE | in | Hep3B | 20 | qRTP | CAGUG | lnaCs; lnaAs; | APOE:3461L8 |
| 22 | | | | vitro | | | CR | AUU | lnaGs; | |
| | | | | | | | | | lnaTs; lnaGs; | |
| | | | | | | | | | lnaAs; | |
| | | | | | | | | | lnaTs; lnaT- | |
| | | | | | | | | | Sup | |
| APOE- | 1.165730633 | 0.109598902 | APOE | in | Hep3B | 50 | qRTP | CAGUG | lnaCs; lnaAs; | APOE:3461L8 |
| 22 | | | | vitro | | | CR | AUU | lnaGs; | |
| | | | | | | | | | lnaTs; lnaGs; | |
| | | | | | | | | | lnaAs; | |
| | | | | | | | | | lnaTs; lnaT- | |
| | | | | | | | | | Sup | |
| APOE- | 1.121657621 | 0.178998001 | APOE | in | RPTEC | 10 | qRTP | CAGUG | lnaCs; lnaAs; | APOE:3461L8 |
| 22 | | | | vitro | | | CR | AUU | lnaGs; | |
| | | | | | | | | | lnaTs; lnaGs; | |
| | | | | | | | | | lnaAs; | |
| | | | | | | | | | lnaTs; lnaT- | |
| | | | | | | | | | Sup | |
| APOE- | 0.689455789 | 0.066267452 | APOE | in | RPTEC | 30 | qRTP | CAGUG | lnaCs; lnaAs; | APOE:3461L8 |
| 22 | | | | vitro | | | CR | AUU | lnaGs; | |
| | | | | | | | | | lnaTs; lnaGs; | |
| | | | | | | | | | lnaAs; | |
| | | | | | | | | | lnaTs; lnaT- | |
| | | | | | | | | | Sup | |
| APOE- | 1.052256074 | 0.114130162 | APOE | in | Hep3B | 20 | qRTP | CAGUG | lnaCs; lnaAs; | APOE:3461L8 |
| 22 | | | | vitro | | | CR | AUU | lnaGs; | |
| | | | | | | | | | lnaTs; lnaGs; | |
| | | | | | | | | | lnaAs; | |
| | | | | | | | | | lnaTs; lnaT- | |
| | | | | | | | | | Sup | |
| APOE- | 1.165730633 | 0.1090499 | APOE | in | Hep3B | 50 | qRTP | CAGUG | lnaCs; lnaAs; | APOE:3461L8 |
| 22 | | | | vitro | | | CR | AUU | lnaGs; | |
| | | | | | | | | | lnaTs; lnaGs; | |
| | | | | | | | | | lnaAs; | |
| | | | | | | | | | lnaTs; lnaT- | |
| | | | | | | | | | Sup | |
| APOE- | 1.53435016 | 0.137613753 | APOE | in | HepG2 | 20 | qRTP | CAGUG | lnaCs; lnaAs; | APOE:3461L8 |
| 22 | | | | vitro | | | CR | AUU | lnaGs; | |
| | | | | | | | | | lnaTs; lnaGs; | |
| | | | | | | | | | lnaAs; | |
| | | | | | | | | | lnaTs; lnaT- | |
| | | | | | | | | | Sup | |
| APOE- | 2.853005221 | 0.18403336 | APOE | in | HepG2 | 50 | qRTP | CAGUG | lnaCs; lnaAs; | APOE:3461L8 |
| 22 | | | | vitro | | | CR | AUU | lnaGs; | |
| | | | | | | | | | lnaTs; lnaGs; | |
| | | | | | | | | | lnaAs; | |
| | | | | | | | | | lnaTs; lnaT- | |
| | | | | | | | | | Sup | |
| APOE- | 0.42323812 | 0.125866173 | APOE | in | Hep3B | 20 | qRTP | CUGGG | dCs; lnaTs; | APOE:345L15 |
| 23 | | | | vitro | | | CR | GACACC | dGs; lnaGs; | |
| | | | | | | | | CAGU | dGs; lnaGs; | |
| | | | | | | | | | dAs; | |
| | | | | | | | | | lnaCs; dAs; | |
| | | | | | | | | | lnaCs; | |
| | | | | | | | | | dCs; lnaCs; | |
| | | | | | | | | | dAs; lnaGs; | |
| | | | | | | | | | dT- | |
| | | | | | | | | | Sup | |
| APOE- | 1.306182971 | 0.086850035 | APOE | in | Hep3B | 20 | qRTP | CUGGG | dCs; lnaTs; | APOE:345L15 |
| 23 | | | | vitro | | | CR | GACACC | dGs; lnaGs; | |
| | | | | | | | | CAGU | dGs; lnaGs; | |
| | | | | | | | | | dAs; | |
| | | | | | | | | | lnaCs; dAs; | |
| | | | | | | | | | lnaCs; | |
| | | | | | | | | | dCs; lnaCs; | |
| | | | | | | | | | dAs; lnaGs; | |
| | | | | | | | | | dT- | |
| | | | | | | | | | Sup | |
| APOE- | 0.748949406 | 0.136568305 | APOE | in | Hep3B | 50 | qRTP | CUGGG | dCs; lnaTs; | APOE:345L15 |
| 23 | | | | vitro | | | CR | GACACC | dGs; lnaGs; | |
| | | | | | | | | CAGU | dGs; lnaGs; | |
| | | | | | | | | | dAs; | |
| | | | | | | | | | lnaCs; dAs; | |
| | | | | | | | | | lnaCs; | |
| | | | | | | | | | dCs; lnaCs; | |
| | | | | | | | | | dAs; lnaGs; | |
| | | | | | | | | | dT- | |
| | | | | | | | | | Sup | |
| APOE- | 4.820984997 | 0.304798998 | APOE | in | RPTEC | 10 | qRTP | CUGGG | dCs; lnaTs; | APOE:345L15 |
| 23 | | | | vitro | | | CR | GACACC | dGs; lnaGs; | |
| | | | | | | | | CAGU | dGs; lnaGs; | |
| | | | | | | | | | dAs; | |
| | | | | | | | | | lnaCs; dAs; | |
| | | | | | | | | | lnaCs; | |
| | | | | | | | | | dCs; lnaCs; | |
| | | | | | | | | | dAs; lnaGs; | |
| | | | | | | | | | dT- | |
| | | | | | | | | | Sup | |
| APOE- | 4.732389768 | 0.360323488 | APOE | in | RPTEC | 30 | qRTP | CUGGG | dCs; lnaTs; | APOE:345L15 |
| 23 | | | | vitro | | | CR | GACACC | dGs; lnaGs; | |
| | | | | | | | | CAGU | dGs; lnaGs; | |
| | | | | | | | | | dAs; | |
| | | | | | | | | | lnaCs; dAs; | |
| | | | | | | | | | lnaCs; | |
| | | | | | | | | | dCs; lnaCs; | |
| | | | | | | | | | dAs; lnaGs; | |
| | | | | | | | | | dT- | |
| | | | | | | | | | Sup | |
| APOE- | 1.306182971 | 0.086126839 | APOE | in | Hep3B | 20 | qRTP | CUGGG | dCs; lnaTs; | APOE:345L15 |
| 23 | | | | vitro | | | CR | GACACC | dGs; lnaGs; | |
| | | | | | | | | CAGU | dGs; lnaGs; | |
| | | | | | | | | | dAs; | |
| | | | | | | | | | lnaCs; dAs; | |
| | | | | | | | | | lnaCs; | |
| | | | | | | | | | dCs; lnaCs; | |
| | | | | | | | | | dAs; lnaGs; | |
| | | | | | | | | | dT- | |
| | | | | | | | | | Sup | |
| APOE- | 0.748949406 | 0.135884207 | APOE | in | Hep3B | 50 | qRTP | CUGGG | dCs; lnaTs; | APOE:345L15 |
| 23 | | | | vitro | | | CR | GACACC | dGs; lnaGs; | |
| | | | | | | | | CAGU | dGs; lnaGs; | |
| | | | | | | | | | dAs; | |
| | | | | | | | | | lnaCs; dAs; | |
| | | | | | | | | | lnaCs; | |
| | | | | | | | | | dCs; lnaCs; | |
| | | | | | | | | | dAs; lnaGs; | |
| | | | | | | | | | dT- | |
| | | | | | | | | | Sup | |
| APOE- | 1.013375818 | 0.154402602 | APOE | in | HepG2 | 20 | qRTP | CUGGG | dCs; lnaTs; | APOE:345L15 |
| 23 | | | | vitro | | | CR | GACACC | dGs; lnaGs; | |
| | | | | | | | | CAGU | dGs; lnaGs; | |
| | | | | | | | | | dAs; | |
| | | | | | | | | | lnaCs; dAs; | |
| | | | | | | | | | lnaCs; | |
| | | | | | | | | | dCs; lnaCs; | |
| | | | | | | | | | dAs; lnaGs; | |
| | | | | | | | | | dT- | |
| | | | | | | | | | Sup | |
| APOE- | 2.445164616 | 0.195491445 | APOE | in | HepG2 | 50 | qRTP | CUGGG | dCs; lnaTs; | APOE:345L15 |
| 23 | | | | vitro | | | CR | GACACC | dGs; lnaGs; | |
| | | | | | | | | CAGU | dGs; lnaGs; | |
| | | | | | | | | | dAs; | |
| | | | | | | | | | lnaCs; dAs; | |
| | | | | | | | | | lnaCs; | |
| | | | | | | | | | dCs; lnaCs; | |
| | | | | | | | | | dAs; lnaGs; | |
| | | | | | | | | | dT- | |
| | | | | | | | | | Sup | |
| APOE- | 0.316997475 | 0.05878526 | APOE | in | Hep3B | 20 | qRTP | CCCAG | dCs; lnaCs; | APOE:369L15 |
| 24 | | | | vitro | | | CR | UUAUG | dCs; lnaAs; | |
| | | | | | | | | GAGAU | dGs; lnaTs; | |
| | | | | | | | | | dTs; | |
| | | | | | | | | | lnaAs; dTs; | |
| | | | | | | | | | lnaGs; dGs; | |
| | | | | | | | | | lnaAs; | |
| | | | | | | | | | dGs; lnaAs; | |
| | | | | | | | | | dT-Sup | |
| APOE- | 1.069544636 | 0.064164386 | APOE | in | Hep3B | 20 | qRTP | CCCAG | dCs; lnaCs; | APOE:369L15 |
| 24 | | | | vitro | | | CR | UUAUG | dCs; lnaAs; | |
| | | | | | | | | GAGAU | dGs; lnaTs; | |
| | | | | | | | | | dTs; | |
| | | | | | | | | | lnaAs; dTs; | |
| | | | | | | | | | lnaGs; dGs; | |
| | | | | | | | | | lnaAs; | |
| | | | | | | | | | dGs; lnaAs; | |
| | | | | | | | | | dT-Sup | |
| APOE- | 0.935106878 | 0.10700767 | APOE | in | Hep3B | 50 | qRTP | CCCAG | dCs; lnaCs; | APOE:369L15 |
| 24 | | | | vitro | | | CR | UUAUG | dCs; lnaAs; | |
| | | | | | | | | GAGAU | dGs; lnaTs; | |
| | | | | | | | | | dTs; | |
| | | | | | | | | | lnaAs; dTs; | |
| | | | | | | | | | lnaGs; dGs; | |
| | | | | | | | | | lnaAs; | |
| | | | | | | | | | dGs; lnaAs; | |
| | | | | | | | | | dT-Sup | |
| APOE- | 1.543795897 | 0.128255506 | APOE | in | RPTEC | 10 | qRTP | CCCAG | dCs; lnaCs; | APOE:369L15 |
| 24 | | | | vitro | | | CR | UUAUG | dCs; lnaAs; | |
| | | | | | | | | GAGAU | dGs; lnaTs; | |
| | | | | | | | | | dTs; | |
| | | | | | | | | | lnaAs; dTs; | |
| | | | | | | | | | lnaGs; dGs; | |
| | | | | | | | | | lnaAs; | |
| | | | | | | | | | dGs; lnaAs; | |
| | | | | | | | | | dT-Sup | |
| APOE- | 0.69613154 | 0.074431637 | APOE | in | RPTEC | 30 | qRTP | CCCAG | dCs; lnaCs; | APOE:369L15 |
| 24 | | | | vitro | | | CR | UUAUG | dCs; lnaAs; | |
| | | | | | | | | GAGAU | dGs; lnaTs; | |
| | | | | | | | | | dTs; | |
| | | | | | | | | | lnaAs; dTs; | |
| | | | | | | | | | lnaGs; dGs; | |
| | | | | | | | | | lnaAs; | |
| | | | | | | | | | dGs; lnaAs; | |
| | | | | | | | | | dT-Sup | |
| APOE- | 1.069544636 | 0.063630092 | APOE | in | Hep3B | 20 | qRTP | CCCAG | dCs; lnaCs; | APOE:369L15 |
| 24 | | | | vitro | | | CR | UUAUG | dCs; lnaAs; | |
| | | | | | | | | GAGAU | dGs; lnaTs; | |
| | | | | | | | | | dTs; | |
| | | | | | | | | | lnaAs; dTs; | |
| | | | | | | | | | lnaGs; dGs; | |
| | | | | | | | | | lnaAs; | |
| | | | | | | | | | dGs; lnaAs; | |
| | | | | | | | | | dT-Sup | |
| APOE- | 0.935106878 | 0.106471648 | APOE | in | Hep3B | 50 | qRTP | CCCAG | dCs; lnaCs; | APOE:369L15 |
| 24 | | | | vitro | | | CR | UUAUG | dCs; lnaAs; | |
| | | | | | | | | GAGAU | dGs; lnaTs; | |
| | | | | | | | | | dTs; | |
| | | | | | | | | | lnaAs; dTs; | |
| | | | | | | | | | lnaGs; dGs; | |
| | | | | | | | | | lnaAs; | |
| | | | | | | | | | dGs; lnaAs; | |
| | | | | | | | | | dT-Sup | |
| APOE- | 1.033906013 | 0.06485052 | APOE | in | HepG2 | 20 | qRTP | CCCAG | dCs; lnaCs; | APOE:369L15 |
| 24 | | | | vitro | | | CR | UUAUG | dCs; lnaAs; | |
| | | | | | | | | GAGAU | dGs; lnaTs; | |
| | | | | | | | | | dTs; | |
| | | | | | | | | | lnaAs; dTs; | |
| | | | | | | | | | lnaGs; dGs; | |
| | | | | | | | | | lnaAs; | |
| | | | | | | | | | dGs; lnaAs; | |
| | | | | | | | | | dT-Sup | |
| APOE- | 2.610984725 | 0.307555145 | APOE | in | HepG2 | 50 | qRTP | CCCAG | dCs; lnaCs; | APOE:369L15 |
| 24 | | | | vitro | | | CR | UUAUG | dCs; lnaAs; | |
| | | | | | | | | GAGAU | dGs; lnaTs; | |
| | | | | | | | | | dTs; | |
| | | | | | | | | | lnaAs; dTs; | |
| | | | | | | | | | lnaGs; dGs; | |
| | | | | | | | | | lnaAs; | |
| | | | | | | | | | dGs; lnaAs; | |
| | | | | | | | | | dT-Sup | |
| APOE- | 0.737189897 | 0.545438451 | APOE | in | Hep3B | 20 | qRTP | AUGGA | lnaAs; lnaTs; | APOE:369L8 |
| 25 | | | | vitro | | | CR | GAU | lnaGs; | |
| | | | | | | | | | lnaGs; lnaAs; | |
| | | | | | | | | | lnaGs; | |
| | | | | | | | | | lnaAs; lnaT- | |
| | | | | | | | | | Sup | |
| APOE- | 1.168598323 | 0.033349578 | APOE | in | Hep3B | 20 | qRTP | AUGGA | lnaAs; lnaTs; | APOE:369L8 |
| 25 | | | | vitro | | | CR | GAU | lnaGs; | |
| | | | | | | | | | lnaGs; lnaAs; | |
| | | | | | | | | | lnaGs; | |
| | | | | | | | | | lnaAs; lnaT- | |
| | | | | | | | | | Sup | |
| APOE- | 1.023384424 | 0.08000486 | APOE | in | Hep3B | 50 | qRTP | AUGGA | lnaAs; lnaTs; | APOE:369L8 |
| 25 | | | | vitro | | | CR | GAU | lnaGs; | |
| | | | | | | | | | lnaGs; lnaAs; | |
| | | | | | | | | | lnaGs; | |
| | | | | | | | | | lnaAs; lnaT- | |
| | | | | | | | | | Sup | |
| APOE- | 1.373114267 | 0.144893375 | APOE | in | RPTEC | 10 | qRTP | AUGGA | lnaAs; lnaTs; | APOE:369L8 |
| 25 | | | | vitro | | | CR | GAU | lnaGs; | |
| | | | | | | | | | lnaGs; lnaAs; | |
| | | | | | | | | | lnaGs; | |
| | | | | | | | | | lnaAs; lnaT- | |
| | | | | | | | | | Sup | |
| APOE- | 3.027212396 | 0.064795824 | APOE | in | RPTEC | 30 | qRTP | AUGGA | lnaAs; lnaTs; | APOE:369L8 |
| 25 | | | | vitro | | | CR | GAU | lnaGs; | |
| | | | | | | | | | lnaGs; lnaAs; | |
| | | | | | | | | | lnaGs; | |
| | | | | | | | | | lnaAs; lnaT- | |
| | | | | | | | | | Sup | |
| APOE- | 1.168598323 | 0.033071877 | APOE | in | Hep3B | 20 | qRTP | AUGGA | lnaAs; lnaTs; | APOE:369L8 |
| 25 | | | | vitro | | | CR | GAU | lnaGs; | |
| | | | | | | | | | lnaGs; lnaAs; | |
| | | | | | | | | | lnaGs; | |
| | | | | | | | | | lnaAs; lnaT- | |
| | | | | | | | | | Sup | |
| APOE- | 1.023384424 | 0.0796041 | APOE | in | Hep3B | 50 | qRTP | AUGGA | lnaAs; lnaTs; | APOE:369L8 |
| 25 | | | | vitro | | | CR | GAU | lnaGs; | |
| | | | | | | | | | lnaGs; lnaAs; | |
| | | | | | | | | | lnaGs; | |
| | | | | | | | | | lnaAs; lnaT- | |
| | | | | | | | | | Sup | |
| APOE- | 1.025371386 | 0.053854158 | APOE | in | HepG2 | 20 | qRTP | AUGGA | lnaAs; lnaTs; | APOE:369L8 |
| 25 | | | | vitro | | | CR | GAU | lnaGs; | |
| | | | | | | | | | lnaGs; lnaAs; | |
| | | | | | | | | | lnaGs; | |
| | | | | | | | | | lnaAs; lnaT- | |
| | | | | | | | | | Sup | |
| APOE- | 2.135902066 | 0.143008033 | APOE | in | HepG2 | 50 | qRTP | AUGGA | lnaAs; lnaTs; | APOE:369L8 |
| 25 | | | | vitro | | | CR | GAU | lnaGs; | |
| | | | | | | | | | lnaGs; lnaAs; | |
| | | | | | | | | | lnaGs; | |
| | | | | | | | | | lnaAs; lnaT- | |
| | | | | | | | | | Sup | |
| APOE- | 0.540983065 | 0.486084644 | APOE | in | Hep3B | 20 | qRTP | ACACA | dAs; lnaCs; | APOE:1973U15 |
| 26 | | | | vitro | | | CR | GGAUG | dAs; lnaCs; | |
| | | | | | | | | CCAGG | dAs; lnaGs; | |
| | | | | | | | | | dGs; | |
| | | | | | | | | | lnaAs; dTs; | |
| | | | | | | | | | lnaGs; dCs; | |
| | | | | | | | | | lnaCs; | |
| | | | | | | | | | dAs; lnaGs; | |
| | | | | | | | | | dG-Sup | |
| APOE- | 1.228391301 | 0.023000803 | APOE | in | Hep3B | 20 | qRTP | ACACA | dAs; lnaCs; | APOE:1973U15 |
| 26 | | | | vitro | | | CR | GGAUG | dAs; lnaCs; | |
| | | | | | | | | CCAGG | dAs; lnaGs; | |
| | | | | | | | | | dGs; | |
| | | | | | | | | | lnaAs; dTs; | |
| | | | | | | | | | lnaGs; dCs; | |
| | | | | | | | | | lnaCs; | |
| | | | | | | | | | dAs; lnaGs; | |
| | | | | | | | | | dG-Sup | |
| APOE- | 0.46000791 | 0.08019337 | APOE | in | Hep3B | 50 | qRTP | ACACA | dAs; lnaCs; | APOE:1973U15 |
| 26 | | | | vitro | | | CR | GGAUG | dAs; lnaCs; | |
| | | | | | | | | CCAGG | dAs; lnaGs; | |
| | | | | | | | | | dGs; | |
| | | | | | | | | | lnaAs; dTs; | |
| | | | | | | | | | lnaGs; dCs; | |
| | | | | | | | | | lnaCs; | |
| | | | | | | | | | dAs; lnaGs; | |
| | | | | | | | | | dG-Sup | |
| APOE- | 1.288225418 | 0.062450048 | APOE | in | RPTEC | 10 | qRTP | ACACA | dAs; lnaCs; | APOE:1973U15 |
| 26 | | | | vitro | | | CR | GGAUG | dAs; lnaCs; | |
| | | | | | | | | CCAGG | dAs; lnaGs; | |
| | | | | | | | | | dGs; | |
| | | | | | | | | | lnaAs; dTs; | |
| | | | | | | | | | lnaGs; dCs; | |
| | | | | | | | | | lnaCs; | |
| | | | | | | | | | dAs; lnaGs; | |
| | | | | | | | | | dG-Sup | |
| APOE- | 1.339552748 | 0.010373658 | APOE | in | RPTEC | 30 | qRTP | ACACA | dAs; lnaCs; | APOE:1973U15 |
| 26 | | | | vitro | | | CR | GGAUG | dAs; lnaCs; | |
| | | | | | | | | CCAGG | dAs; lnaGs; | |
| | | | | | | | | | dGs; | |
| | | | | | | | | | lnaAs; dTs; | |
| | | | | | | | | | lnaGs; dCs; | |
| | | | | | | | | | lnaCs; | |
| | | | | | | | | | dAs; lnaGs; | |
| | | | | | | | | | dG-Sup | |
| APOE- | 1.228391301 | 0.022809276 | APOE | in | Hep3B | 20 | qRTP | ACACA | dAs; lnaCs; | APOE:1973U15 |
| 26 | | | | vitro | | | CR | GGAUG | dAs; lnaCs; | |
| | | | | | | | | CCAGG | dAs; lnaGs; | |
| | | | | | | | | | dGs; | |
| | | | | | | | | | lnaAs; dTs; | |
| | | | | | | | | | lnaGs; dCs; | |
| | | | | | | | | | lnaCs; | |
| | | | | | | | | | dAs; lnaGs; | |
| | | | | | | | | | dG-Sup | |
| APOE- | 0.46000791 | 0.079791665 | APOE | in | Hep3B | 50 | qRTP | ACACA | dAs; lnaCs; | APOE:1973U15 |
| 26 | | | | vitro | | | CR | GGAUG | dAs; lnaCs; | |
| | | | | | | | | CCAGG | dAs; lnaGs; | |
| | | | | | | | | | dGs; | |
| | | | | | | | | | lnaAs; dTs; | |
| | | | | | | | | | lnaGs; dCs; | |
| | | | | | | | | | lnaCs; | |
| | | | | | | | | | dAs; lnaGs; | |
| | | | | | | | | | dG-Sup | |
| APOE- | 1.156427535 | 0.108892582 | APOE | in | HepG2 | 20 | qRTP | ACACA | dAs; lnaCs; | APOE:1973U15 |
| 26 | | | | vitro | | | CR | GGAUG | dAs; lnaCs; | |
| | | | | | | | | CCAGG | dAs; lnaGs; | |
| | | | | | | | | | dGs; | |
| | | | | | | | | | lnaAs; dTs; | |
| | | | | | | | | | lnaGs; dCs; | |
| | | | | | | | | | lnaCs; | |
| | | | | | | | | | dAs; lnaGs; | |
| | | | | | | | | | dG-Sup | |
| APOE- | 2.110542105 | | APOE | in | HepG2 | 50 | qRTP | ACACA | dAs; lnaCs; | APOE:1973U15 |
| 26 | | | | vitro | | | CR | GGAUG | dAs; lnaCs; | |
| | | | | | | | | CCAGG | dAs; lnaGs; | |
| | | | | | | | | | dGs; | |
| | | | | | | | | | lnaAs; dTs; | |
| | | | | | | | | | lnaGs; dCs; | |
| | | | | | | | | | lnaCs; | |
| | | | | | | | | | dAs; lnaGs; | |
| | | | | | | | | | dG-Sup | |
| APOE- | 0.205243524 | 0.249589521 | APOE | in | Hep3B | 20 | qRTP | AACUG | dAs; lnaAs; | APOE:2069U15 |
| 27 | | | | vitro | | | CR | GCACU | dCs; lnaTs; | |
| | | | | | | | | GGGUC | dGs; lnaGs; | |
| | | | | | | | | | dCs; lnaAs; | |
| | | | | | | | | | dCs; | |
| | | | | | | | | | lnaTs; dGs; | |
| | | | | | | | | | lnaGs; | |
| | | | | | | | | | dGs; lnaTs; | |
| | | | | | | | | | dC- | |
| | | | | | | | | | Sup | |
| APOE- | 1.072201442 | 0.060435994 | APOE | in | Hep3B | 20 | qRTP | AACUG | dAs; lnaAs; | APOE:2069U15 |
| 27 | | | | vitro | | | CR | GCACU | dCs; lnaTs; | |
| | | | | | | | | GGGUC | dGs; lnaGs; | |
| | | | | | | | | | dCs; lnaAs; | |
| | | | | | | | | | dCs; | |
| | | | | | | | | | lnaTs; dGs; | |
| | | | | | | | | | lnaGs; | |
| | | | | | | | | | dGs; lnaTs; | |
| | | | | | | | | | dC- | |
| | | | | | | | | | Sup | |
| APOE- | 0.422233664 | 0.049278942 | APOE | in | Hep3B | 50 | qRTP | AACUG | dAs; lnaAs; | APOE:2069U15 |
| 27 | | | | vitro | | | CR | GCACU | dCs; lnaTs; | |
| | | | | | | | | GGGUC | dGs; lnaGs; | |
| | | | | | | | | | dCs; lnaAs; | |
| | | | | | | | | | dCs; | |
| | | | | | | | | | lnaTs; dGs; | |
| | | | | | | | | | lnaGs; | |
| | | | | | | | | | dGs; lnaTs; | |
| | | | | | | | | | dC- | |
| | | | | | | | | | Sup | |
| APOE- | 1.051983717 | 0.018521495 | APOE | in | RPTEC | 10 | qRTP | AACUG | dAs; lnaAs; | APOE:2069U15 |
| 27 | | | | vitro | | | CR | GCACU | dCs; lnaTs; | |
| | | | | | | | | GGGUC | dGs; lnaGs; | |
| | | | | | | | | | dCs; lnaAs; | |
| | | | | | | | | | dCs; | |
| | | | | | | | | | lnaTs; dGs; | |
| | | | | | | | | | lnaGs; | |
| | | | | | | | | | dGs; lnaTs; | |
| | | | | | | | | | dC- | |
| | | | | | | | | | Sup | |
| APOE- | 1.093382418 | 0.01047124 | APOE | in | RPTEC | 30 | qRTP | AACUG | dAs; lnaAs; | APOE:2069U15 |
| 27 | | | | vitro | | | CR | GCACU | dCs; lnaTs; | |
| | | | | | | | | GGGUC | dGs; lnaGs; | |
| | | | | | | | | | dCs; lnaAs; | |
| | | | | | | | | | dCs; | |
| | | | | | | | | | lnaTs; dGs; | |
| | | | | | | | | | lnaGs; | |
| | | | | | | | | | dGs; lnaTs; | |
| | | | | | | | | | dC- | |
| | | | | | | | | | Sup | |
| APOE- | 1.072201442 | 0.059932746 | APOE | in | Hep3B | 20 | qRTP | AACUG | dAs; lnaAs; | APOE:2069U15 |
| 27 | | | | vitro | | | CR | GCACU | dCs; lnaTs; | |
| | | | | | | | | GGGUC | dGs; lnaGs; | |
| | | | | | | | | | dCs; lnaAs; | |
| | | | | | | | | | dCs; | |
| | | | | | | | | | lnaTs; dGs; | |
| | | | | | | | | | lnaGs; | |
| | | | | | | | | | dGs; lnaTs; | |
| | | | | | | | | | dC- | |
| | | | | | | | | | Sup | |
| APOE- | 0.422233664 | 0.049032095 | APOE | in | Hep3B | 50 | qRTP | AACUG | dAs; lnaAs; | APOE:2069U15 |
| 27 | | | | vitro | | | CR | GCACU | dCs; lnaTs; | |
| | | | | | | | | GGGUC | dGs; lnaGs; | |
| | | | | | | | | | dCs; lnaAs; | |
| | | | | | | | | | dCs; | |
| | | | | | | | | | lnaTs; dGs; | |
| | | | | | | | | | lnaGs; | |
| | | | | | | | | | dGs; lnaTs; | |
| | | | | | | | | | dC- | |
| | | | | | | | | | Sup | |
| APOE- | 0.750254584 | 0.054252319 | APOE | in | HepG2 | 20 | qRTP | AACUG | dAs; lnaAs; | APOE:2069U15 |
| 27 | | | | vitro | | | CR | GCACU | dCs; lnaTs; | |
| | | | | | | | | GGGUC | dGs; lnaGs; | |
| | | | | | | | | | dCs; lnaAs; dCs; | |
| | | | | | | | | | lnaTs; dGs; | |
| | | | | | | | | | lnaGs; | |
| | | | | | | | | | dGs; lnaTs; | |
| | | | | | | | | | dC- | |
| | | | | | | | | | Sup | |
| APOE- | 1.988067738 | NA | APOE | in | HepG2 | 50 | qRTP | AACUG | dAs; lnaAs; | APOE:2069U15 |
| 27 | | | | vitro | | | CR | GCACU | dCs; lnaTs; | |
| | | | | | | | | GGGUC | dGs; lnaGs; | |
| | | | | | | | | | dCs; lnaAs; | |
| | | | | | | | | | dCs; | |
| | | | | | | | | | lnaTs; dGs; | |
| | | | | | | | | | lnaGs; | |
| | | | | | | | | | dGs; lnaTs; | |
| | | | | | | | | | dC- | |
| | | | | | | | | | Sup | |
| APOE- | 0.629123339 | 0.651636365 | APOE | in | Hep3B | 20 | qRTP | UUACC | dTs; lnaTs; | APOE:2094U15 |
| 28 | | | | vitro | | | CR | UGCGC | dAs; lnaCs; | |
| | | | | | | | | UGGGU | dCs; lnaTs; | |
| | | | | | | | | | dGs; lnaCs; | |
| | | | | | | | | | dGs; | |
| | | | | | | | | | lnaCs; dTs; | |
| | | | | | | | | | lnaGs; dGs; | |
| | | | | | | | | | lnaGs; | |
| | | | | | | | | | dT-Sup | |
| APOE- | 1.160458362 | 0.036884595 | APOE | in | Hep3B | 20 | qRTP | UUACC | dTs; lnaTs; | APOE:2094U15 |
| 28 | | | | vitro | | | CR | UGCGC | dAs; lnaCs; | |
| | | | | | | | | UGGGU | dCs; lnaTs; | |
| | | | | | | | | | dGs; lnaCs; | |
| | | | | | | | | | dGs; | |
| | | | | | | | | | lnaCs; dTs; | |
| | | | | | | | | | lnaGs; dGs; | |
| | | | | | | | | | lnaGs; | |
| | | | | | | | | | dT-Sup | |
| APOE- | 0.604177822 | 0.079454058 | APOE | in | Hep3B | 50 | qRTP | UUACC | dTs; lnaTs; | APOE:2094U15 |
| 28 | | | | vitro | | | CR | UGCGC | dAs; lnaCs; | |
| | | | | | | | | UGGGU | dCs; lnaTs; | |
| | | | | | | | | | dGs; lnaCs; | |
| | | | | | | | | | dGs; | |
| | | | | | | | | | lnaCs; dTs; | |
| | | | | | | | | | lnaGs; dGs; | |
| | | | | | | | | | lnaGs; | |
| | | | | | | | | | dT-Sup | |
| APOE- | 2.0947881 | 0.145229516 | APOE | in | RPTEC | 10 | qRTP | UUACC | dTs; lnaTs; | APOE:2094U15 |
| 28 | | | | vitro | | | CR | UGCGC | dAs; lnaCs; | |
| | | | | | | | | UGGGU | dCs; lnaTs; | |
| | | | | | | | | | dGs; lnaCs; | |
| | | | | | | | | | dGs; | |
| | | | | | | | | | lnaCs; dTs; | |
| | | | | | | | | | lnaGs; dGs; | |
| | | | | | | | | | lnaGs; | |
| | | | | | | | | | dT-Sup | |
| APOE- | 5.051887728 | 0.141852973 | APOE | in | RPTEC | 30 | qRTP | UUACC | dTs; lnaTs; | APOE:2094U15 |
| 28 | | | | vitro | | | CR | UGCGC | dAs; lnaCs; | |
| | | | | | | | | UGGGU | dCs; lnaTs; | |
| | | | | | | | | | dGs; lnaCs; | |
| | | | | | | | | | dGs; | |
| | | | | | | | | | lnaCs; dTs; | |
| | | | | | | | | | lnaGs; dGs; | |
| | | | | | | | | | lnaGs; | |
| | | | | | | | | | dT-Sup | |
| APOE- | 1.160458362 | 0.036577459 | APOE | in | Hep3B | 20 | qRTP | UUACC | dTs; lnaTs; | APOE:2094U15 |
| 28 | | | | vitro | | | CR | UGCGC | dAs; lnaCs; | |
| | | | | | | | | UGGGU | dCs; lnaTs; | |
| | | | | | | | | | dGs; lnaCs; | |
| | | | | | | | | | dGs; | |
| | | | | | | | | | lnaCs; dTs; | |
| | | | | | | | | | lnaGs; dGs; | |
| | | | | | | | | | lnaGs; | |
| | | | | | | | | | dT-Sup | |
| APOE- | 0.604177822 | 0.079056057 | APOE | in | Hep3B | 50 | qRTP | UUACC | dTs; lnaTs; | APOE:2094U15 |
| 28 | | | | vitro | | | CR | UGCGC | dAs; lnaCs; | |
| | | | | | | | | UGGGU | dCs; lnaTs; | |
| | | | | | | | | | dGs; lnaCs; | |
| | | | | | | | | | dGs; | |
| | | | | | | | | | lnaCs; dTs; | |
| | | | | | | | | | lnaGs; dGs; | |
| | | | | | | | | | lnaGs; | |
| | | | | | | | | | dT-Sup | |
| APOE- | 0.947991451 | 0.026666978 | APOE | in | HepG2 | 20 | qRTP | UUACC | dTs; lnaTs; | APOE:2094U15 |
| 28 | | | | vitro | | | CR | UGCGC | dAs; lnaCs; | |
| | | | | | | | | UGGGU | dCs; lnaTs; | |
| | | | | | | | | | dGs; lnaCs; | |
| | | | | | | | | | dGs; | |
| | | | | | | | | | lnaCs; dTs; | |
| | | | | | | | | | lnaGs; dGs; | |
| | | | | | | | | | lnaGs; | |
| | | | | | | | | | dT-Sup | |
| APOE- | 2.506754416 | 0.13376828 | APOE | in | HepG2 | 50 | qRTP | UUACC | dTs; lnaTs; | APOE:2094U15 |
| 28 | | | | vitro | | | CR | UGCGC | dAs; lnaCs; | |
| | | | | | | | | UGGGU | dCs; lnaTs; | |
| | | | | | | | | | dGs; lnaCs; | |
| | | | | | | | | | dGs; | |
| | | | | | | | | | lnaCs; dTs; | |
| | | | | | | | | | lnaGs; dGs; | |
| | | | | | | | | | lnaGs; | |
| | | | | | | | | | dT-Sup | |
| APOE- | 0.37179762 | 0.23541386 | APOE | in | Hep3B | 20 | qRTP | UGGUG | dTs; lnaGs; | APOE:3587L15 |
| 29 | | | | vitro | | | CR | AAUCU | dGs; lnaTs; | |
| | | | | | | | | UUAUU | dGs; lnaAs; | |
| | | | | | | | | | dAs; lnaTs; | |
| | | | | | | | | | dCs; | |
| | | | | | | | | | lnaTs; dTs; | |
| | | | | | | | | | lnaTs; dAs; | |
| | | | | | | | | | lnaTs; | |
| | | | | | | | | | dT-Sup | |
| APOE- | 0.760630038 | 0.050388588 | APOE | in | Hep3B | 20 | qRTP | UGGUG | dTs; lnaGs; | APOE:3587L15 |
| 29 | | | | vitro | | | CR | AAUCU | dGs; lnaTs; | |
| | | | | | | | | UUAUU | dGs; lnaAs; | |
| | | | | | | | | | dAs; lnaTs; | |
| | | | | | | | | | dCs; | |
| | | | | | | | | | lnaTs; dTs; | |
| | | | | | | | | | lnaTs; dAs; | |
| | | | | | | | | | lnaTs; | |
| | | | | | | | | | dT-Sup | |
| APOE- | 0.501049705 | 0.057454987 | APOE | in | Hep3B | 50 | qRTP | UGGUG | dTs; lnaGs; | APOE:3587L15 |
| 29 | | | | vitro | | | CR | AAUCU | dGs; lnaTs; | |
| | | | | | | | | UUAUU | dGs; lnaAs; | |
| | | | | | | | | | dAs; lnaTs; | |
| | | | | | | | | | dCs; | |
| | | | | | | | | | lnaTs; dTs; | |
| | | | | | | | | | lnaTs; dAs; | |
| | | | | | | | | | lnaTs; | |
| | | | | | | | | | dT-Sup | |
| APOE- | 1.111524648 | 0.053143882 | APOE | in | RPTEC | 10 | qRTP | UGGUG | dTs; lnaGs; | APOE:3587L15 |
| 29 | | | | vitro | | | CR | AAUCU | dGs; lnaTs; | |
| | | | | | | | | UUAUU | dGs; lnaAs; | |
| | | | | | | | | | dAs; lnaTs; | |
| | | | | | | | | | dCs; | |
| | | | | | | | | | lnaTs; dTs; | |
| | | | | | | | | | lnaTs; dAs; | |
| | | | | | | | | | lnaTs; | |
| | | | | | | | | | dT-Sup | |
| APOE- | 1.132791949 | 0.051334925 | APOE | in | RPTEC | 30 | qRTP | UGGUG | dTs; lnaGs; | APOE:3587L15 |
| 29 | | | | vitro | | | CR | AAUCU | dGs; lnaTs; | |
| | | | | | | | | UUAUU | dGs; lnaAs; | |
| | | | | | | | | | dAs; lnaTs; | |
| | | | | | | | | | dCs; | |
| | | | | | | | | | lnaTs; dTs; | |
| | | | | | | | | | lnaTs; dAs; | |
| | | | | | | | | | lnaTs; | |
| | | | | | | | | | dT-Sup | |
| APOE- | 0.760630038 | 0.049969004 | APOE | in | Hep3B | 20 | qRTP | UGGUG | dTs; lnaGs; | APOE:3587L15 |
| 29 | | | | vitro | | | CR | AAUCU | dGs; lnaTs; | |
| | | | | | | | | UUAUU | dGs; lnaAs; | |
| | | | | | | | | | dAs; lnaTs; | |
| | | | | | | | | | dCs; | |
| | | | | | | | | | lnaTs; dTs; | |
| | | | | | | | | | lnaTs; dAs; | |
| | | | | | | | | | lnaTs; | |
| | | | | | | | | | dT-Sup | |
| APOE- | 0.501049705 | 0.057167184 | APOE | in | Hep3B | 50 | qRTP | UGGUG | dTs; lnaGs; | APOE:3587L15 |
| 29 | | | | vitro | | | CR | AAUCU | dGs; lnaTs; | |
| | | | | | | | | UUAUU | dGs; lnaAs; | |
| | | | | | | | | | dAs; lnaTs; | |
| | | | | | | | | | dCs; | |
| | | | | | | | | | lnaTs; dTs; | |
| | | | | | | | | | lnaTs; dAs; | |
| | | | | | | | | | lnaTs; | |
| | | | | | | | | | dT-Sup | |
| APOE- | 0.558760661 | 0.035618301 | APOE | in | HepG2 | 20 | qRTP | UGGUG | dTs; lnaGs; | APOE:3587L15 |
| 29 | | | | vitro | | | CR | AAUCU | dGs; lnaTs; | |
| | | | | | | | | UUAUU | dGs; lnaAs; | |
| | | | | | | | | | dAs; lnaTs; | |
| | | | | | | | | | dCs; | |
| | | | | | | | | | lnaTs; dTs; | |
| | | | | | | | | | lnaTs; dAs; | |
| | | | | | | | | | lnaTs; | |
| | | | | | | | | | dT-Sup | |
| APOE- | 1.58582416 | 0.0267414 | APOE | in | HepG2 | 50 | qRTP | UGGUG | dTs; lnaGs; | APOE:3587L15 |
| 29 | | | | vitro | | | CR | AAUCU | dGs; lnaTs; | |
| | | | | | | | | UUAUU | dGs; lnaAs; | |
| | | | | | | | | | dAs; lnaTs; | |
| | | | | | | | | | dCs; | |
| | | | | | | | | | lnaTs; dTs; | |
| | | | | | | | | | lnaTs; dAs; | |
| | | | | | | | | | lnaTs; | |
| | | | | | | | | | dT-Sup | |
| APOE- | 0.220699427 | 0.117913183 | APOE | in | Hep3B | 20 | qRTP | GCAGA | dGs; lnaCs; | APOE:3655L15 |
| 30 | | | | vitro | | | CR | AAGAG | dAs; lnaGs; | |
| | | | | | | | | AAACU | dAs; lnaAs; | |
| | | | | | | | | | dAs; | |
| | | | | | | | | | lnaGs; dAs; | |
| | | | | | | | | | lnaGs; | |
| | | | | | | | | | dAs; lnaAs; | |
| | | | | | | | | | dAs; lnaCs; | |
| | | | | | | | | | dT- | |
| | | | | | | | | | Sup | |
| APOE- | 1.019360672 | 0.078391217 | APOE | in | Hep3B | 20 | qRTP | GCAGA | dGs; lnaCs; | APOE:3655L15 |
| 30 | | | | vitro | | | CR | AAGAG | dAs; lnaGs; | |
| | | | | | | | | AAACU | dAs; lnaAs; | |
| | | | | | | | | | dAs; | |
| | | | | | | | | | lnaGs; dAs; | |
| | | | | | | | | | lnaGs; | |
| | | | | | | | | | dAs; lnaAs; | |
| | | | | | | | | | dAs; lnaCs; | |
| | | | | | | | | | dT- | |
| | | | | | | | | | Sup | |
| APOE- | 0.659541805 | 0.015528833 | APOE | in | Hep3B | 50 | qRTP | GCAGA | dGs; lnaCs; | APOE:3655L15 |
| 30 | | | | vitro | | | CR | AAGAG | dAs; lnaGs; | |
| | | | | | | | | AAACU | dAs; lnaAs; | |
| | | | | | | | | | dAs; | |
| | | | | | | | | | lnaGs; dAs; | |
| | | | | | | | | | lnaGs; | |
| | | | | | | | | | dAs; lnaAs; | |
| | | | | | | | | | dAs; lnaCs; | |
| | | | | | | | | | dT- | |
| | | | | | | | | | Sup | |
| APOE- | 1.264135906 | 0.122454767 | APOE | in | RPTEC | 10 | qRTP | GCAGA | dGs; lnaCs; | APOE:3655L15 |
| 30 | | | | vitro | | | CR | AAGAG | dAs; lnaGs; | |
| | | | | | | | | AAACU | dAs; lnaAs; | |
| | | | | | | | | | dAs; | |
| | | | | | | | | | lnaGs; dAs; | |
| | | | | | | | | | lnaGs; | |
| | | | | | | | | | dAs; lnaAs; | |
| | | | | | | | | | dAs; lnaCs; | |
| | | | | | | | | | dT- | |
| | | | | | | | | | Sup | |
| APOE- | 1.471913685 | 0.032363779 | APOE | in | RPTEC | 30 | qRTP | GCAGA | dGs; lnaCs; | APOE:3655L15 |
| 30 | | | | vitro | | | CR | AAGAG | dAs; lnaGs; | |
| | | | | | | | | AAACU | dAs; lnaAs; | |
| | | | | | | | | | dAs; | |
| | | | | | | | | | lnaGs; dAs; | |
| | | | | | | | | | lnaGs; | |
| | | | | | | | | | dAs; lnaAs; | |
| | | | | | | | | | dAs; lnaCs; | |
| | | | | | | | | | dT- | |
| | | | | | | | | | Sup | |
| APOE- | 1.019360672 | 0.077738458 | APOE | in | Hep3B | 20 | qRTP | GCAGA | dGs; lnaCs; | APOE:3655L15 |
| 30 | | | | vitro | | | CR | AAGAG | dAs; lnaGs; | |
| | | | | | | | | AAACU | dAs; lnaAs; | |
| | | | | | | | | | dAs; | |
| | | | | | | | | | lnaGs; dAs; | |
| | | | | | | | | | lnaGs; | |
| | | | | | | | | | dAs; lnaAs; | |
| | | | | | | | | | dAs; lnaCs; | |
| | | | | | | | | | dT- | |
| | | | | | | | | | Sup | |
| APOE- | 0.659541805 | 0.015451046 | APOE | in | Hep3B | 50 | qRTP | GCAGA | dGs; lnaCs; | APOE:3655L15 |
| 30 | | | | vitro | | | CR | AAGAG | dAs; lnaGs; | |
| | | | | | | | | AAACU | dAs; lnaAs; | |
| | | | | | | | | | dAs; | |
| | | | | | | | | | lnaGs; dAs; | |
| | | | | | | | | | lnaGs; | |
| | | | | | | | | | dAs; lnaAs; | |
| | | | | | | | | | dAs; lnaCs; | |
| | | | | | | | | | dT- | |
| | | | | | | | | | Sup | |
| APOE- | 0.866210326 | 0.078688198 | APOE | in | HepG2 | 20 | qRTP | GCAGA | dGs; lnaCs; | APOE:3655L15 |
| 30 | | | | vitro | | | CR | AAGAG | dAs; lnaGs; | |
| | | | | | | | | AAACU | dAs; lnaAs; | |
| | | | | | | | | | dAs; | |
| | | | | | | | | | lnaGs; dAs; | |
| | | | | | | | | | lnaGs; | |
| | | | | | | | | | dAs; lnaAs; | |
| | | | | | | | | | dAs; lnaCs; | |
| | | | | | | | | | dT- | |
| | | | | | | | | | Sup | |
| APOE- | 2.734037175 | 0.373843054 | APOE | in | HepG2 | 50 | qRTP | GCAGA | dGs; lnaCs; | APOE:3655L15 |
| 30 | | | | vitro | | | CR | AAGAG | dAs; lnaGs; | |
| | | | | | | | | AAACU | dAs; lnaAs; | |
| | | | | | | | | | dAs; | |
| | | | | | | | | | lnaGs; dAs; | |
| | | | | | | | | | lnaGs; | |
| | | | | | | | | | dAs; lnaAs; | |
| | | | | | | | | | dAs; lnaCs; | |
| | | | | | | | | | dT- | |
| | | | | | | | | | Sup | |
| EPO-01 | 0.433878309 | 0.082557209 | EPO | in | HepG2 | 30 | qRTP | ACCGC | dAs; lnaCs; | EPO:21U15 |
| | | | | vitro | | | CR | GCCCG | dCs; lnaGs; | |
| | | | | | | | | CUCUG | dCs; lnaGs; | |
| | | | | | | | | | dCs; lnaCs; | |
| | | | | | | | | | dCs; | |
| | | | | | | | | | lnaGs; dCs; | |
| | | | | | | | | | lnaTs; | |
| | | | | | | | | | dCs; lnaTs; | |
| | | | | | | | | | dG-Sup | |
| EPO-01 | 0.68032285 | 0.09679959 | EPO | in | HepG2 | 10 | qRTP | ACCGC | dAs; lnaCs; | EPO:21U15 |
| | | | | vitro | | | CR | GCCCG | dCs; lnaGs; | |
| | | | | | | | | CUCUG | dCs; lnaGs; | |
| | | | | | | | | | dCs; lnaCs; | |
| | | | | | | | | | dCs; | |
| | | | | | | | | | lnaGs; dCs; | |
| | | | | | | | | | lnaTs; | |
| | | | | | | | | | dCs; lnaTs; | |
| | | | | | | | | | dG-Sup | |
| EPO-01 | 0.68032285 | 0.09679959 | EPO | in | HepG2 | 10 | qRTP | ACCGC | dAs; lnaCs; | EPO:21U15 |
| | | | | vitro | | | CR | GCCCG | dCs; lnaGs; | |
| | | | | | | | | CUCUG | dCs; lnaGs; | |
| | | | | | | | | | dCs; lnaCs; | |
| | | | | | | | | | dCs; | |
| | | | | | | | | | lnaGs; dCs; | |
| | | | | | | | | | lnaTs; | |
| | | | | | | | | | dCs; lnaTs; | |
| | | | | | | | | | dG-Sup | |
| EPO-01 | 0.433878309 | 0.082557209 | EPO | in | HepG2 | 30 | qRTP | ACCGC | dAs; lnaCs; | EPO:21U15 |
| | | | | vitro | | | CR | GCCCG | dCs; lnaGs; | |
| | | | | | | | | CUCUG | dCs; lnaGs; | |
| | | | | | | | | | dCs; lnaCs; | |
| | | | | | | | | | dCs; | |
| | | | | | | | | | lnaGs; dCs; | |
| | | | | | | | | | lnaTs; | |
| | | | | | | | | | dCs; lnaTs; | |
| | | | | | | | | | dG-Sup | |
| EPO-01 | 0.529310122 | 0.064701341 | EPO | in | Hep3B | 50 | qRTP | ACCGC | dAs; lnaCs; | EPO:21U15 |
| | | | | vitro | | | CR | GCCCG | dCs; lnaGs; | |
| | | | | | | | | CUCUG | dCs; lnaGs; | |
| | | | | | | | | | dCs; lnaCs; | |
| | | | | | | | | | dCs; | |
| | | | | | | | | | lnaGs; dCs; | |
| | | | | | | | | | lnaTs; | |
| | | | | | | | | | dCs; lnaTs; | |
| | | | | | | | | | dG-Sup | |
| EPO-01 | 0.718250944 | 0.194036993 | EPO | in | Hep3B | 100 | qRTP | ACCGC | dAs; lnaCs; | EPO:21U15 |
| | | | | vitro | | | CR | GCCCG | dCs; lnaGs; | |
| | | | | | | | | CUCUG | dCs; lnaGs; | |
| | | | | | | | | | dCs; lnaCs; | |
| | | | | | | | | | dCs; | |
| | | | | | | | | | lnaGs; dCs; | |
| | | | | | | | | | lnaTs; | |
| | | | | | | | | | dCs; lnaTs; | |
| | | | | | | | | | dG-Sup | |
| EPO-01 | 0.718250944 | 0.194036993 | EPO | in | Hep3B | 20 | qRTP | ACCGC | dAs; lnaCs; | EPO:21U15 |
| | | | | vitro | | | CR | GCCCG | dCs; lnaGs; | |
| | | | | | | | | CUCUG | dCs; lnaGs; | |
| | | | | | | | | | dCs; lnaCs; | |
| | | | | | | | | | dCs; | |
| | | | | | | | | | lnaGs; dCs; | |
| | | | | | | | | | lnaTs; | |
| | | | | | | | | | dCs; lnaTs; | |
| | | | | | | | | | dG-Sup | |
| EPO-01 | 0.529310122 | 0.064701341 | EPO | in | Hep3B | 50 | qRTP | ACCGC | dAs; lnaCs; | EPO:21U15 |
| | | | | vitro | | | CR | GCCCG | dCs; lnaGs; | |
| | | | | | | | | CUCUG | dCs; lnaGs; | |
| | | | | | | | | | dCs; lnaCs; | |
| | | | | | | | | | dCs; | |
| | | | | | | | | | lnaGs; dCs; | |
| | | | | | | | | | lnaTs; | |
| | | | | | | | | | dCs; lnaTs; | |
| | | | | | | | | | dG-Sup | |
| EPO-01 | 1.00184379 | 0.093159338 | EPO | in | HepG2 | 20 | qRTP | ACCGC | dAs; lnaCs; | EPO:21U15 |
| | | | | vitro | | | CR | GCCCG | dCs; lnaGs; | |
| | | | | | | | | CUCUG | dCs; lnaGs; | |
| | | | | | | | | | dCs; lnaCs; | |
| | | | | | | | | | dCs; | |
| | | | | | | | | | lnaGs; dCs; | |
| | | | | | | | | | lnaTs; | |
| | | | | | | | | | dCs; lnaTs; | |
| | | | | | | | | | dG-Sup | |
| EPO-01 | 2.046967989 | 0.127817675 | EPO | in | HepG2 | 50 | qRTP | ACCGC | dAs; lnaCs; | EPO:21U15 |
| | | | | vitro | | | CR | GCCCG | dCs; lnaGs; | |
| | | | | | | | | CUCUG | dCs; lnaGs; | |
| | | | | | | | | | dCs; lnaCs; | |
| | | | | | | | | | dCs; | |
| | | | | | | | | | lnaGs; dCs; | |
| | | | | | | | | | lnaTs; | |
| | | | | | | | | | dCs; lnaTs; | |
| | | | | | | | | | dG-Sup | |
| EPO-02 | 0.566370936 | 0.120219729 | EPO | in | HepG2 | 30 | qRTP | ACACCG | dAs; lnaCs; | EPO:41U15 |
| | | | | vitro | | | CR | CGCCCC | dAs; lnaCs; | |
| | | | | | | | | CUG | dCs; lnaGs; | |
| | | | | | | | | | dCs; lnaGs; | |
| | | | | | | | | | dCs; | |
| | | | | | | | | | lnaCs; dCs; | |
| | | | | | | | | | lnaCs; dCs; | |
| | | | | | | | | | lnaTs; | |
| | | | | | | | | | dG-Sup | |
| EPO-02 | 0.526585286 | 0.045423849 | EPO | in | HepG2 | 10 | qRTP | ACACCG | dAs; lnaCs; | EPO:41U15 |
| | | | | vitro | | | CR | CGCCCC | dAs; lnaCs; | |
| | | | | | | | | CUG | dCs; lnaGs; | |
| | | | | | | | | | dCs; lnaGs; | |
| | | | | | | | | | dCs; | |
| | | | | | | | | | lnaCs; dCs; | |
| | | | | | | | | | lnaCs; dCs; | |
| | | | | | | | | | lnaTs; | |
| | | | | | | | | | dG-Sup | |
| EPO-02 | 0.526585286 | 0.045423849 | EPO | in | HepG2 | 10 | qRTP | ACACCG | dAs; lnaCs; | EPO:41U15 |
| | | | | vitro | | | CR | CGCCCC | dAs; lnaCs; | |
| | | | | | | | | CUG | dCs; lnaGs; | |
| | | | | | | | | | dCs; lnaGs; | |
| | | | | | | | | | dCs; | |
| | | | | | | | | | lnaCs; dCs; | |
| | | | | | | | | | lnaCs; dCs; | |
| | | | | | | | | | lnaTs; | |
| | | | | | | | | | dG-Sup | |
| EPO-02 | 0.566370936 | 0.120219729 | EPO | in | HepG2 | 30 | qRTP | ACACCG | dAs; lnaCs; | EPO:41U15 |
| | | | | vitro | | | CR | CGCCCC | dAs; lnaCs; | |
| | | | | | | | | CUG | dCs; lnaGs; | |
| | | | | | | | | | dCs; lnaGs; | |
| | | | | | | | | | dCs; | |
| | | | | | | | | | lnaCs; dCs; | |
| | | | | | | | | | lnaCs; dCs; | |
| | | | | | | | | | lnaTs; | |
| | | | | | | | | | dG-Sup | |
| EPO-02 | 0.301256725 | 0.03255204 | EPO | in | Hep3B | 50 | qRTP | ACACCG | dAs; lnaCs; | EPO:41U15 |
| | | | | vitro | | | CR | CGCCCC | dAs; lnaCs; | |
| | | | | | | | | CUG | dCs; lnaGs; | |
| | | | | | | | | | dCs; lnaGs; | |
| | | | | | | | | | dCs; | |
| | | | | | | | | | lnaCs; dCs; | |
| | | | | | | | | | lnaCs; dCs; | |
| | | | | | | | | | lnaTs; | |
| | | | | | | | | | dG-Sup | |
| EPO-02 | 0.480278444 | 0.003887435 | EPO | in | Hep3B | 100 | qRTP | ACACCG | dAs; lnaCs; | EPO:41U15 |
| | | | | vitro | | | CR | CGCCCC | dAs; lnaCs; | |
| | | | | | | | | CUG | dCs; lnaGs; | |
| | | | | | | | | | dCs; lnaGs; | |
| | | | | | | | | | dCs; | |
| | | | | | | | | | lnaCs; dCs; | |
| | | | | | | | | | lnaCs; dCs; | |
| | | | | | | | | | lnaTs; | |
| | | | | | | | | | dG-Sup | |
| EPO-02 | 0.480278444 | | EPO | in | Hep3B | 20 | qRTP | ACACCG | dAs; lnaCs; | EPO:41U15 |
| | | | | vitro | | | CR | CGCCCC | dAs; lnaCs; | |
| | | | | | | | | CUG | dCs; lnaGs; | |
| | | | | | | | | | dCs; lnaGs; | |
| | | | | | | | | | dCs; | |
| | | | | | | | | | lnaCs; dCs; | |
| | | | | | | | | | lnaCs; dCs; | |
| | | | | | | | | | lnaTs; | |
| | | | | | | | | | dG-Sup | |
| EPO-02 | 0.301256725 | | EPO | in | Hep3B | 50 | qRTP | ACACCG | dAs; lnaCs; | EPO:41U15 |
| | | | | vitro | | | CR | CGCCCC | dAs; lnaCs; | |
| | | | | | | | | CUG | dCs; lnaGs; | |
| | | | | | | | | | dCs; lnaGs; | |
| | | | | | | | | | dCs; | |
| | | | | | | | | | lnaCs; dCs; | |
| | | | | | | | | | lnaCs; dCs; | |
| | | | | | | | | | lnaTs; | |
| | | | | | | | | | dG-Sup | |
| EPO-02 | 1.396208116 | | EPO | in | HepG2 | 20 | qRTP | ACACCG | dAs; lnaCs; | EPO:41U15 |
| | | | | vitro | | | CR | CGCCCC | dAs; lnaCs; | |
| | | | | | | | | CUG | dCs; lnaGs; | |
| | | | | | | | | | dCs; lnaGs; | |
| | | | | | | | | | dCs; | |
| | | | | | | | | | lnaCs; dCs; | |
| | | | | | | | | | lnaCs; dCs; | |
| | | | | | | | | | lnaTs; | |
| | | | | | | | | | dG-Sup | |
| EPO-02 | 1.684863474 | | EPO | in | HepG2 | 50 | qRTP | ACACCG | dAs; lnaCs; | EPO:41U15 |
| | | | | vitro | | | CR | CGCCCC | dAs; lnaCs; | |
| | | | | | | | | CUG | dCs; lnaGs; | |
| | | | | | | | | | dCs; lnaGs; | |
| | | | | | | | | | dCs; | |
| | | | | | | | | | lnaCs; dCs; | |
| | | | | | | | | | lnaCs; dCs; | |
| | | | | | | | | | lnaTs; | |
| | | | | | | | | | dG-Sup | |
| EPO-03 | | | EPO | in | HepG2 | 30 | qRTP | ACCGC | lnaAs; lnaCs; | EPO:21U15 |
| | | | | vitro | | | CR | GCCCG | lnaCs; | |
| | | | | | | | | CUCUG | dGs; dCs; | |
| | | | | | | | | | dGs; dCs; | |
| | | | | | | | | | dCs; dCs; | |
| | | | | | | | | | dGs; dCs; | |
| | | | | | | | | | dTs; lnaCs; | |
| | | | | | | | | | lnaTs; lnaG- | |
| | | | | | | | | | Sup | |
| EPO-03 | 0.85637429 | 0.096194027 | EPO | in | HepG2 | 10 | qRTP | ACCGC | lnaAs; lnaCs; | EPO:21U15 |
| | | | | vitro | | | CR | GCCCG | lnaCs; | |
| | | | | | | | | CUCUG | dGs; dCs; | |
| | | | | | | | | | dGs; dCs; | |
| | | | | | | | | | dCs; dCs; | |
| | | | | | | | | | dGs; dCs; | |
| | | | | | | | | | dTs; lnaCs; | |
| | | | | | | | | | lnaTs; lnaG- | |
| | | | | | | | | | Sup | |
| EPO-03 | 0.85637429 | 0.096194027 | EPO | in | HepG2 | 10 | qRTP | ACCGC | lnaAs; lnaCs; | EPO:21U15 |
| | | | | vitro | | | CR | GCCCG | lnaCs; | |
| | | | | | | | | CUCUG | dGs; dCs; | |
| | | | | | | | | | dGs; dCs; | |
| | | | | | | | | | dCs; dCs; | |
| | | | | | | | | | dGs; dCs; | |
| | | | | | | | | | dTs; lnaCs; | |
| | | | | | | | | | lnaTs; lnaG- | |
| | | | | | | | | | Sup | |
| EPO-03 | 5.789551929 | 3.247491345 | EPO | in | HepG2 | 30 | qRTP | ACCGC | lnaAs; lnaCs; | EPO:21U15 |
| | | | | vitro | | | CR | GCCCG | lnaCs; | |
| | | | | | | | | CUCUG | dGs; dCs; | |
| | | | | | | | | | dGs; dCs; | |
| | | | | | | | | | dCs; dCs; | |
| | | | | | | | | | dGs; dCs; | |
| | | | | | | | | | dTs; lnaCs; | |
| | | | | | | | | | lnaTs; lnaG- | |
| | | | | | | | | | Sup | |
| EPO-03 | 1.981066956 | NA | EPO | in | Hep3B | 50 | qRTP | ACCGC | lnaAs; lnaCs; | EPO:21U15 |
| | | | | vitro | | | CR | GCCCG | lnaCs; | |
| | | | | | | | | CUCUG | dGs; dCs; | |
| | | | | | | | | | dGs; dCs; | |
| | | | | | | | | | dCs; dCs; | |
| | | | | | | | | | dGs; dCs; | |
| | | | | | | | | | dTs; lnaCs; | |
| | | | | | | | | | lnaTs; lnaG- | |
| | | | | | | | | | Sup | |
| EPO-03 | 7.863509998 | NA | EPO | in | Hep3B | 100 | qRTP | ACCGC | lnaAs; lnaCs; | EPO:21U15 |
| | | | | vitro | | | CR | GCCCG | lnaCs; | |
| | | | | | | | | CUCUG | dGs; dCs; | |
| | | | | | | | | | dGs; dCs; | |
| | | | | | | | | | dCs; dCs; | |
| | | | | | | | | | dGs; dCs; | |
| | | | | | | | | | dTs; lnaCs; | |
| | | | | | | | | | lnaTs; lnaG- | |
| | | | | | | | | | Sup | |
| EPO-03 | 7.863509998 | | EPO | in | Hep3B | 20 | qRTP | ACCGC | lnaAs; lnaCs; | EPO:21U15 |
| | | | | vitro | | | CR | GCCCG | lnaCs; | |
| | | | | | | | | CUCUG | dGs; dCs; | |
| | | | | | | | | | dGs; dCs; | |
| | | | | | | | | | dCs; dCs; | |
| | | | | | | | | | dGs; dCs; | |
| | | | | | | | | | dTs; lnaCs; | |
| | | | | | | | | | lnaTs; lnaG- | |
| | | | | | | | | | Sup | |
| EPO-03 | 1.981066956 | | EPO | in | Hep3B | 50 | qRTP | ACCGC | lnaAs; lnaCs; | EPO:21U15 |
| | | | | vitro | | | CR | GCCCG | lnaCs; | |
| | | | | | | | | CUCUG | dGs; dCs; | |
| | | | | | | | | | dGs; dCs; | |
| | | | | | | | | | dCs; dCs; | |
| | | | | | | | | | dGs; dCs; | |
| | | | | | | | | | dTs; lnaCs; | |
| | | | | | | | | | lnaTs; lnaG- | |
| | | | | | | | | | Sup | |
| EPO-03 | 1.193301835 | 0.23995076 | EPO | in | HepG2 | 20 | qRTP | ACCGC | lnaAs; lnaCs; | EPO:21U15 |
| | | | | vitro | | | CR | GCCCG | lnaCs; | |
| | | | | | | | | CUCUG | dGs; dCs; | |
| | | | | | | | | | dGs; dCs; | |
| | | | | | | | | | dCs; dCs; | |
| | | | | | | | | | dGs; dCs; | |
| | | | | | | | | | dTs; lnaCs; | |
| | | | | | | | | | lnaTs; lnaG- | |
| | | | | | | | | | Sup | |
| EPO-03 | 3.188879404 | 0.194349947 | EPO | in | HepG2 | 50 | qRTP | ACCGC | lnaAs; lnaCs; | EPO:21U15 |
| | | | | vitro | | | CR | GCCCG | lnaCs; | |
| | | | | | | | | CUCUG | dGs; dCs; | |
| | | | | | | | | | dGs; dCs; | |
| | | | | | | | | | dCs; dCs; | |
| | | | | | | | | | dGs; dCs; | |
| | | | | | | | | | dTs; lnaCs; | |
| | | | | | | | | | lnaTs; lnaG- | |
| | | | | | | | | | Sup | |
| EPO-04 | 2.640898922 | 0.141347145 | EPO | in | HepG2 | 30 | qRTP | AACAA | dAs; lnaAs; | EPO:2226U15 |
| | | | | vitro | | | CR | UCACU | dCs; lnaAs; | |
| | | | | | | | | GCUGA | dAs; lnaTs; | |
| | | | | | | | | | dCs; lnaAs; | |
| | | | | | | | | | dCs; | |
| | | | | | | | | | lnaTs; dGs; | |
| | | | | | | | | | lnaCs; | |
| | | | | | | | | | dTs; lnaGs; | |
| | | | | | | | | | dA-Sup | |
| EPO-04 | 1.578689504 | 0.094493145 | EPO | in | HepG2 | 10 | qRTP | AACAA | dAs; lnaAs; | EPO:2226U15 |
| | | | | vitro | | | CR | UCACU | dCs; lnaAs; | |
| | | | | | | | | GCUGA | dAs; lnaTs; | |
| | | | | | | | | | dCs; lnaAs; | |
| | | | | | | | | | dCs; | |
| | | | | | | | | | lnaTs; dGs; | |
| | | | | | | | | | lnaCs; | |
| | | | | | | | | | dTs; lnaGs; | |
| | | | | | | | | | dA-Sup | |
| EPO-04 | 1.578689504 | 0.094493145 | EPO | in | HepG2 | 10 | qRTP | AACAA | dAs; lnaAs; | EPO:2226U15 |
| | | | | vitro | | | CR | UCACU | dCs; lnaAs; | |
| | | | | | | | | GCUGA | dAs; lnaTs; | |
| | | | | | | | | | dCs; lnaAs; | |
| | | | | | | | | | dCs; | |
| | | | | | | | | | lnaTs; dGs; | |
| | | | | | | | | | lnaCs; | |
| | | | | | | | | | dTs; lnaGs; | |
| | | | | | | | | | dA-Sup | |
| EPO-04 | 2.640898922 | 0.141347145 | EPO | in | HepG2 | 30 | qRTP | AACAA | dAs; lnaAs; | EPO:2226U15 |
| | | | | vitro | | | CR | UCACU | dCs; lnaAs; | |
| | | | | | | | | GCUGA | dAs; lnaTs; | |
| | | | | | | | | | dCs; lnaAs; | |
| | | | | | | | | | dCs; | |
| | | | | | | | | | lnaTs; dGs; | |
| | | | | | | | | | lnaCs; | |
| | | | | | | | | | dTs; lnaGs; | |
| | | | | | | | | | dA-Sup | |
| EPO-04 | 5.832228266 | 0.858822895 | EPO | in | Hep3B | 50 | qRTP | AACAA | dAs; lnaAs; | EPO:2226U15 |
| | | | | vitro | | | CR | UCACU | dCs; lnaAs; | |
| | | | | | | | | GCUGA | dAs; lnaTs; | |
| | | | | | | | | | dCs; lnaAs; | |
| | | | | | | | | | dCs; | |
| | | | | | | | | | lnaTs; dGs; | |
| | | | | | | | | | lnaCs; | |
| | | | | | | | | | dTs; lnaGs; | |
| | | | | | | | | | dA-Sup | |
| EPO-04 | 8.574990254 | 0.691837695 | EPO | in | Hep3B | 100 | qRTP | AACAA | dAs; lnaAs; | EPO:2226U15 |
| | | | | vitro | | | CR | UCACU | dCs; lnaAs; | |
| | | | | | | | | GCUGA | dAs; lnaTs; | |
| | | | | | | | | | dCs; lnaAs; | |
| | | | | | | | | | dCs; | |
| | | | | | | | | | lnaTs; dGs; | |
| | | | | | | | | | lnaCs; | |
| | | | | | | | | | dTs; lnaGs; | |
| | | | | | | | | | dA-Sup | |
| EPO-04 | 8.574990254 | | EPO | in | Hep3B | 20 | qRTP | AACAA | dAs; lnaAs; | EPO:2226U15 |
| | | | | vitro | | | CR | UCACU | dCs; lnaAs; | |
| | | | | | | | | GCUGA | dAs; lnaTs; | |
| | | | | | | | | | dCs; lnaAs; | |
| | | | | | | | | | dCs; | |
| | | | | | | | | | lnaTs; dGs; | |
| | | | | | | | | | lnaCs; | |
| | | | | | | | | | dTs; lnaGs; | |
| | | | | | | | | | dA-Sup | |
| EPO-04 | 5.832228266 | 0.858822895 | EPO | in | Hep3B | 50 | qRTP | AACAA | dAs; lnaAs; | EPO:2226U15 |
| | | | | vitro | | | CR | UCACU | dCs; lnaAs; | |
| | | | | | | | | GCUGA | dAs; lnaTs; | |
| | | | | | | | | | dCs; lnaAs; | |
| | | | | | | | | | dCs; | |
| | | | | | | | | | lnaTs; dGs; | |
| | | | | | | | | | lnaCs; | |
| | | | | | | | | | dTs; lnaGs; | |
| | | | | | | | | | dA-Sup | |
| EPO-04 | 2.733618002 | 0.081200038 | EPO | in | HepG2 | 20 | qRTP | AACAA | dAs; lnaAs; | EPO:2226U15 |
| | | | | vitro | | | CR | UCACU | dCs; lnaAs; | |
| | | | | | | | | GCUGA | dAs; lnaTs; | |
| | | | | | | | | | dCs; lnaAs; | |
| | | | | | | | | | dCs; | |
| | | | | | | | | | lnaTs; dGs; | |
| | | | | | | | | | lnaCs; | |
| | | | | | | | | | dTs; lnaGs; | |
| | | | | | | | | | dA-Sup | |
| EPO-04 | 6.135866469 | | EPO | in | HepG2 | 50 | qRTP | AACAA | dAs; lnaAs; | EPO:2226U15 |
| | | | | vitro | | | CR | UCACU | dCs; lnaAs; | |
| | | | | | | | | GCUGA | dAs; lnaTs; | |
| | | | | | | | | | dCs; lnaAs; | |
| | | | | | | | | | dCs; | |
| | | | | | | | | | lnaTs; dGs; | |
| | | | | | | | | | lnaCs; | |
| | | | | | | | | | dTs; lnaGs; | |
| | | | | | | | | | dA-Sup | |
| EPO-04f | NA | NA | EPO | NA | NA | 0 | NA | AACAA | dAs; fluAs; | EPO:2226U15 |
| | | | | | | | | UCACU | dCs; fluAs; | |
| | | | | | | | | GCUGA | dAs; fluUs; | |
| | | | | | | | | | dCs; | |
| | | | | | | | | | fluAs; dCs; | |
| | | | | | | | | | fluUs; dGs; | |
| | | | | | | | | | fluCs; | |
| | | | | | | | | | dTs; fluGs; | |
| | | | | | | | | | dA-Sup | |
| EPO- | NA | NA | EPO | NA | NA | 0 | NA | AACAA | dAs; omeAs; | EPO:2226U15 |
| 04m | | | | | | | | UCACU | dCs; omeAs; | |
| | | | | | | | | GCUGA | dAs; | |
| | | | | | | | | | omeUs; | |
| | | | | | | | | | dCs; omeAs; | |
| | | | | | | | | | dCs; | |
| | | | | | | | | | omeUs; dGs; | |
| | | | | | | | | | omeCs; | |
| | | | | | | | | | dTs; omeGs; | |
| | | | | | | | | | dA- | |
| | | | | | | | | | Sup | |
| EPO-05 | 0.717470689 | 0.130176195 | EPO | in | HepG2 | 30 | qRTP | ACUCC | dAs; lnaCs; | EPO:2267U15 |
| | | | | vitro | | | CR | AAUUU | dTs; lnaCs; | |
| | | | | | | | | CCUCC | dCs; lnaAs; | |
| | | | | | | | | | dAs; lnaTs; | |
| | | | | | | | | | dTs; | |
| | | | | | | | | | lnaTs; dCs; | |
| | | | | | | | | | lnaCs; dTs; | |
| | | | | | | | | | lnaCs; | |
| | | | | | | | | | dC-Sup | |
| EPO-05 | 1.548304509 | 0.270802852 | EPO | in | HepG2 | 10 | qRTP | ACUCC | dAs; lnaCs; | EPO:2267U15 |
| | | | | vitro | | | CR | AAUUU | dTs; lnaCs; | |
| | | | | | | | | CCUCC | dCs; lnaAs; | |
| | | | | | | | | | dAs; lnaTs; | |
| | | | | | | | | | dTs; | |
| | | | | | | | | | lnaTs; dCs; | |
| | | | | | | | | | lnaCs; dTs; | |
| | | | | | | | | | lnaCs; | |
| | | | | | | | | | dC-Sup | |
| EPO-05 | 1.548304509 | 0.270802852 | EPO | in | HepG2 | 10 | qRTP | ACUCC | dAs; lnaCs; | EPO:2267U15 |
| | | | | vitro | | | CR | AAUUU | dTs; lnaCs; | |
| | | | | | | | | CCUCC | dCs; lnaAs; | |
| | | | | | | | | | dAs; lnaTs; | |
| | | | | | | | | | dTs; | |
| | | | | | | | | | lnaTs; dCs; | |
| | | | | | | | | | lnaCs; dTs; | |
| | | | | | | | | | lnaCs; | |
| | | | | | | | | | dC-Sup | |
| EPO-05 | 0.717470689 | 0.130176195 | EPO | in | HepG2 | 30 | qRTP | ACUCC | dAs; lnaCs; | EPO:2267U15 |
| | | | | vitro | | | CR | AAUUU | dTs; lnaCs; | |
| | | | | | | | | CCUCC | dCs; lnaAs; | |
| | | | | | | | | | dAs; lnaTs; | |
| | | | | | | | | | dTs; | |
| | | | | | | | | | lnaTs; dCs; | |
| | | | | | | | | | lnaCs; dTs; | |
| | | | | | | | | | lnaCs; | |
| | | | | | | | | | dC-Sup | |
| EPO-05 | 0.216228139 | 0.092090503 | EPO | in | Hep3B | 50 | qRTP | ACUCC | dAs; lnaCs; | EPO:2267U15 |
| | | | | vitro | | | CR | AAUUU | dTs; lnaCs; | |
| | | | | | | | | CCUCC | dCs; lnaAs; | |
| | | | | | | | | | dAs; lnaTs; | |
| | | | | | | | | | dTs; | |
| | | | | | | | | | lnaTs; dCs; | |
| | | | | | | | | | lnaCs; dTs; | |
| | | | | | | | | | lnaCs; | |
| | | | | | | | | | dC-Sup | |
| EPO-05 | 0.396777066 | 0.256714 | EPO | in | Hep3B | 100 | qRTP | ACUCC | dAs; lnaCs; | EPO:2267U15 |
| | | | | vitro | | | CR | AAUUU | dTs; lnaCs; | |
| | | | | | | | | CCUCC | dCs; lnaAs; | |
| | | | | | | | | | dAs; lnaTs; | |
| | | | | | | | | | dTs; | |
| | | | | | | | | | lnaTs; dCs; | |
| | | | | | | | | | lnaCs; dTs; | |
| | | | | | | | | | lnaCs; | |
| | | | | | | | | | dC-Sup | |
| EPO-05 | 0.396777066 | 0.256714 | EPO | in | Hep3B | 20 | qRTP | ACUCC | dAs; lnaCs; | EPO:2267U15 |
| | | | | vitro | | | CR | AAUUU | dTs; lnaCs; | |
| | | | | | | | | CCUCC | dCs; lnaAs; | |
| | | | | | | | | | dAs; lnaTs; | |
| | | | | | | | | | dTs; | |
| | | | | | | | | | lnaTs; dCs; | |
| | | | | | | | | | lnaCs; dTs; | |
| | | | | | | | | | lnaCs; | |
| | | | | | | | | | dC-Sup | |
| EPO-05 | 0.216228139 | 0.092090503 | EPO | in | Hep3B | 50 | qRTP | ACUCC | dAs; lnaCs; | EPO:2267U15 |
| | | | | vitro | | | CR | AAUUU | dTs; lnaCs; | |
| | | | | | | | | CCUCC | dCs; lnaAs; | |
| | | | | | | | | | dAs; lnaTs; | |
| | | | | | | | | | dTs; | |
| | | | | | | | | | lnaTs; dCs; | |
| | | | | | | | | | lnaCs; dTs; | |
| | | | | | | | | | lnaCs; | |
| | | | | | | | | | dC-Sup | |
| EPO-05 | 1.40637926 | 0.212983992 | EPO | in | HepG2 | 20 | qRTP | ACUCC | dAs; lnaCs; | EPO:2267U15 |
| | | | | vitro | | | CR | AAUUU | dTs; lnaCs; | |
| | | | | | | | | CCUCC | dCs; lnaAs; | |
| | | | | | | | | | dAs; lnaTs; | |
| | | | | | | | | | dTs; | |
| | | | | | | | | | lnaTs; dCs; | |
| | | | | | | | | | lnaCs; dTs; | |
| | | | | | | | | | lnaCs; | |
| | | | | | | | | | dC-Sup | |
| EPO-05 | 4.210138016 | 0.145443181 | EPO | in | HepG2 | 50 | qRTP | ACUCC | dAs; lnaCs; | EPO:2267U15 |
| | | | | vitro | | | CR | AAUUU | dTs; lnaCs; | |
| | | | | | | | | CCUCC | dCs; lnaAs; | |
| | | | | | | | | | dAs; lnaTs; | |
| | | | | | | | | | dTs; | |
| | | | | | | | | | lnaTs; dCs; | |
| | | | | | | | | | lnaCs; dTs; | |
| | | | | | | | | | lnaCs; | |
| | | | | | | | | | dC-Sup | |
| EPO-06 | 1.011702008 | 0.076196089 | EPO | in | HepG2 | 30 | qRTP | AGCUG | dAs; lnaGs; | EPO:2288U15 |
| | | | | vitro | | | CR | AAGCU | dCs; lnaTs; | |
| | | | | | | | | GUACA | dGs; lnaAs; | |
| | | | | | | | | | dAs; lnaGs; | |
| | | | | | | | | | dCs; | |
| | | | | | | | | | lnaTs; dGs; | |
| | | | | | | | | | lnaTs; | |
| | | | | | | | | | dAs; lnaCs; | |
| | | | | | | | | | dA-Sup | |
| EPO-06 | 1.170137535 | 0.19662492 | EPO | in | HepG2 | 10 | qRTP | AGCUG | dAs; lnaGs; | EPO:2288U15 |
| | | | | vitro | | | CR | AAGCU | dCs; lnaTs; | |
| | | | | | | | | GUACA | dGs; lnaAs; | |
| | | | | | | | | | dAs; lnaGs; | |
| | | | | | | | | | dCs; | |
| | | | | | | | | | lnaTs; dGs; | |
| | | | | | | | | | lnaTs; | |
| | | | | | | | | | dAs; lnaCs; | |
| | | | | | | | | | dA-Sup | |
| EPO-06 | 1.170137535 | 0.19662492 | EPO | in | HepG2 | 10 | qRTP | AGCUG | dAs; lnaGs; | EPO:2288U15 |
| | | | | vitro | | | CR | AAGCU | dCs; lnaTs; | |
| | | | | | | | | GUACA | dGs; lnaAs; | |
| | | | | | | | | | dAs; lnaGs; | |
| | | | | | | | | | dCs; | |
| | | | | | | | | | lnaTs; dGs; | |
| | | | | | | | | | lnaTs; | |
| | | | | | | | | | dAs; lnaCs; | |
| | | | | | | | | | dA-Sup | |
| EPO-06 | 1.011702008 | 0.076196089 | EPO | in | HepG2 | 30 | qRTP | AGCUG | dAs; lnaGs; | EPO:2288U15 |
| | | | | vitro | | | CR | AAGCU | dCs; lnaTs; | |
| | | | | | | | | GUACA | dGs; lnaAs; | |
| | | | | | | | | | dAs; lnaGs; | |
| | | | | | | | | | dCs; | |
| | | | | | | | | | lnaTs; dGs; | |
| | | | | | | | | | lnaTs; | |
| | | | | | | | | | dAs; lnaCs; | |
| | | | | | | | | | dA-Sup | |
| EPO-06 | 1.588265502 | 0.151033057 | EPO | in | Hep3B | 50 | qRTP | AGCUG | dAs; lnaGs; | EPO:2288U15 |
| | | | | vitro | | | CR | AAGCU | dCs; lnaTs; | |
| | | | | | | | | GUACA | dGs; lnaAs; | |
| | | | | | | | | | dAs; lnaGs; | |
| | | | | | | | | | dCs; | |
| | | | | | | | | | lnaTs; dGs; | |
| | | | | | | | | | lnaTs; | |
| | | | | | | | | | dAs; lnaCs; | |
| | | | | | | | | | dA-Sup | |
| EPO-06 | 3.511023756 | 0.210360851 | EPO | in | Hep3B | 100 | qRTP | AGCUG | dAs; lnaGs; | EPO:2288U15 |
| | | | | vitro | | | CR | AAGCU | dCs; lnaTs; | |
| | | | | | | | | GUACA | dGs; lnaAs; | |
| | | | | | | | | | dAs; lnaGs; | |
| | | | | | | | | | dCs; | |
| | | | | | | | | | lnaTs; dGs; | |
| | | | | | | | | | lnaTs; | |
| | | | | | | | | | dAs; lnaCs; | |
| | | | | | | | | | dA-Sup | |
| EPO-06 | 3.511023756 | 0.210360851 | EPO | in | Hep3B | 20 | qRTP | AGCUG | dAs; lnaGs; | EPO:2288U15 |
| | | | | vitro | | | CR | AAGCU | dCs; lnaTs; | |
| | | | | | | | | GUACA | dGs; lnaAs; | |
| | | | | | | | | | dAs; lnaGs; | |
| | | | | | | | | | dCs; | |
| | | | | | | | | | lnaTs; dGs; | |
| | | | | | | | | | lnaTs; | |
| | | | | | | | | | dAs; lnaCs; | |
| | | | | | | | | | dA-Sup | |
| EPO-06 | 1.588265502 | 0.151033057 | EPO | in | Hep3B | 50 | qRTP | AGCUG | dAs; lnaGs; | EPO:2288U15 |
| | | | | vitro | | | CR | AAGCU | dCs; lnaTs; | |
| | | | | | | | | GUACA | dGs; lnaAs; | |
| | | | | | | | | | dAs; lnaGs; | |
| | | | | | | | | | dCs; | |
| | | | | | | | | | lnaTs; dGs; | |
| | | | | | | | | | lnaTs; | |
| | | | | | | | | | dAs; lnaCs; | |
| | | | | | | | | | dA-Sup | |
| EPO-06 | 2.195405783 | 0.092195746 | EPO | in | HepG2 | 20 | qRTP | AGCUG | dAs; lnaGs; | EPO:2288U15 |
| | | | | vitro | | | CR | AAGCU | dCs; lnaTs; | |
| | | | | | | | | GUACA | dGs; lnaAs; | |
| | | | | | | | | | dAs; lnaGs; | |
| | | | | | | | | | dCs; | |
| | | | | | | | | | lnaTs; dGs; | |
| | | | | | | | | | lnaTs; | |
| | | | | | | | | | dAs; lnaCs; | |
| | | | | | | | | | dA-Sup | |
| EPO-06 | 3.747235827 | | EPO | in | HepG2 | 50 | qRTP | AGCUG | dAs; lnaGs; | EPO:2288U15 |
| | | | | vitro | | | CR | AAGCU | dCs; lnaTs; | |
| | | | | | | | | GUACA | dGs; lnaAs; | |
| | | | | | | | | | dAs; lnaGs; | |
| | | | | | | | | | dCs; | |
| | | | | | | | | | lnaTs; dGs; | |
| | | | | | | | | | lnaTs; | |
| | | | | | | | | | dAs; lnaCs; | |
| | | | | | | | | | dA-Sup | |
| EPO-07 | 1.349851287 | 0.343826336 | EPO | in | HepG2 | 30 | qRTP | AACAA | lnaAs; lnaAs; | EPO:2226U15 |
| | | | | vitro | | | CR | UCACU | lnaCs; | |
| | | | | | | | | GCUGA | dAs; dAs; | |
| | | | | | | | | | dTs; dCs; | |
| | | | | | | | | | dAs; dCs; | |
| | | | | | | | | | dTs; dGs; | |
| | | | | | | | | | dCs; lnaTs; | |
| | | | | | | | | | lnaGs; lnaA- | |
| | | | | | | | | | Sup | |
| EPO-07 | 1.409503309 | 0.108000458 | EPO | in | HepG2 | 10 | qRTP | AACAA | lnaAs; lnaAs; | EPO:2226U15 |
| | | | | vitro | | | CR | UCACU | lnaCs; | |
| | | | | | | | | GCUGA | dAs; dAs; | |
| | | | | | | | | | dTs; dCs; | |
| | | | | | | | | | dAs; dCs; | |
| | | | | | | | | | dTs; dGs; | |
| | | | | | | | | | dCs; lnaTs; | |
| | | | | | | | | | lnaGs; lnaA- | |
| | | | | | | | | | Sup | |
| EPO-07 | 1.409503309 | 0.108000458 | EPO | in | HepG2 | 10 | qRTP | AACAA | lnaAs; lnaAs; | EPO:2226U15 |
| | | | | vitro | | | CR | UCACU | lnaCs; | |
| | | | | | | | | GCUGA | dAs; dAs; | |
| | | | | | | | | | dTs; dCs; | |
| | | | | | | | | | dAs; dCs; | |
| | | | | | | | | | dTs; dGs; | |
| | | | | | | | | | dCs; lnaTs; | |
| | | | | | | | | | lnaGs; lnaA- | |
| | | | | | | | | | Sup | |
| EPO-07 | 1.349851287 | 0.343826336 | EPO | in | HepG2 | 30 | qRTP | AACAA | lnaAs; lnaAs; | EPO:2226U15 |
| | | | | vitro | | | CR | UCACU | lnaCs; | |
| | | | | | | | | GCUGA | dAs; dAs; | |
| | | | | | | | | | dTs; dCs; | |
| | | | | | | | | | dAs; dCs; | |
| | | | | | | | | | dTs; dGs; | |
| | | | | | | | | | dCs; lnaTs; | |
| | | | | | | | | | lnaGs; lnaA- | |
| | | | | | | | | | Sup | |
| EPO-07 | 0.392027831 | 0.072593031 | EPO | in | Hep3B | 50 | qRTP | AACAA | lnaAs; lnaAs; | EPO:2226U15 |
| | | | | vitro | | | CR | UCACU | lnaCs; | |
| | | | | | | | | GCUGA | dAs; dAs; | |
| | | | | | | | | | dTs; dCs; | |
| | | | | | | | | | dAs; dCs; | |
| | | | | | | | | | dTs; dGs; | |
| | | | | | | | | | dCs; lnaTs; | |
| | | | | | | | | | lnaGs; lnaA- | |
| | | | | | | | | | Sup | |
| EPO-07 | 0.312188136 | 0.049636885 | EPO | in | Hep3B | 100 | qRTP | AACAA | lnaAs; lnaAs; | EPO:2226U15 |
| | | | | vitro | | | CR | UCACU | lnaCs; | |
| | | | | | | | | GCUGA | dAs; dAs; | |
| | | | | | | | | | dTs; dCs; | |
| | | | | | | | | | dAs; dCs; | |
| | | | | | | | | | dTs; dGs; | |
| | | | | | | | | | dCs; lnaTs; | |
| | | | | | | | | | lnaGs; lnaA- | |
| | | | | | | | | | Sup | |
| EPO-07 | 0.312188136 | 0.049636885 | EPO | in | Hep3B | 20 | qRTP | AACAA | lnaAs; lnaAs; | EPO:2226U15 |
| | | | | vitro | | | CR | UCACU | lnaCs; | |
| | | | | | | | | GCUGA | dAs; dAs; | |
| | | | | | | | | | dTs; dCs; | |
| | | | | | | | | | dAs; dCs; | |
| | | | | | | | | | dTs; dGs; | |
| | | | | | | | | | dCs; lnaTs; | |
| | | | | | | | | | lnaGs; lnaA- | |
| | | | | | | | | | Sup | |
| EPO-07 | 0.392027831 | 0.072593031 | EPO | in | Hep3B | 50 | qRTP | AACAA | lnaAs; lnaAs; | EPO:2226U15 |
| | | | | vitro | | | CR | UCACU | lnaCs; | |
| | | | | | | | | GCUGA | dAs; dAs; | |
| | | | | | | | | | dTs; dCs; | |
| | | | | | | | | | dAs; dCs; | |
| | | | | | | | | | dTs; dGs; | |
| | | | | | | | | | dCs; lnaTs; | |
| | | | | | | | | | lnaGs; lnaA- | |
| | | | | | | | | | Sup | |
| EPO-07 | 1.422849128 | 0.110682136 | EPO | in | HepG2 | 20 | qRTP | AACAA | lnaAs; lnaAs; | EPO:2226U15 |
| | | | | vitro | | | CR | UCACU | lnaCs; | |
| | | | | | | | | GCUGA | dAs; dAs; | |
| | | | | | | | | | dTs; dCs; | |
| | | | | | | | | | dAs; dCs; | |
| | | | | | | | | | dTs; dGs; | |
| | | | | | | | | | dCs; lnaTs; | |
| | | | | | | | | | lnaGs; lnaA- | |
| | | | | | | | | | Sup | |
| EPO-07 | 3.840016174 | 0.474287279 | EPO | in | HepG2 | 50 | qRTP | AACAA | lnaAs; lnaAs; | EPO:2226U15 |
| | | | | vitro | | | CR | UCACU | lnaCs; | |
| | | | | | | | | GCUGA | dAs; dAs; | |
| | | | | | | | | | dTs; dCs; | |
| | | | | | | | | | dAs; dCs; | |
| | | | | | | | | | dTs; dGs; | |
| | | | | | | | | | dCs; lnaTs; | |
| | | | | | | | | | lnaGs; lnaA- | |
| | | | | | | | | | Sup | |
| EPO-08 | 0.509748093 | 0.052584878 | EPO | in | HepG2 | 30 | qRTP | UCAGC | dTs; lnaCs; | EPO:2431U15 |
| | | | | vitro | | | CR | UCAGC | dAs; lnaGs; | |
| | | | | | | | | GCCAG | dCs; lnaTs; | |
| | | | | | | | | | dCs; lnaAs; | |
| | | | | | | | | | dGs; | |
| | | | | | | | | | lnaCs; dGs; | |
| | | | | | | | | | lnaCs; | |
| | | | | | | | | | dCs; lnaAs; | |
| | | | | | | | | | dG-Sup | |
| EPO-08 | 0.674717666 | 0.160995766 | EPO | in | HepG2 | 10 | qRTP | UCAGC | dTs; lnaCs; | EPO:2431U15 |
| | | | | vitro | | | CR | UCAGC | dAs; lnaGs; | |
| | | | | | | | | GCCAG | dCs; lnaTs; | |
| | | | | | | | | | dCs; lnaAs; | |
| | | | | | | | | | dGs; | |
| | | | | | | | | | lnaCs; dGs; | |
| | | | | | | | | | lnaCs; | |
| | | | | | | | | | dCs; lnaAs; | |
| | | | | | | | | | dG-Sup | |
| EPO-08 | 0.674717666 | 0.160995766 | EPO | in | HepG2 | 10 | qRTP | UCAGC | dTs; lnaCs; | EPO:2431U15 |
| | | | | vitro | | | CR | UCAGC | dAs; lnaGs; | |
| | | | | | | | | GCCAG | dCs; lnaTs; | |
| | | | | | | | | | dCs; lnaAs; | |
| | | | | | | | | | dGs; | |
| | | | | | | | | | lnaCs; dGs; | |
| | | | | | | | | | lnaCs; | |
| | | | | | | | | | dCs; lnaAs; | |
| | | | | | | | | | dG-Sup | |
| EPO-08 | 0.509748093 | 0.052584878 | EPO | in | HepG2 | 30 | qRTP | UCAGC | dTs; lnaCs; | EPO:2431U15 |
| | | | | vitro | | | CR | UCAGC | dAs; lnaGs; | |
| | | | | | | | | GCCAG | dCs; lnaTs; | |
| | | | | | | | | | dCs; lnaAs; | |
| | | | | | | | | | dGs; | |
| | | | | | | | | | lnaCs; dGs; | |
| | | | | | | | | | lnaCs; | |
| | | | | | | | | | dCs; lnaAs; | |
| | | | | | | | | | dG-Sup | |
| EPO-08 | 1.499414059 | 0.159088189 | EPO | in | Hep3B | 50 | qRTP | UCAGC | dTs; lnaCs; | EPO:2431U15 |
| | | | | vitro | | | CR | UCAGC | dAs; lnaGs; | |
| | | | | | | | | GCCAG | dCs; lnaTs; | |
| | | | | | | | | | dCs; lnaAs; | |
| | | | | | | | | | dGs; | |
| | | | | | | | | | lnaCs; dGs; | |
| | | | | | | | | | lnaCs; | |
| | | | | | | | | | dCs; lnaAs; | |
| | | | | | | | | | dG-Sup | |
| EPO-08 | 2.217618305 | 0.202973582 | EPO | in | Hep3B | 100 | qRTP | UCAGC | dTs; lnaCs; | EPO:2431U15 |
| | | | | vitro | | | CR | UCAGC | dAs; lnaGs; | |
| | | | | | | | | GCCAG | dCs; lnaTs; | |
| | | | | | | | | | dCs; lnaAs; | |
| | | | | | | | | | dGs; | |
| | | | | | | | | | lnaCs; dGs; | |
| | | | | | | | | | lnaCs; | |
| | | | | | | | | | dCs; lnaAs; | |
| | | | | | | | | | dG-Sup | |
| EPO-08 | 2.217618305 | | EPO | in | Hep3B | 20 | qRTP | UCAGC | dTs; lnaCs; | EPO:2431U15 |
| | | | | vitro | | | CR | UCAGC | dAs; lnaGs; | |
| | | | | | | | | GCCAG | dCs; lnaTs; | |
| | | | | | | | | | dCs; lnaAs; | |
| | | | | | | | | | dGs; | |
| | | | | | | | | | lnaCs; dGs; | |
| | | | | | | | | | lnaCs; | |
| | | | | | | | | | dCs; lnaAs; | |
| | | | | | | | | | dG-Sup | |
| EPO-08 | 1.499414059 | 0.159088189 | EPO | in | Hep3B | 50 | qRTP | UCAGC | dTs; lnaCs; | EPO:2431U15 |
| | | | | vitro | | | CR | UCAGC | dAs; lnaGs; | |
| | | | | | | | | GCCAG | dCs; lnaTs; | |
| | | | | | | | | | dCs; lnaAs; | |
| | | | | | | | | | dGs; | |
| | | | | | | | | | lnaCs; dGs; | |
| | | | | | | | | | lnaCs; | |
| | | | | | | | | | dCs; lnaAs; | |
| | | | | | | | | | dG-Sup | |
| EPO-08 | 1.423902421 | 0.167649614 | EPO | in | HepG2 | 20 | qRTP | UCAGC | dTs; lnaCs; | EPO:2431U15 |
| | | | | vitro | | | CR | UCAGC | dAs; lnaGs; | |
| | | | | | | | | GCCAG | dCs; lnaTs; | |
| | | | | | | | | | dCs; lnaAs; | |
| | | | | | | | | | dGs; | |
| | | | | | | | | | lnaCs; dGs; | |
| | | | | | | | | | lnaCs; | |
| | | | | | | | | | dCs; lnaAs; | |
| | | | | | | | | | dG-Sup | |
| EPO-08 | 2.61757674 | | EPO | in | HepG2 | 50 | qRTP | UCAGC | dTs; lnaCs; | EPO:2431U15 |
| | | | | vitro | | | CR | UCAGC | dAs; lnaGs; | |
| | | | | | | | | GCCAG | dCs; lnaTs; | |
| | | | | | | | | | dCs; lnaAs; | |
| | | | | | | | | | dGs; | |
| | | | | | | | | | lnaCs; dGs; | |
| | | | | | | | | | lnaCs; | |
| | | | | | | | | | dCs; lnaAs; | |
| | | | | | | | | | dG-Sup | |
| EPO-09 | 1.379440048 | 0.088814714 | EPO | in | HepG2 | 30 | qRTP | CCAUG | dCs; lnaCs; | EPO:2452U15 |
| | | | | vitro | | | CR | GACAC | dAs; lnaTs; | |
| | | | | | | | | UCCAG | dGs; lnaGs; | |
| | | | | | | | | | dAs; lnaCs; | |
| | | | | | | | | | dAs; | |
| | | | | | | | | | lnaCs; dTs; | |
| | | | | | | | | | lnaCs; dCs; | |
| | | | | | | | | | lnaAs; | |
| | | | | | | | | | dG-Sup | |
| EPO-09 | 1.661378509 | 0.320121147 | EPO | in | HepG2 | 10 | qRTP | CCAUG | dCs; lnaCs; | EPO:2452U15 |
| | | | | vitro | | | CR | GACAC | dAs; lnaTs; | |
| | | | | | | | | UCCAG | dGs; lnaGs; | |
| | | | | | | | | | dAs; lnaCs; | |
| | | | | | | | | | dAs; | |
| | | | | | | | | | lnaCs; dTs; | |
| | | | | | | | | | lnaCs; dCs; | |
| | | | | | | | | | lnaAs; | |
| | | | | | | | | | dG-Sup | |
| EPO-09 | 1.661378509 | 0.320121147 | EPO | in | HepG2 | 10 | qRTP | CCAUG | dCs; lnaCs; | EPO:2452U15 |
| | | | | vitro | | | CR | GACAC | dAs; lnaTs; | |
| | | | | | | | | UCCAG | dGs; lnaGs; | |
| | | | | | | | | | dAs; lnaCs; | |
| | | | | | | | | | dAs; | |
| | | | | | | | | | lnaCs; dTs; | |
| | | | | | | | | | lnaCs; dCs; | |
| | | | | | | | | | lnaAs; | |
| | | | | | | | | | dG-Sup | |
| EPO-09 | 1.379440048 | 0.088814714 | EPO | in | HepG2 | 30 | qRTP | CCAUG | dCs; lnaCs; | EPO:2452U15 |
| | | | | vitro | | | CR | GACAC | dAs; lnaTs; | |
| | | | | | | | | UCCAG | dGs; lnaGs; | |
| | | | | | | | | | dAs; lnaCs; | |
| | | | | | | | | | dAs; | |
| | | | | | | | | | lnaCs; dTs; | |
| | | | | | | | | | lnaCs; dCs; | |
| | | | | | | | | | lnaAs; | |
| | | | | | | | | | dG-Sup | |
| EPO-09 | 3.309382793 | 0.4217768 | EPO | in | Hep3B | 50 | qRTP | CCAUG | dCs; lnaCs; | EPO:2452U15 |
| | | | | vitro | | | CR | GACAC | dAs; lnaTs; | |
| | | | | | | | | UCCAG | dGs; lnaGs; | |
| | | | | | | | | | dAs; lnaCs; | |
| | | | | | | | | | dAs; | |
| | | | | | | | | | lnaCs; dTs; | |
| | | | | | | | | | lnaCs; dCs; | |
| | | | | | | | | | lnaAs; | |
| | | | | | | | | | dG-Sup | |
| EPO-09 | 5.18470898 | 0.412545622 | EPO | in | Hep3B | 100 | qRTP | CCAUG | dCs; lnaCs; | EPO:2452U15 |
| | | | | vitro | | | CR | GACAC | dAs; lnaTs; | |
| | | | | | | | | UCCAG | dGs; lnaGs; | |
| | | | | | | | | | dAs; lnaCs; | |
| | | | | | | | | | dAs; | |
| | | | | | | | | | lnaCs; dTs; | |
| | | | | | | | | | lnaCs; dCs; | |
| | | | | | | | | | lnaAs; | |
| | | | | | | | | | dG-Sup | |
| EPO-09 | 5.18470898 | 0.412545622 | EPO | in | Hep3B | 20 | qRTP | CCAUG | dCs; lnaCs; | EPO:2452U15 |
| | | | | vitro | | | CR | GACAC | dAs; lnaTs; | |
| | | | | | | | | UCCAG | dGs; lnaGs; | |
| | | | | | | | | | dAs; lnaCs; | |
| | | | | | | | | | dAs; | |
| | | | | | | | | | lnaCs; dTs; | |
| | | | | | | | | | lnaCs; dCs; | |
| | | | | | | | | | lnaAs; | |
| | | | | | | | | | dG-Sup | |
| EPO-09 | 3.309382793 | 0.4217768 | EPO | in | Hep3B | 50 | qRTP | CCAUG | dCs; lnaCs; | EPO:2452U15 |
| | | | | vitro | | | CR | GACAC | dAs; lnaTs; | |
| | | | | | | | | UCCAG | dGs; lnaGs; | |
| | | | | | | | | | dAs; lnaCs; | |
| | | | | | | | | | dAs; | |
| | | | | | | | | | lnaCs; dTs; | |
| | | | | | | | | | lnaCs; dCs; | |
| | | | | | | | | | lnaAs; | |
| | | | | | | | | | dG-Sup | |
| EPO-09 | 1.84728214 | 0.178096263 | EPO | in | HepG2 | 20 | qRTP | CCAUG | dCs; lnaCs; | EPO:2452U15 |
| | | | | vitro | | | CR | GACAC | dAs; lnaTs; | |
| | | | | | | | | UCCAG | dGs; lnaGs; | |
| | | | | | | | | | dAs; lnaCs; | |
| | | | | | | | | | dAs; | |
| | | | | | | | | | lnaCs; dTs; | |
| | | | | | | | | | lnaCs; dCs; | |
| | | | | | | | | | lnaAs; | |
| | | | | | | | | | dG-Sup | |
| EPO-09 | 5.432574306 | 0.13917132 | EPO | in | HepG2 | 50 | qRTP | CCAUG | dCs; lnaCs; | EPO:2452U15 |
| | | | | vitro | | | CR | GACAC | dAs; lnaTs; | |
| | | | | | | | | UCCAG | dGs; lnaGs; | |
| | | | | | | | | | dAs; lnaCs; | |
| | | | | | | | | | dAs; | |
| | | | | | | | | | lnaCs; dTs; | |
| | | | | | | | | | lnaCs; dCs; | |
| | | | | | | | | | lnaAs; | |
| | | | | | | | | | dG-Sup | |
| EPO-09f | NA | NA | EPO | NA | NA | 0 | NA | CCAUG | dCs; fluCs; | EPO:2452U15 |
| | | | | | | | | GACAC | dAs; fluUs; | |
| | | | | | | | | UCCAG | dGs; fluGs; | |
| | | | | | | | | | dAs; fluCs; | |
| | | | | | | | | | dAs; | |
| | | | | | | | | | fluCs; dTs; | |
| | | | | | | | | | fluCs; dCs; | |
| | | | | | | | | | fluAs; dG- | |
| | | | | | | | | | Sup | |
| EPO- | NA | NA | EPO | NA | NA | 0 | NA | CCAUG | dCs; omeCs; | EPO:2452U15 |
| 09m | | | | | | | | GACAC | dAs; omeUs; | |
| | | | | | | | | UCCAG | dGs; | |
| | | | | | | | | | omeGs; | |
| | | | | | | | | | dAs; omeCs; | |
| | | | | | | | | | dAs; | |
| | | | | | | | | | omeCs; dTs; | |
| | | | | | | | | | omeCs; | |
| | | | | | | | | | dCs; omeAs; | |
| | | | | | | | | | dG- | |
| | | | | | | | | | Sup | |
| EPO-10 | 1.763984461 | 0.405671711 | EPO | in | HepG2 | 30 | qRTP | AAUGA | dAs; lnaAs; | EPO:2474U15 |
| | | | | vitro | | | CR | CAUCU | dTs; lnaGs; | |
| | | | | | | | | CAGGG | dAs; lnaCs; | |
| | | | | | | | | | dAs; | |
| | | | | | | | | | lnaTs; dCs; | |
| | | | | | | | | | lnaTs; dCs; | |
| | | | | | | | | | lnaAs; | |
| | | | | | | | | | dGs; lnaGs; | |
| | | | | | | | | | dG-Sup | |
| EPO-10 | 2.651965679 | 0.108325204 | EPO | in | HepG2 | 10 | qRTP | AAUGA | dAs; lnaAs; | EPO:2474U15 |
| | | | | vitro | | | CR | CAUCU | dTs; lnaGs; | |
| | | | | | | | | CAGGG | dAs; lnaCs; | |
| | | | | | | | | | dAs; | |
| | | | | | | | | | lnaTs; dCs; | |
| | | | | | | | | | lnaTs; dCs; | |
| | | | | | | | | | lnaAs; | |
| | | | | | | | | | dGs; lnaGs; | |
| | | | | | | | | | dG-Sup | |
| EPO-10 | 2.651935679 | 0.108325204 | EPO | in | HepG2 | 10 | qRTP | AAUGA | dAs; lnaAs; | EPO:2474U15 |
| | | | | vitro | | | CR | CAUCU | dTs; lnaGs; | |
| | | | | | | | | CAGGG | dAs; lnaCs; | |
| | | | | | | | | | dAs; | |
| | | | | | | | | | lnaTs; dCs; | |
| | | | | | | | | | lnaTs; dCs; | |
| | | | | | | | | | lnaAs; | |
| | | | | | | | | | dGs; lnaGs; | |
| | | | | | | | | | dG-Sup | |
| EPO-10 | 1.763984461 | 0.405671711 | EPO | in | HepG2 | 30 | qRTP | AAUGA | dAs; lnaAs; | EPO:2474U15 |
| | | | | vitro | | | CR | CAUCU | dTs; lnaGs; | |
| | | | | | | | | CAGGG | dAs; lnaCs; | |
| | | | | | | | | | dAs; | |
| | | | | | | | | | lnaTs; dCs; | |
| | | | | | | | | | lnaTs; dCs; | |
| | | | | | | | | | lnaAs; | |
| | | | | | | | | | dGs; lnaGs; | |
| | | | | | | | | | dG-Sup | |
| EPO-10 | 6.381602966 | 0.834643455 | EPO | in | Hep3B | 50 | qRTP | AAUGA | dAs; lnaAs; | EPO:2474U15 |
| | | | | vitro | | | CR | CAUCU | dTs; lnaGs; | |
| | | | | | | | | CAGGG | dAs; lnaCs; | |
| | | | | | | | | | dAs; | |
| | | | | | | | | | lnaTs; dCs; | |
| | | | | | | | | | lnaTs; dCs; | |
| | | | | | | | | | lnaAs; | |
| | | | | | | | | | dGs; lnaGs; | |
| | | | | | | | | | dG-Sup | |
| EPO-10 | 16.1994431 | 0.520567864 | EPO | in | Hep3B | 100 | qRTP | AAUGA | dAs; lnaAs; | EPO:2474U15 |
| | | | | vitro | | | CR | CAUCU | dTs; lnaGs; | |
| | | | | | | | | CAGGG | dAs; lnaCs; | |
| | | | | | | | | | dAs; | |
| | | | | | | | | | lnaTs; dCs; | |
| | | | | | | | | | lnaTs; dCs; | |
| | | | | | | | | | lnaAs; | |
| | | | | | | | | | dGs; lnaGs; | |
| | | | | | | | | | dG-Sup | |
| EPO-10 | 16.1994431 | 0.520567864 | EPO | in | Hep3B | 20 | qRTP | AAUGA | dAs; lnaAs; | EPO:2474U15 |
| | | | | vitro | | | CR | CAUCU | dTs; lnaGs; | |
| | | | | | | | | CAGGG | dAs; lnaCs; | |
| | | | | | | | | | dAs; | |
| | | | | | | | | | lnaTs; dCs; | |
| | | | | | | | | | lnaTs; dCs; | |
| | | | | | | | | | lnaAs; | |
| | | | | | | | | | dGs; lnaGs; | |
| | | | | | | | | | dG-Sup | |
| EPO-10 | 6.381602966 | 0.834643455 | EPO | in | Hep3B | 50 | qRTP | AAUGA | dAs; lnaAs; | EPO:2474U15 |
| | | | | vitro | | | CR | CAUCU | dTs; lnaGs; | |
| | | | | | | | | CAGGG | dAs; lnaCs; | |
| | | | | | | | | | dAs; | |
| | | | | | | | | | lnaTs; dCs; | |
| | | | | | | | | | lnaTs; dCs; | |
| | | | | | | | | | lnaAs; | |
| | | | | | | | | | dGs; lnaGs; | |
| | | | | | | | | | dG-Sup | |
| EPO-10 | 2.692427208 | 0.255088105 | EPO | in | HepG2 | 20 | qRTP | AAUGA | dAs; lnaAs; | EPO:2474U15 |
| | | | | vitro | | | CR | CAUCU | dTs; lnaGs; | |
| | | | | | | | | CAGGG | dAs; lnaCs; | |
| | | | | | | | | | dAs; | |
| | | | | | | | | | lnaTs; dCs; | |
| | | | | | | | | | lnaTs; dCs; | |
| | | | | | | | | | lnaAs; | |
| | | | | | | | | | dGs; lnaGs; | |
| | | | | | | | | | dG-Sup | |
| EPO-10 | 7.31779709 | 0.770051368 | EPO | in | HepG2 | 50 | qRTP | AAUGA | dAs; lnaAs; | EPO:2474U15 |
| | | | | vitro | | | CR | CAUCU | dTs; lnaGs; | |
| | | | | | | | | CAGGG | dAs; lnaCs; | |
| | | | | | | | | | dAs; | |
| | | | | | | | | | lnaTs; dCs; | |
| | | | | | | | | | lnaTs; dCs; | |
| | | | | | | | | | lnaAs; | |
| | | | | | | | | | dGs; lnaGs; | |
| | | | | | | | | | dG-Sup | |
| EPO-10- | NA | NA | EPO | NA | NA | 0 | NA | AAUGA | bio; dAs; lnaAs; | EPO:2474U15 |
| 5′biotin | | | | | | | | CAUCU | dTs; | |
| | | | | | | | | CAGGG | lnaGs; dAs; | |
| | | | | | | | | | lnaCs; | |
| | | | | | | | | | dAs; lnaTs; | |
| | | | | | | | | | dCs; lnaTs; | |
| | | | | | | | | | dCs; lnaAs; | |
| | | | | | | | | | dGs; lnaGs; | |
| | | | | | | | | | dG- | |
| | | | | | | | | | Sup | |
| EPO-10f | NA | NA | EPO | NA | NA | 0 | NA | AAUGA | dAs; fluAs; | EPO:2474U15 |
| | | | | | | | | CAUCU | dTs; fluGs; | |
| | | | | | | | | CAGGG | dAs; fluCs; | |
| | | | | | | | | | dAs; | |
| | | | | | | | | | fluUs; dCs; | |
| | | | | | | | | | fluUs; dCs; | |
| | | | | | | | | | fluAs; | |
| | | | | | | | | | dGs; fluGs; | |
| | | | | | | | | | dG-Sup | |
| EPO- | NA | NA | EPO | NA | NA | 0 | NA | AAUGA | dAs; omeAs; | EPO:2474U15 |
| 10m | | | | | | | | CAUCU | dTs; omeGs; | |
| | | | | | | | | CAGGG | dAs; | |
| | | | | | | | | | omeCs; | |
| | | | | | | | | | dAs; omeUs; | |
| | | | | | | | | | dCs; omeUs; | |
| | | | | | | | | | dCs; | |
| | | | | | | | | | omeAs; | |
| | | | | | | | | | dGs; omeGs; | |
| | | | | | | | | | dG- | |
| | | | | | | | | | Sup | |
| EPO-11 | 1.426648104 | 0.282422635 | EPO | in | HepG2 | 30 | qRTP | ACUGU | dAs; lnaCs; | EPO:2498U15 |
| | | | | vitro | | | CR | CCAGA | dTs; lnaGs; | |
| | | | | | | | | GAGCA | dTs; lnaCs; | |
| | | | | | | | | | dCs; lnaAs; | |
| | | | | | | | | | dGs; | |
| | | | | | | | | | lnaAs; dGs; | |
| | | | | | | | | | lnaAs; | |
| | | | | | | | | | dGs; lnaCs; | |
| | | | | | | | | | dA-Sup | |
| EPO-11 | 1.715028817 | 0.549707492 | EPO | in | HepG2 | 10 | qRTP | ACUGU | dAs; lnaCs; | EPO:2498U15 |
| | | | | vitro | | | CR | CCAGA | dTs; lnaGs; | |
| | | | | | | | | GAGCA | dTs; lnaCs; | |
| | | | | | | | | | dCs; lnaAs; | |
| | | | | | | | | | dGs; | |
| | | | | | | | | | lnaAs; dGs; | |
| | | | | | | | | | lnaAs; | |
| | | | | | | | | | dGs; lnaCs; | |
| | | | | | | | | | dA-Sup | |
| EPO-11 | 1.715028817 | 0.549707492 | EPO | in | HepG2 | 10 | qRTP | ACUGU | dAs; lnaCs; | EPO:2498U15 |
| | | | | vitro | | | CR | CCAGA | dTs; lnaGs; | |
| | | | | | | | | GAGCA | dTs; lnaCs; | |
| | | | | | | | | | dCs; lnaAs; | |
| | | | | | | | | | dGs; | |
| | | | | | | | | | lnaAs; dGs; | |
| | | | | | | | | | lnaAs; | |
| | | | | | | | | | dGs; lnaCs; | |
| | | | | | | | | | dA-Sup | |
| EPO-11 | 1.426648104 | 0.282422635 | EPO | in | HepG2 | 30 | qRTP | ACUGU | dAs; lnaCs; | EPO:2498U15 |
| | | | | vitro | | | CR | CCAGA | dTs; lnaGs; | |
| | | | | | | | | GAGCA | dTs; lnaCs; | |
| | | | | | | | | | dCs; lnaAs; | |
| | | | | | | | | | dGs; | |
| | | | | | | | | | lnaAs; dGs; | |
| | | | | | | | | | lnaAs; | |
| | | | | | | | | | dGs; lnaCs; | |
| | | | | | | | | | dA-Sup | |
| EPO-11 | 3.299002556 | 0.368613044 | EPO | in | Hep3B | 50 | qRTP | ACUGU | dAs; lnaCs; | EPO:2498U15 |
| | | | | vitro | | | CR | CCAGA | dTs; lnaGs; | |
| | | | | | | | | GAGCA | dTs; lnaCs; | |
| | | | | | | | | | dCs; lnaAs; | |
| | | | | | | | | | dGs; | |
| | | | | | | | | | lnaAs; dGs; | |
| | | | | | | | | | lnaAs; | |
| | | | | | | | | | dGs; lnaCs; | |
| | | | | | | | | | dA-Sup | |
| EPO-11 | 5.36666922 | 0.486203888 | EPO | in | Hep3B | 100 | qRTP | ACUGU | dAs; lnaCs; | EPO:2498U15 |
| | | | | vitro | | | CR | CCAGA | dTs; lnaGs; | |
| | | | | | | | | GAGCA | dTs; lnaCs; | |
| | | | | | | | | | dCs; lnaAs; | |
| | | | | | | | | | dGs; | |
| | | | | | | | | | lnaAs; dGs; | |
| | | | | | | | | | lnaAs; | |
| | | | | | | | | | dGs; lnaCs; | |
| | | | | | | | | | dA-Sup | |
| EPO-11 | 5.36666922 | 0.486203888 | EPO | in | Hep3B | 20 | qRTP | ACUGU | dAs; lnaCs; | EPO:2498U15 |
| | | | | vitro | | | CR | CCAGA | dTs; lnaGs; | |
| | | | | | | | | GAGCA | dTs; lnaCs; | |
| | | | | | | | | | dCs; lnaAs; | |
| | | | | | | | | | dGs; | |
| | | | | | | | | | lnaAs; dGs; | |
| | | | | | | | | | lnaAs; | |
| | | | | | | | | | dGs; lnaCs; | |
| | | | | | | | | | dA-Sup | |
| EPO-11 | 3.299002556 | | EPO | in | Hep3B | 50 | qRTP | ACUGU | dAs; lnaCs; | EPO:2498U15 |
| | | | | vitro | | | CR | CCAGA | dTs; lnaGs; | |
| | | | | | | | | GAGCA | dTs; lnaCs; | |
| | | | | | | | | | dCs; lnaAs; | |
| | | | | | | | | | dGs; | |
| | | | | | | | | | lnaAs; dGs; | |
| | | | | | | | | | lnaAs; | |
| | | | | | | | | | dGs; lnaCs; | |
| | | | | | | | | | dA-Sup | |
| EPO-11 | 1.903695134 | 0.286133529 | EPO | in | HepG2 | 20 | qRTP | ACUGU | dAs; lnaCs; | EPO:2498U15 |
| | | | | vitro | | | CR | CCAGA | dTs; lnaGs; | |
| | | | | | | | | GAGCA | dTs; lnaCs; | |
| | | | | | | | | | dCs; lnaAs; | |
| | | | | | | | | | dGs; | |
| | | | | | | | | | lnaAs; dGs; | |
| | | | | | | | | | lnaAs; | |
| | | | | | | | | | dGs; lnaCs; | |
| | | | | | | | | | dA-Sup | |
| EPO-11 | 6.308192834 | 0.306792501 | EPO | in | HepG2 | 50 | qRTP | ACUGU | dAs; lnaCs; | EPO:2498U15 |
| | | | | vitro | | | CR | CCAGA | dTs; lnaGs; | |
| | | | | | | | | GAGCA | dTs; lnaCs; | |
| | | | | | | | | | dCs; lnaAs; | |
| | | | | | | | | | dGs; | |
| | | | | | | | | | lnaAs; dGs; | |
| | | | | | | | | | lnaAs; | |
| | | | | | | | | | dGs; lnaCs; | |
| | | | | | | | | | dA-Sup | |
| EPO-11- | NA | NA | EPO | NA | NA | 0 | NA | ACUGU | bio; dAs; lnaCs; | EPO:2498U15 |
| 5′biotin | | | | | | | | CCAGA | dTs; | |
| | | | | | | | | GAGCA | lnaGs; dTs; | |
| | | | | | | | | | lnaCs; | |
| | | | | | | | | | dCs; lnaAs; | |
| | | | | | | | | | dGs; lnaAs; | |
| | | | | | | | | | dGs; lnaAs; | |
| | | | | | | | | | dGs; | |
| | | | | | | | | | lnaCs; dA- | |
| | | | | | | | | | Sup | |
| EPO-11f | NA | NA | EPO | NA | NA | 0 | NA | ACUGU | dAs; fluCs; | EPO:2498U15 |
| | | | | | | | | CCAGA | dTs; fluGs; | |
| | | | | | | | | GAGCA | dTs; fluCs; | |
| | | | | | | | | | dCs; fluAs; | |
| | | | | | | | | | dGs; | |
| | | | | | | | | | fluAs; dGs; | |
| | | | | | | | | | fluAs; dGs; | |
| | | | | | | | | | fluCs; | |
| | | | | | | | | | dA-Sup | |
| EPO- | NA | NA | EPO | NA | NA | 0 | NA | ACUGU | dAs; omeCs; | EPO:2498U15 |
| 11m | | | | | | | | CCAGA | dTs; omeGs; | |
| | | | | | | | | GAGCA | dTs; | |
| | | | | | | | | | omeCs; | |
| | | | | | | | | | dCs; omeAs; | |
| | | | | | | | | | dGs; omeAs; | |
| | | | | | | | | | dGs; | |
| | | | | | | | | | omeAs; | |
| | | | | | | | | | dGs; omeCs; | |
| | | | | | | | | | dA- | |
| | | | | | | | | | Sup | |
| EPO-12 | 1.329880361 | 0.097686677 | EPO | in | HepG2 | 30 | qRTP | AAUGA | lnaAs; lnaAs; | EPO:2474U15 |
| | | | | vitro | | | CR | CAUCU | lnaTs; | |
| | | | | | | | | CAGGG | dGs; dAs; | |
| | | | | | | | | | dCs; dAs; | |
| | | | | | | | | | dTs; dCs; | |
| | | | | | | | | | dTs; dCs; | |
| | | | | | | | | | dAs; lnaGs; | |
| | | | | | | | | | lnaGs; lnaG- | |
| | | | | | | | | | Sup | |
| EPO-12 | 1.344350668 | 0.167921596 | EPO | in | HepG2 | 10 | qRTP | AAUGA | lnaAs; lnaAs; | EPO:2474U15 |
| | | | | vitro | | | CR | CAUCU | lnaTs; | |
| | | | | | | | | CAGGG | dGs; dAs; | |
| | | | | | | | | | dCs; dAs; | |
| | | | | | | | | | dTs; dCs; | |
| | | | | | | | | | dTs; dCs; | |
| | | | | | | | | | dAs; lnaGs; | |
| | | | | | | | | | lnaGs; lnaG- | |
| | | | | | | | | | Sup | |
| EPO-12 | 1.344350668 | 0.167921596 | EPO | in | HepG2 | 10 | qRTP | AAUGA | lnaAs; lnaAs; | EPO:2474U15 |
| | | | | vitro | | | CR | CAUCU | lnaTs; | |
| | | | | | | | | CAGGG | dGs; dAs; | |
| | | | | | | | | | dCs; dAs; | |
| | | | | | | | | | dTs; dCs; | |
| | | | | | | | | | dTs; dCs; | |
| | | | | | | | | | dAs; lnaGs; | |
| | | | | | | | | | lnaGs; lnaG- | |
| | | | | | | | | | Sup | |
| EPO-12 | 1.329880361 | 0.097686677 | EPO | in | HepG2 | 30 | qRTP | AAUGA | lnaAs; lnaAs; | EPO:2474U15 |
| | | | | vitro | | | CR | CAUCU | lnaTs; | |
| | | | | | | | | CAGGG | dGs; dAs; | |
| | | | | | | | | | dCs; dAs; | |
| | | | | | | | | | dTs; dCs; | |
| | | | | | | | | | dTs; dCs; | |
| | | | | | | | | | dAs; lnaGs; | |
| | | | | | | | | | lnaGs; lnaG- | |
| | | | | | | | | | Sup | |
| EPO-12 | 0.189632983 | 0.030297026 | EPO | in | Hep3B | 50 | qRTP | AAUGA | lnaAs; lnaAs; | EPO:2474U15 |
| | | | | vitro | | | CR | CAUCU | lnaTs; | |
| | | | | | | | | CAGGG | dGs; dAs; | |
| | | | | | | | | | dCs; dAs; | |
| | | | | | | | | | dTs; dCs; | |
| | | | | | | | | | dTs; dCs; | |
| | | | | | | | | | dAs; lnaGs; | |
| | | | | | | | | | lnaGs; lnaG- | |
| | | | | | | | | | Sup | |
| EPO-12 | 0.641879475 | 0.245202414 | EPO | in | Hep3B | 100 | qRTP | AAUGA | lnaAs; lnaAs; | EPO:2474U15 |
| | | | | vitro | | | CR | CAUCU | lnaTs; | |
| | | | | | | | | CAGGG | dGs; dAs; | |
| | | | | | | | | | dCs; dAs; | |
| | | | | | | | | | dTs; dCs; | |
| | | | | | | | | | dTs; dCs; | |
| | | | | | | | | | dAs; lnaGs; | |
| | | | | | | | | | lnaGs; lnaG- | |
| | | | | | | | | | Sup | |
| EPO-12 | 0.641879475 | 0.245202414 | EPO | in | Hep3B | 20 | qRTP | AAUGA | lnaAs; lnaAs; | EPO:2474U15 |
| | | | | vitro | | | CR | CAUCU | lnaTs; | |
| | | | | | | | | CAGGG | dGs; dAs; | |
| | | | | | | | | | dCs; dAs; | |
| | | | | | | | | | dTs; dCs; | |
| | | | | | | | | | dTs; dCs; | |
| | | | | | | | | | dAs; lnaGs; | |
| | | | | | | | | | lnaGs; lnaG- | |
| | | | | | | | | | Sup | |
| EPO-12 | 0.189632983 | | EPO | in | Hep3B | 50 | qRTP | AAUGA | lnaAs; lnaAs; | EPO:2474U15 |
| | | | | vitro | | | CR | CAUCU | lnaTs; | |
| | | | | | | | | CAGGG | dGs; dAs; | |
| | | | | | | | | | dCs; dAs; | |
| | | | | | | | | | dTs; dCs; | |
| | | | | | | | | | dTs; dCs; | |
| | | | | | | | | | dAs; lnaGs; | |
| | | | | | | | | | lnaGs; lnaG- | |
| | | | | | | | | | Sup | |
| EPO-12 | 2.210921727 | 0.209285326 | EPO | in | HepG2 | 20 | qRTP | AAUGA | lnaAs; lnaAs; | EPO:2474U15 |
| | | | | vitro | | | CR | CAUCU | lnaTs; | |
| | | | | | | | | CAGGG | dGs; dAs; | |
| | | | | | | | | | dCs; dAs; | |
| | | | | | | | | | dTs; dCs; | |
| | | | | | | | | | dTs; dCs; | |
| | | | | | | | | | dAs; lnaGs; | |
| | | | | | | | | | lnaGs; lnaG- | |
| | | | | | | | | | Sup | |
| EPO-12 | 4.082061624 | 0.108572004 | EPO | in | HepG2 | 50 | qRTP | AAUGA | lnaAs; lnaAs; | EPO:2474U15 |
| | | | | vitro | | | CR | CAUCU | lnaTs; | |
| | | | | | | | | CAGGG | dGs; dAs; | |
| | | | | | | | | | dCs; dAs; | |
| | | | | | | | | | dTs; dCs; | |
| | | | | | | | | | dTs; dCs; | |
| | | | | | | | | | dAs; lnaGs; | |
| | | | | | | | | | lnaGs; lnaG- | |
| | | | | | | | | | Sup | |
| EPO-13 | 2.508608896 | 1.013506215 | EPO | in | HepG2 | 30 | qRTP | ACUGU | lnaAs; lnaCs; | EPO:2498U15 |
| | | | | vitro | | | CR | CCAGA | lnaTs; | |
| | | | | | | | | GAGCA | dGs; dTs; | |
| | | | | | | | | | dCs; dCs; | |
| | | | | | | | | | dAs; dGs; | |
| | | | | | | | | | dAs; dGs; | |
| | | | | | | | | | dAs; lnaGs; | |
| | | | | | | | | | lnaCs; lnaA- | |
| | | | | | | | | | Sup | |
| EPO-13 | 1.210055439 | 0.320831011 | EPO | in | HepG2 | 10 | qRTP | ACUGU | lnaAs; lnaCs; | EPO:2498U15 |
| | | | | vitro | | | CR | CCAGA | lnaTs; | |
| | | | | | | | | GAGCA | dGs; dTs; | |
| | | | | | | | | | dCs; dCs; | |
| | | | | | | | | | dAs; dGs; | |
| | | | | | | | | | dAs; dGs; | |
| | | | | | | | | | dAs; lnaGs; | |
| | | | | | | | | | lnaCs; lnaA- | |
| | | | | | | | | | Sup | |
| EPO-13 | 1.210055439 | 0.320831011 | EPO | in | HepG2 | 10 | qRTP | ACUGU | lnaAs; lnaCs; | EPO:2498U15 |
| | | | | vitro | | | CR | CCAGA | lnaTs; | |
| | | | | | | | | GAGCA | dGs; dTs; | |
| | | | | | | | | | dCs; dCs; | |
| | | | | | | | | | dAs; dGs; | |
| | | | | | | | | | dAs; dGs; | |
| | | | | | | | | | dAs; lnaGs; | |
| | | | | | | | | | lnaCs; lnaA- | |
| | | | | | | | | | Sup | |
| EPO-13 | 2.508608896 | 1.013506215 | EPO | in | HepG2 | 30 | qRTP | ACUGU | lnaAs; lnaCs; | EPO:2498U15 |
| | | | | vitro | | | CR | CCAGA | lnaTs; | |
| | | | | | | | | GAGCA | dGs; dTs; | |
| | | | | | | | | | dCs; dCs; | |
| | | | | | | | | | dAs; dGs; | |
| | | | | | | | | | dAs; dGs; | |
| | | | | | | | | | dAs; lnaGs; | |
| | | | | | | | | | lnaCs; lnaA- | |
| | | | | | | | | | Sup | |
| EPO-13 | 9.826302258 | 0.694384938 | EPO | in | Hep3B | 50 | qRTP | ACUGU | lnaAs; lnaCs; | EPO:2498U15 |
| | | | | vitro | | | CR | CCAGA | lnaTs; | |
| | | | | | | | | GAGCA | dGs; dTs; | |
| | | | | | | | | | dCs; dCs; | |
| | | | | | | | | | dAs; dGs; | |
| | | | | | | | | | dAs; dGs; | |
| | | | | | | | | | dAs; lnaGs; | |
| | | | | | | | | | lnaCs; lnaA- | |
| | | | | | | | | | Sup | |
| EPO-13 | 17.0882813 | 1.665233634 | EPO | in | Hep3B | 100 | qRTP | ACUGU | lnaAs; lnaCs; | EPO:2498U15 |
| | | | | vitro | | | CR | CCAGA | lnaTs; | |
| | | | | | | | | GAGCA | dGs; dTs; | |
| | | | | | | | | | dCs; dCs; | |
| | | | | | | | | | dAs; dGs; | |
| | | | | | | | | | dAs; dGs; | |
| | | | | | | | | | dAs; lnaGs; | |
| | | | | | | | | | lnaCs; lnaA- | |
| | | | | | | | | | Sup | |
| EPO-13 | 17.0882813 | 1.665233634 | EPO | in | Hep3B | 20 | qRTP | ACUGU | lnaAs; lnaCs; | EPO:2498U15 |
| | | | | vitro | | | CR | CCAGA | lnaTs; | |
| | | | | | | | | GAGCA | dGs; dTs; | |
| | | | | | | | | | dCs; dCs; | |
| | | | | | | | | | dAs; dGs; | |
| | | | | | | | | | dAs; dGs; | |
| | | | | | | | | | dAs; lnaGs; | |
| | | | | | | | | | lnaCs; lnaA- | |
| | | | | | | | | | Sup | |
| EPO-13 | 9.826302258 | 0.694384938 | EPO | in | Hep3B | 50 | qRTP | ACUGU | lnaAs; lnaCs; | EPO:2498U15 |
| | | | | vitro | | | CR | CCAGA | lnaTs; | |
| | | | | | | | | GAGCA | dGs; dTs; | |
| | | | | | | | | | dCs; dCs; | |
| | | | | | | | | | dAs; dGs; | |
| | | | | | | | | | dAs; dGs; | |
| | | | | | | | | | dAs; lnaGs; | |
| | | | | | | | | | lnaCs; lnaA- | |
| | | | | | | | | | Sup | |
| EPO-13 | 1.325224776 | | EPO | in | HepG2 | 20 | qRTP | ACUGU | lnaAs; lnaCs; | EPO:2498U15 |
| | | | | vitro | | | CR | CCAGA | lnaTs; | |
| | | | | | | | | GAGCA | dGs; dTs; | |
| | | | | | | | | | dCs; dCs; | |
| | | | | | | | | | dAs; dGs; | |
| | | | | | | | | | dAs; dGs; | |
| | | | | | | | | | dAs; lnaGs; | |
| | | | | | | | | | lnaCs; lnaA- | |
| | | | | | | | | | Sup | |
| EPO-13 | 7.906963101 | | EPO | in | HepG2 | 50 | qRTP | ACUGU | lnaAs; lnaCs; | EPO:2498U15 |
| | | | | vitro | | | CR | CCAGA | lnaTs; | |
| | | | | | | | | GAGCA | dGs; dTs; | |
| | | | | | | | | | dCs; dCs; | |
| | | | | | | | | | dAs; dGs; | |
| | | | | | | | | | dAs; dGs; | |
| | | | | | | | | | dAs; lnaGs; | |
| | | | | | | | | | lnaCs; lnaA- | |
| | | | | | | | | | Sup | |
| EPO-14 | 0.392500673 | 0.070524 | EPO | in | HepG2 | 30 | qRTP | GAAGA | dGs; lnaAs; | EPO:3270L15 |
| | | | | vitro | | | CR | GGCAG | dAs; lnaGs; | |
| | | | | | | | | AAAUU | dAs; lnaGs; | |
| | | | | | | | | | dGs; | |
| | | | | | | | | | lnaCs; dAs; | |
| | | | | | | | | | lnaGs; | |
| | | | | | | | | | dAs; lnaAs; | |
| | | | | | | | | | dAs; lnaTs; | |
| | | | | | | | | | dT- | |
| | | | | | | | | | Sup | |
| EPO-14 | 0.669976753 | 0.249799774 | EPO | in | HepG2 | 10 | qRTP | GAAGA | dGs; lnaAs; | EPO:3270L15 |
| | | | | vitro | | | CR | GGCAG | dAs; lnaGs; | |
| | | | | | | | | AAAUU | dAs; lnaGs; | |
| | | | | | | | | | dGs; | |
| | | | | | | | | | lnaCs; dAs; | |
| | | | | | | | | | lnaGs; | |
| | | | | | | | | | dAs; lnaAs; | |
| | | | | | | | | | dAs; lnaTs; | |
| | | | | | | | | | dT- | |
| | | | | | | | | | Sup | |
| EPO-14 | 0.669976753 | 0.249799774 | EPO | in | HepG2 | 10 | qRTP | GAAGA | dGs; lnaAs; | EPO:3270L15 |
| | | | | vitro | | | CR | GGCAG | dAs; lnaGs; | |
| | | | | | | | | AAAUU | dAs; lnaGs; | |
| | | | | | | | | | dGs; | |
| | | | | | | | | | lnaCs; dAs; | |
| | | | | | | | | | lnaGs; | |
| | | | | | | | | | dAs; lnaAs; | |
| | | | | | | | | | dAs; lnaTs; | |
| | | | | | | | | | dT- | |
| | | | | | | | | | Sup | |
| EPO-14 | 0.392500673 | 0.070524 | EPO | in | HepG2 | 30 | qRTP | GAAGA | dGs; lnaAs; | EPO:3270L15 |
| | | | | vitro | | | CR | GGCAG | dAs; lnaGs; | |
| | | | | | | | | AAAUU | dAs; lnaGs; | |
| | | | | | | | | | dGs; | |
| | | | | | | | | | lnaCs; dAs; | |
| | | | | | | | | | lnaGs; | |
| | | | | | | | | | dAs; lnaAs; | |
| | | | | | | | | | dAs; lnaTs; | |
| | | | | | | | | | dT- | |
| | | | | | | | | | Sup | |
| EPO-14 | 1.004121285 | 0.077629043 | EPO | in | Hep3B | 50 | qRTP | GAAGA | dGs; lnaAs; | EPO:3270L15 |
| | | | | vitro | | | CR | GGCAG | dAs; lnaGs; | |
| | | | | | | | | AAAUU | dAs; lnaGs; | |
| | | | | | | | | | dGs; | |
| | | | | | | | | | lnaCs; dAs; | |
| | | | | | | | | | lnaGs; | |
| | | | | | | | | | dAs; lnaAs; | |
| | | | | | | | | | dAs; lnaTs; | |
| | | | | | | | | | dT- | |
| | | | | | | | | | Sup | |
| EPO-14 | 1.293568743 | 0.128294158 | EPO | in | Hep3B | 100 | qRTP | GAAGA | dGs; lnaAs; | EPO:3270L15 |
| | | | | vitro | | | CR | GGCAG | dAs; lnaGs; | |
| | | | | | | | | AAAUU | dAs; lnaGs; | |
| | | | | | | | | | dGs; | |
| | | | | | | | | | lnaCs; dAs; | |
| | | | | | | | | | lnaGs; | |
| | | | | | | | | | dAs; lnaAs; | |
| | | | | | | | | | dAs; lnaTs; | |
| | | | | | | | | | dT- | |
| | | | | | | | | | Sup | |
| EPO-14 | 1.293568743 | 0.128294158 | EPO | in | Hep3B | 20 | qRTP | GAAGA | dGs; lnaAs; | EPO:3270L15 |
| | | | | vitro | | | CR | GGCAG | dAs; lnaGs; | |
| | | | | | | | | AAAUU | dAs; lnaGs; | |
| | | | | | | | | | dGs; | |
| | | | | | | | | | lnaCs; dAs; | |
| | | | | | | | | | lnaGs; | |
| | | | | | | | | | dAs; lnaAs; | |
| | | | | | | | | | dAs; lnaTs; | |
| | | | | | | | | | dT- | |
| | | | | | | | | | Sup | |
| EPO-14 | 1.004121285 | 0.077629043 | EPO | in | Hep3B | 50 | qRTP | GAAGA | dGs; lnaAs; | EPO:3270L15 |
| | | | | vitro | | | CR | GGCAG | dAs; lnaGs; | |
| | | | | | | | | AAAUU | dAs; lnaGs; | |
| | | | | | | | | | dGs; | |
| | | | | | | | | | lnaCs; dAs; | |
| | | | | | | | | | lnaGs; | |
| | | | | | | | | | dAs; lnaAs; | |
| | | | | | | | | | dAs; lnaTs; | |
| | | | | | | | | | dT- | |
| | | | | | | | | | Sup | |
| EPO-14 | 1.217159572 | 0.128064812 | EPO | in | HepG2 | 20 | qRTP | GAAGA | dGs; lnaAs; | EPO:3270L15 |
| | | | | vitro | | | CR | GGCAG | dAs; lnaGs; | |
| | | | | | | | | AAAUU | dAs; lnaGs; | |
| | | | | | | | | | dGs; | |
| | | | | | | | | | lnaCs; dAs; | |
| | | | | | | | | | lnaGs; | |
| | | | | | | | | | dAs; lnaAs; | |
| | | | | | | | | | dAs; lnaTs; | |
| | | | | | | | | | dT- | |
| | | | | | | | | | Sup | |
| EPO-14 | 2.452481969 | 0.20437713 | EPO | in | HepG2 | 50 | qRTP | GAAGA | dGs; lnaAs; | EPO:3270L15 |
| | | | | vitro | | | CR | GGCAG | dAs; lnaGs; | |
| | | | | | | | | AAAUU | dAs; lnaGs; | |
| | | | | | | | | | dGs; | |
| | | | | | | | | | lnaCs; dAs; | |
| | | | | | | | | | lnaGs; | |
| | | | | | | | | | dAs; lnaAs; | |
| | | | | | | | | | dAs; lnaTs; | |
| | | | | | | | | | dT- | |
| | | | | | | | | | Sup | |
| EPO-15 | 0.916046618 | 0.17486554 | EPO | in | HepG2 | 30 | qRTP | UGGGA | dTs; lnaGs; | EPO:3301L15 |
| | | | | vitro | | | CR | GUGUG | dGs; lnaGs; | |
| | | | | | | | | GCAUC | dAs; lnaGs; | |
| | | | | | | | | | dTs; | |
| | | | | | | | | | lnaGs; dTs; | |
| | | | | | | | | | lnaGs; | |
| | | | | | | | | | dGs; lnaCs; | |
| | | | | | | | | | dAs; lnaTs; | |
| | | | | | | | | | dC- | |
| | | | | | | | | | Sup | |
| EPO-15 | 1.172780259 | 0.014408175 | EPO | in | HepG2 | 10 | qRTP | UGGGA | dTs; lnaGs; | EPO:3301L15 |
| | | | | vitro | | | CR | GUGUG | dGs; lnaGs; | |
| | | | | | | | | GCAUC | dAs; lnaGs; | |
| | | | | | | | | | dTs; | |
| | | | | | | | | | lnaGs; dTs; | |
| | | | | | | | | | lnaGs; | |
| | | | | | | | | | dGs; lnaCs; | |
| | | | | | | | | | dAs; lnaTs; | |
| | | | | | | | | | dC- | |
| | | | | | | | | | Sup | |
| EPO-15 | 1.172780259 | 0.014408175 | EPO | in | HepG2 | 10 | qRTP | UGGGA | dTs; lnaGs; | EPO:3301L15 |
| | | | | vitro | | | CR | GUGUG | dGs; lnaGs; | |
| | | | | | | | | GCAUC | dAs; lnaGs; | |
| | | | | | | | | | dTs; | |
| | | | | | | | | | lnaGs; dTs; | |
| | | | | | | | | | lnaGs; | |
| | | | | | | | | | dGs; lnaCs; | |
| | | | | | | | | | dAs; lnaTs; | |
| | | | | | | | | | dC- | |
| | | | | | | | | | Sup | |
| EPO-15 | 0.916046618 | 0.17486554 | EPO | in | HepG2 | 30 | qRTP | UGGGA | dTs; lnaGs; | EPO:3301L15 |
| | | | | vitro | | | CR | GUGUG | dGs; lnaGs; | |
| | | | | | | | | GCAUC | dAs; lnaGs; | |
| | | | | | | | | | dTs; | |
| | | | | | | | | | lnaGs; dTs; | |
| | | | | | | | | | lnaGs; | |
| | | | | | | | | | dGs; lnaCs; | |
| | | | | | | | | | dAs; lnaTs; | |
| | | | | | | | | | dC- | |
| | | | | | | | | | Sup | |
| EPO-15 | 0.791952056 | 0.058111457 | EPO | in | Hep3B | 50 | qRTP | UGGGA | dTs; lnaGs; | EPO:3301L15 |
| | | | | vitro | | | CR | GUGUG | dGs; lnaGs; | |
| | | | | | | | | GCAUC | dAs; lnaGs; | |
| | | | | | | | | | dTs; | |
| | | | | | | | | | lnaGs; dTs; | |
| | | | | | | | | | lnaGs; | |
| | | | | | | | | | dGs; lnaCs; | |
| | | | | | | | | | dAs; lnaTs; | |
| | | | | | | | | | dC- | |
| | | | | | | | | | Sup | |
| EPO-15 | 1.102025259 | 0.013691908 | EPO | in | Hep3B | 100 | qRTP | UGGGA | dTs; lnaGs; | EPO:3301L15 |
| | | | | vitro | | | CR | GUGUG | dGs; lnaGs; | |
| | | | | | | | | GCAUC | dAs; lnaGs; | |
| | | | | | | | | | dTs; | |
| | | | | | | | | | lnaGs; dTs; | |
| | | | | | | | | | lnaGs; | |
| | | | | | | | | | dGs; lnaCs; | |
| | | | | | | | | | dAs; lnaTs; | |
| | | | | | | | | | dC- | |
| | | | | | | | | | Sup | |
| EPO-15 | 0.832377173 | 0.107232448 | EPO | in | Hepa1-6 | 30 | qRTP | UGGGA | dTs; lnaGs; | EPO:3301L15 |
| | | | | vitro | | | CR | GUGUG | dGs; lnaGs; | |
| | | | | | | | | GCAUC | dAs; lnaGs; | |
| | | | | | | | | | dTs; | |
| | | | | | | | | | lnaGs; dTs; | |
| | | | | | | | | | lnaGs; | |
| | | | | | | | | | dGs; lnaCs; | |
| | | | | | | | | | dAs; lnaTs; | |
| | | | | | | | | | dC- | |
| | | | | | | | | | Sup | |
| EPO-15 | 1.564981439 | 0.26079836 | EPO | in | Hepa1-6 | 10 | qRTP | UGGGA | dTs; lnaGs; | EPO:3301L15 |
| | | | | vitro | | | CR | GUGUG | dGs; lnaGs; | |
| | | | | | | | | GCAUC | dAs; lnaGs; | |
| | | | | | | | | | dTs; | |
| | | | | | | | | | lnaGs; dTs; | |
| | | | | | | | | | lnaGs; | |
| | | | | | | | | | dGs; lnaCs; | |
| | | | | | | | | | dAs; lnaTs; | |
| | | | | | | | | | dC- | |
| | | | | | | | | | Sup | |
| EPO-15 | 1.102025259 | 0.013691908 | EPO | in | Hep3B | 20 | qRTP | UGGGA | dTs; lnaGs; | EPO:3301L15 |
| | | | | vitro | | | CR | GUGUG | dGs; lnaGs; | |
| | | | | | | | | GCAUC | dAs; lnaGs; | |
| | | | | | | | | | dTs; | |
| | | | | | | | | | lnaGs; dTs; | |
| | | | | | | | | | lnaGs; | |
| | | | | | | | | | dGs; lnaCs; | |
| | | | | | | | | | dAs; lnaTs; | |
| | | | | | | | | | dC- | |
| | | | | | | | | | Sup | |
| EPO-15 | 0.791952056 | 0.058111457 | EPO | in | Hep3B | 50 | qRTP | UGGGA | dTs; lnaGs; | EPO:3301L15 |
| | | | | vitro | | | CR | GUGUG | dGs; lnaGs; | |
| | | | | | | | | GCAUC | dAs; lnaGs; | |
| | | | | | | | | | dTs; | |
| | | | | | | | | | lnaGs; dTs; | |
| | | | | | | | | | lnaGs; | |
| | | | | | | | | | dGs; lnaCs; | |
| | | | | | | | | | dAs; lnaTs; | |
| | | | | | | | | | dC- | |
| | | | | | | | | | Sup | |
| EPO-15 | 0.832377173 | 0.107232448 | EPO | in | Hepa1-6 | 30 | qRTP | UGGGA | dTs; lnaGs; | EPO:3301L15 |
| | | | | vitro | | | CR | GUGUG | dGs; lnaGs; | |
| | | | | | | | | GCAUC | dAs; lnaGs; | |
| | | | | | | | | | dTs; | |
| | | | | | | | | | lnaGs; dTs; | |
| | | | | | | | | | lnaGs; | |
| | | | | | | | | | dGs; lnaCs; | |
| | | | | | | | | | dAs; lnaTs; | |
| | | | | | | | | | dC- | |
| | | | | | | | | | Sup | |
| EPO-15 | 1.564981439 | 0.26079836 | EPO | in | Hepa1-6 | 10 | qRTP | UGGGA | dTs; lnaGs; | EPO:3301L15 |
| | | | | vitro | | | CR | GUGUG | dGs; lnaGs; | |
| | | | | | | | | GCAUC | dAs; lnaGs; | |
| | | | | | | | | | dTs; | |
| | | | | | | | | | lnaGs; dTs; | |
| | | | | | | | | | lnaGs; | |
| | | | | | | | | | dGs; lnaCs; | |
| | | | | | | | | | dAs; lnaTs; | |
| | | | | | | | | | dC- | |
| | | | | | | | | | Sup | |
| EPO-15 | 1.394655516 | 0.075172884 | EPO | in | HepG2 | 20 | qRTP | UGGGA | dTs; lnaGs; | EPO:3301L15 |
| | | | | vitro | | | CR | GUGUG | dGs; lnaGs; | |
| | | | | | | | | GCAUC | dAs; lnaGs; | |
| | | | | | | | | | dTs; | |
| | | | | | | | | | lnaGs; dTs; | |
| | | | | | | | | | lnaGs; | |
| | | | | | | | | | dGs; lnaCs; | |
| | | | | | | | | | dAs; lnaTs; | |
| | | | | | | | | | dC- | |
| | | | | | | | | | Sup | |
| EPO-15 | 4.288068999 | 0.206053864 | EPO | in | HepG2 | 50 | qRTP | UGGGA | dTs; lnaGs; | EPO:3301L15 |
| | | | | vitro | | | CR | GUGUG | dGs; lnaGs; | |
| | | | | | | | | GCAUC | dAs; lnaGs; | |
| | | | | | | | | | dTs; | |
| | | | | | | | | | lnaGs; dTs; | |
| | | | | | | | | | lnaGs; | |
| | | | | | | | | | dGs; lnaCs; | |
| | | | | | | | | | dAs; lnaTs; | |
| | | | | | | | | | dC- | |
| | | | | | | | | | Sup | |
| EPO-16 | 1.348470298 | 0.427258145 | EPO | in | HepG2 | 30 | qRTP | GCGAG | dGs; lnaCs; | EPO:3334L15 |
| | | | | vitro | | | CR | GAUGU | dGs; lnaAs; | |
| | | | | | | | | GCAUU | dGs; lnaGs; | |
| | | | | | | | | | dAs; | |
| | | | | | | | | | lnaTs; dGs; | |
| | | | | | | | | | lnaTs; | |
| | | | | | | | | | dGs; lnaCs; | |
| | | | | | | | | | dAs; lnaTs; | |
| | | | | | | | | | dT- | |
| | | | | | | | | | Sup | |
| EPO-16 | 1.470425863 | 0.176832405 | EPO | in | HepG2 | 10 | qRTP | GCGAG | dGs; lnaCs; | EPO:3334L15 |
| | | | | vitro | | | CR | GAUGU | dGs; lnaAs; | |
| | | | | | | | | GCAUU | dGs; lnaGs; | |
| | | | | | | | | | dAs; | |
| | | | | | | | | | lnaTs; dGs; | |
| | | | | | | | | | lnaTs; | |
| | | | | | | | | | dGs; lnaCs; | |
| | | | | | | | | | dAs; lnaTs; | |
| | | | | | | | | | dT- | |
| | | | | | | | | | Sup | |
| EPO-16 | 1.470425863 | 0.176832405 | EPO | in | HepG2 | 10 | qRTP | GCGAG | dGs; lnaCs; | EPO:3334L15 |
| | | | | vitro | | | CR | GAUGU | dGs; lnaAs; | |
| | | | | | | | | GCAUU | dGs; lnaGs; | |
| | | | | | | | | | dAs; | |
| | | | | | | | | | lnaTs; dGs; | |
| | | | | | | | | | lnaTs; | |
| | | | | | | | | | dGs; lnaCs; | |
| | | | | | | | | | dAs; lnaTs; | |
| | | | | | | | | | dT- | |
| | | | | | | | | | Sup | |
| EPO-16 | 1.348470298 | 0.427258145 | EPO | in | HepG2 | 30 | qRTP | GCGAG | dGs; lnaCs; | EPO:3334L15 |
| | | | | vitro | | | CR | GAUGU | dGs; lnaAs; | |
| | | | | | | | | GCAUU | dGs; lnaGs; | |
| | | | | | | | | | dAs; | |
| | | | | | | | | | lnaTs; dGs; | |
| | | | | | | | | | lnaTs; | |
| | | | | | | | | | dGs; lnaCs; | |
| | | | | | | | | | dAs; lnaTs; | |
| | | | | | | | | | dT- | |
| | | | | | | | | | Sup | |
| EPO-16 | 4.27760443 | 0.086564529 | EPO | in | Hep3B | 50 | qRTP | GCGAG | dGs; lnaCs; | EPO:3334L15 |
| | | | | vitro | | | CR | GAUGU | dGs; lnaAs; | |
| | | | | | | | | GCAUU | dGs; lnaGs; | |
| | | | | | | | | | dAs; | |
| | | | | | | | | | lnaTs; dGs; | |
| | | | | | | | | | lnaTs; | |
| | | | | | | | | | dGs; lnaCs; | |
| | | | | | | | | | dAs; lnaTs; | |
| | | | | | | | | | dT- | |
| | | | | | | | | | Sup | |
| EPO-16 | 5.917607222 | 0.171651614 | EPO | in | Hep3B | 100 | qRTP | GCGAG | dGs; lnaCs; | EPO:3334L15 |
| | | | | vitro | | | CR | GAUGU | dGs; lnaAs; | |
| | | | | | | | | GCAUU | dGs; lnaGs; | |
| | | | | | | | | | dAs; | |
| | | | | | | | | | lnaTs; dGs; | |
| | | | | | | | | | lnaTs; | |
| | | | | | | | | | dGs; lnaCs; | |
| | | | | | | | | | dAs; lnaTs; | |
| | | | | | | | | | dT- | |
| | | | | | | | | | Sup | |
| EPO-16 | 5.917607222 | 0.171651614 | EPO | in | Hep3B | 20 | qRTP | GCGAG | dGs; lnaCs; | EPO:3334L15 |
| | | | | vitro | | | CR | GAUGU | dGs; lnaAs; | |
| | | | | | | | | GCAUU | dGs; lnaGs; | |
| | | | | | | | | | dAs; | |
| | | | | | | | | | lnaTs; dGs; | |
| | | | | | | | | | lnaTs; | |
| | | | | | | | | | dGs; lnaCs; | |
| | | | | | | | | | dAs; lnaTs; | |
| | | | | | | | | | dT- | |
| | | | | | | | | | Sup | |
| EPO-16 | 4.27760443 | 0.086564529 | EPO | in | Hep3B | 50 | qRTP | GCGAG | dGs; lnaCs; | EPO:3334L15 |
| | | | | vitro | | | CR | GAUGU | dGs; lnaAs; | |
| | | | | | | | | GCAUU | dGs; lnaGs; | |
| | | | | | | | | | dAs; | |
| | | | | | | | | | lnaTs; dGs; | |
| | | | | | | | | | lnaTs; | |
| | | | | | | | | | dGs; lnaCs; | |
| | | | | | | | | | dAs; lnaTs; | |
| | | | | | | | | | dT- | |
| | | | | | | | | | Sup | |
| EPO-16 | 2.009301778 | 0.149514683 | EPO | in | HepG2 | 20 | qRTP | GCGAG | dGs; lnaCs; | EPO:3334L15 |
| | | | | vitro | | | CR | GAUGU | dGs; lnaAs; | |
| | | | | | | | | GCAUU | dGs; lnaGs; | |
| | | | | | | | | | dAs; | |
| | | | | | | | | | lnaTs; dGs; | |
| | | | | | | | | | lnaTs; | |
| | | | | | | | | | dGs; lnaCs; | |
| | | | | | | | | | dAs; lnaTs; | |
| | | | | | | | | | dT- | |
| | | | | | | | | | Sup | |
| EPO-16 | 4.647738212 | 0.126425444 | EPO | in | HepG2 | 50 | qRTP | GCGAG | dGs; lnaCs; | EPO:3334L15 |
| | | | | vitro | | | CR | GAUGU | dGs; lnaAs; | |
| | | | | | | | | GCAUU | dGs; lnaGs; | |
| | | | | | | | | | dAs; | |
| | | | | | | | | | lnaTs; dGs; | |
| | | | | | | | | | lnaTs; | |
| | | | | | | | | | dGs; lnaCs; | |
| | | | | | | | | | dAs; lnaTs; | |
| | | | | | | | | | dT- | |
| | | | | | | | | | Sup | |
| EPO-16f | NA | NA | EPO | NA | NA | 0 | NA | GCGAG | dGs; fluCs; | EPO:3334L15 |
| | | | | | | | | GAUGU | dGs; fluAs; | |
| | | | | | | | | GCAUU | dGs; fluGs; | |
| | | | | | | | | | dAs; | |
| | | | | | | | | | fluUs; dGs; | |
| | | | | | | | | | fluUs; dGs; | |
| | | | | | | | | | fluCs; | |
| | | | | | | | | | dAs; fluUs; | |
| | | | | | | | | | dT-Sup | |
| EPO- | NA | NA | EPO | NA | NA | 0 | NA | GCGAG | dGs; omeCs; | EPO:3334L15 |
| 16m | | | | | | | | GAUGU | dGs; omeAs; | |
| | | | | | | | | GCAUU | dGs; | |
| | | | | | | | | | omeGs; | |
| | | | | | | | | | dAs; omeUs; | |
| | | | | | | | | | dGs; | |
| | | | | | | | | | omeUs; dGs; | |
| | | | | | | | | | omeCs; | |
| | | | | | | | | | dAs; omeUs; | |
| | | | | | | | | | dT- | |
| | | | | | | | | | Sup | |
| EPO-17 | 0.943510948 | 0.209097712 | EPO | in | HepG2 | 30 | qRTP | UUAGC | dTs; lnaTs; | EPO:3337L15 |
| | | | | vitro | | | CR | GAGGA | dAs; lnaGs; | |
| | | | | | | | | UGUGC | dCs; lnaGs; | |
| | | | | | | | | | dAs; lnaGs; | |
| | | | | | | | | | dGs; | |
| | | | | | | | | | lnaAs; dTs; | |
| | | | | | | | | | lnaGs; | |
| | | | | | | | | | dTs; lnaGs; | |
| | | | | | | | | | dC-Sup | |
| EPO-17 | 1.056092956 | 0.116368233 | EPO | in | HepG2 | 10 | qRTP | UUAGC | dTs; lnaTs; | EPO:3337L15 |
| | | | | vitro | | | CR | GAGGA | dAs; lnaGs; | |
| | | | | | | | | UGUGC | dCs; lnaGs; | |
| | | | | | | | | | dAs; lnaGs; | |
| | | | | | | | | | dGs; | |
| | | | | | | | | | lnaAs; dTs; | |
| | | | | | | | | | lnaGs; | |
| | | | | | | | | | dTs; lnaGs; | |
| | | | | | | | | | dC-Sup | |
| EPO-17 | 1.056092956 | 0.116368233 | EPO | in | HepG2 | 10 | qRTP | UUAGC | dTs; lnaTs; | EPO:3337L15 |
| | | | | vitro | | | CR | GAGGA | dAs; lnaGs; | |
| | | | | | | | | UGUGC | dCs; lnaGs; | |
| | | | | | | | | | dAs; lnaGs; | |
| | | | | | | | | | dGs; | |
| | | | | | | | | | lnaAs; dTs; | |
| | | | | | | | | | lnaGs; | |
| | | | | | | | | | dTs; lnaGs; | |
| | | | | | | | | | dC-Sup | |
| EPO-17 | 0.943510948 | 0.209097712 | EPO | in | HepG2 | 30 | qRTP | UUAGC | dTs; lnaTs; | EPO:3337L15 |
| | | | | vitro | | | CR | GAGGA | dAs; lnaGs; | |
| | | | | | | | | UGUGC | dCs; lnaGs; | |
| | | | | | | | | | dAs; lnaGs; | |
| | | | | | | | | | dGs; | |
| | | | | | | | | | lnaAs; dTs; | |
| | | | | | | | | | lnaGs; | |
| | | | | | | | | | dTs; lnaGs; | |
| | | | | | | | | | dC-Sup | |
| EPO-17 | 2.085259701 | 0.189922217 | EPO | in | Hep3B | 50 | qRTP | UUAGC | dTs; lnaTs; | EPO:3337L15 |
| | | | | vitro | | | CR | GAGGA | dAs; lnaGs; | |
| | | | | | | | | UGUGC | dCs; lnaGs; | |
| | | | | | | | | | dAs; lnaGs; | |
| | | | | | | | | | dGs; | |
| | | | | | | | | | lnaAs; dTs; | |
| | | | | | | | | | lnaGs; | |
| | | | | | | | | | dTs; lnaGs; | |
| | | | | | | | | | dC-Sup | |
| EPO-17 | 2.626108832 | 0.105562503 | EPO | in | Hep3B | 100 | qRTP | UUAGC | dTs; lnaTs; | EPO:3337L15 |
| | | | | vitro | | | CR | GAGGA | dAs; lnaGs; | |
| | | | | | | | | UGUGC | dCs; lnaGs; | |
| | | | | | | | | | dAs; lnaGs; | |
| | | | | | | | | | dGs; | |
| | | | | | | | | | lnaAs; dTs; | |
| | | | | | | | | | lnaGs; | |
| | | | | | | | | | dTs; lnaGs; | |
| | | | | | | | | | dC-Sup | |
| EPO-17 | 2.626108832 | 0.105562503 | EPO | in | Hep3B | 20 | qRTP | UUAGC | dTs; lnaTs; | EPO:3337L15 |
| | | | | vitro | | | CR | GAGGA | dAs; lnaGs; | |
| | | | | | | | | UGUGC | dCs; lnaGs; | |
| | | | | | | | | | dAs; lnaGs; | |
| | | | | | | | | | dGs; | |
| | | | | | | | | | lnaAs; dTs; | |
| | | | | | | | | | lnaGs; | |
| | | | | | | | | | dTs; lnaGs; | |
| | | | | | | | | | dC-Sup | |
| EPO-17 | 2.085259701 | 0.189922217 | EPO | in | Hep3B | 50 | qRTP | UUAGC | dTs; lnaTs; | EPO:3337L15 |
| | | | | vitro | | | CR | GAGGA | dAs; lnaGs; | |
| | | | | | | | | UGUGC | dCs; lnaGs; | |
| | | | | | | | | | dAs; lnaGs; | |
| | | | | | | | | | dGs; | |
| | | | | | | | | | lnaAs; dTs; | |
| | | | | | | | | | lnaGs; | |
| | | | | | | | | | dTs; lnaGs; | |
| | | | | | | | | | dC-Sup | |
| EPO-17 | 1.235291617 | 0.056635094 | EPO | in | HepG2 | 20 | qRTP | UUAGC | dTs; lnaTs; | EPO:3337L15 |
| | | | | vitro | | | CR | GAGGA | dAs; lnaGs; | |
| | | | | | | | | UGUGC | dCs; lnaGs; | |
| | | | | | | | | | dAs; lnaGs; | |
| | | | | | | | | | dGs; | |
| | | | | | | | | | lnaAs; dTs; | |
| | | | | | | | | | lnaGs; | |
| | | | | | | | | | dTs; lnaGs; | |
| | | | | | | | | | dC-Sup | |
| EPO-17 | 4.027720697 | 0.39084399 | EPO | in | HepG2 | 50 | qRTP | UUAGC | dTs; lnaTs; | EPO:3337L15 |
| | | | | vitro | | | CR | GAGGA | dAs; lnaGs; | |
| | | | | | | | | UGUGC | dCs; lnaGs; | |
| | | | | | | | | | dAs; lnaGs; | |
| | | | | | | | | | dGs; | |
| | | | | | | | | | lnaAs; dTs; | |
| | | | | | | | | | lnaGs; | |
| | | | | | | | | | dTs; lnaGs; | |
| | | | | | | | | | dC-Sup | |
| EPO-18 | 1.524420034 | 0.412241856 | EPO | in | HepG2 | 30 | qRTP | ACUCC | dAs; lnaCs; | EPO:3558L15 |
| | | | | vitro | | | CR | AGCCU | dTs; lnaCs; | |
| | | | | | | | | GGGCA | dCs; lnaAs; | |
| | | | | | | | | | dGs; lnaCs; | |
| | | | | | | | | | dCs; | |
| | | | | | | | | | lnaTs; dGs; | |
| | | | | | | | | | lnaGs; | |
| | | | | | | | | | dGs; lnaCs; | |
| | | | | | | | | | dA- | |
| | | | | | | | | | Sup | |
| EPO-18 | 1.531668045 | 0.319774164 | EPO | in | HepG2 | 10 | qRTP | ACUCC | dAs; lnaCs; | EPO:3558L15 |
| | | | | vitro | | | CR | AGCCU | dTs; lnaCs; | |
| | | | | | | | | GGGCA | dCs; lnaAs; | |
| | | | | | | | | | dGs; lnaCs; | |
| | | | | | | | | | dCs; | |
| | | | | | | | | | lnaTs; dGs; | |
| | | | | | | | | | lnaGs; | |
| | | | | | | | | | dGs; lnaCs; | |
| | | | | | | | | | dA- | |
| | | | | | | | | | Sup | |
| EPO-18 | 1.531668045 | 0.319774164 | EPO | in | HepG2 | 10 | qRTP | ACUCC | dAs; lnaCs; | EPO:3558L15 |
| | | | | vitro | | | CR | AGCCU | dTs; lnaCs; | |
| | | | | | | | | GGGCA | dCs; lnaAs; | |
| | | | | | | | | | dGs; lnaCs; | |
| | | | | | | | | | dCs; | |
| | | | | | | | | | lnaTs; dGs; | |
| | | | | | | | | | lnaGs; | |
| | | | | | | | | | dGs; lnaCs; | |
| | | | | | | | | | dA- | |
| | | | | | | | | | Sup | |
| EPO-18 | 1.524420034 | 0.412241856 | EPO | in | HepG2 | 30 | qRTP | ACUCC | dAs; lnaCs; | EPO:3558L15 |
| | | | | vitro | | | CR | AGCCU | dTs; lnaCs; | |
| | | | | | | | | GGGCA | dCs; lnaAs; | |
| | | | | | | | | | dGs; lnaCs; | |
| | | | | | | | | | dCs; | |
| | | | | | | | | | lnaTs; dGs; | |
| | | | | | | | | | lnaGs; | |
| | | | | | | | | | dGs; lnaCs; | |
| | | | | | | | | | dA- | |
| | | | | | | | | | Sup | |
| EPO-18 | 4.673805293 | 0.270509774 | EPO | in | Hep3B | 50 | qRTP | ACUCC | dAs; lnaCs; | EPO:3558L15 |
| | | | | vitro | | | CR | AGCCU | dTs; lnaCs; | |
| | | | | | | | | GGGCA | dCs; lnaAs; | |
| | | | | | | | | | dGs; lnaCs; | |
| | | | | | | | | | dCs; | |
| | | | | | | | | | lnaTs; dGs; | |
| | | | | | | | | | lnaGs; | |
| | | | | | | | | | dGs; lnaCs; | |
| | | | | | | | | | dA- | |
| | | | | | | | | | Sup | |
| EPO-18 | 8.422360496 | 0.732346402 | EPO | in | Hep3B | 100 | qRTP | ACUCC | dAs; lnaCs; | EPO:3558L15 |
| | | | | vitro | | | CR | AGCCU | dTs; lnaCs; | |
| | | | | | | | | GGGCA | dCs; lnaAs; | |
| | | | | | | | | | dGs; lnaCs; | |
| | | | | | | | | | dCs; | |
| | | | | | | | | | lnaTs; dGs; | |
| | | | | | | | | | lnaGs; | |
| | | | | | | | | | dGs; lnaCs; | |
| | | | | | | | | | dA- | |
| | | | | | | | | | Sup | |
| EPO-18 | 8.422360496 | 0.732346402 | EPO | in | Hep3B | 20 | qRTP | ACUCC | dAs; lnaCs; | EPO:3558L15 |
| | | | | vitro | | | CR | AGCCU | dTs; lnaCs; | |
| | | | | | | | | GGGCA | dCs; lnaAs; | |
| | | | | | | | | | dGs; lnaCs; | |
| | | | | | | | | | dCs; | |
| | | | | | | | | | lnaTs; dGs; | |
| | | | | | | | | | lnaGs; | |
| | | | | | | | | | dGs; lnaCs; | |
| | | | | | | | | | dA- | |
| | | | | | | | | | Sup | |
| EPO-18 | 4.673805293 | 0.270509774 | EPO | in | Hep3B | 50 | qRTP | ACUCC | dAs; lnaCs; | EPO:3558L15 |
| | | | | vitro | | | CR | AGCCU | dTs; lnaCs; | |
| | | | | | | | | GGGCA | dCs; lnaAs; | |
| | | | | | | | | | dGs; lnaCs; | |
| | | | | | | | | | dCs; | |
| | | | | | | | | | lnaTs; dGs; | |
| | | | | | | | | | lnaGs; | |
| | | | | | | | | | dGs; lnaCs; | |
| | | | | | | | | | dA- | |
| | | | | | | | | | Sup | |
| EPO-18 | 1.858771171 | 0.234880071 | EPO | in | HepG2 | 20 | qRTP | ACUCC | dAs; lnaCs; | EPO:3558L15 |
| | | | | vitro | | | CR | AGCCU | dTs; lnaCs; | |
| | | | | | | | | GGGCA | dCs; lnaAs; | |
| | | | | | | | | | dGs; lnaCs; | |
| | | | | | | | | | dCs; | |
| | | | | | | | | | lnaTs; dGs; | |
| | | | | | | | | | lnaGs; | |
| | | | | | | | | | dGs; lnaCs; | |
| | | | | | | | | | dA- | |
| | | | | | | | | | Sup | |
| EPO-18 | 5.49709315 | 0.3025034 | EPO | in | HepG2 | 50 | qRTP | ACUCC | dAs; lnaCs; | EPO:3558L15 |
| | | | | vitro | | | CR | AGCCU | dTs; lnaCs; | |
| | | | | | | | | GGGCA | dCs; lnaAs; | |
| | | | | | | | | | dGs; lnaCs; | |
| | | | | | | | | | dCs; | |
| | | | | | | | | | lnaTs; dGs; | |
| | | | | | | | | | lnaGs; | |
| | | | | | | | | | dGs; lnaCs; | |
| | | | | | | | | | dA- | |
| | | | | | | | | | Sup | |
| EPO-18- | NA | NA | EPO | NA | NA | 0 | NA | ACUCC | bio; dAs; lnaCs; | EPO:3558L15 |
| 5′biotin | | | | | | | | AGCCU | dTs; | |
| | | | | | | | | GGGCA | lnaCs; dCs; | |
| | | | | | | | | | lnaAs; dGs; | |
| | | | | | | | | | lnaCs; | |
| | | | | | | | | | dCs; lnaTs; | |
| | | | | | | | | | dGs; lnaGs; | |
| | | | | | | | | | dGs; lnaCs; | |
| | | | | | | | | | dA- | |
| | | | | | | | | | Sup | |
| EPO-18f | NA | NA | EPO | NA | NA | 0 | NA | ACUCC | dAs; fluCs; | EPO:3558L15 |
| | | | | | | | | AGCCU | dTs; fluCs; | |
| | | | | | | | | GGGCA | dCs; fluAs; | |
| | | | | | | | | | dGs; fluCs; | |
| | | | | | | | | | dCs; fluUs; | |
| | | | | | | | | | dGs; | |
| | | | | | | | | | fluGs; dGs; | |
| | | | | | | | | | fluCs; | |
| | | | | | | | | | dA-Sup | |
| EPO- | NA | NA | EPO | NA | NA | 0 | NA | ACUCC | dAs; omeCs; | EPO:3558L15 |
| 18m | | | | | | | | AGCCU | dTs; omeCs; | |
| | | | | | | | | GGGCA | dCs; | |
| | | | | | | | | | omeAs; | |
| | | | | | | | | | dGs; omeCs; | |
| | | | | | | | | | dCs; omeUs; | |
| | | | | | | | | | dGs; | |
| | | | | | | | | | omeGs; | |
| | | | | | | | | | dGs; omeCs; | |
| | | | | | | | | | dA- | |
| | | | | | | | | | Sup | |
| EPO-19 | 0.863390977 | 0.036414307 | EPO | in | HepG2 | 30 | qRTP | UAAAA | dTs; lnaAs; | EPO:3523L15 |
| | | | | vitro | | | CR | ACAAAC | dAs; lnaAs; | |
| | | | | | | | | AAAC | dAs; lnaAs; | |
| | | | | | | | | | dCs; lnaAs; | |
| | | | | | | | | | dAs; | |
| | | | | | | | | | lnaAs; dCs; | |
| | | | | | | | | | lnaAs; | |
| | | | | | | | | | dAs; lnaAs; | |
| | | | | | | | | | dC-Sup | |
| EPO-19 | 1.125911235 | 0.042739497 | EPO | in | HepG2 | 10 | qRTP | UAAAA | dTs; lnaAs; | EPO:3523L15 |
| | | | | vitro | | | CR | ACAAAC | dAs; lnaAs; | |
| | | | | | | | | AAAC | dAs; lnaAs; | |
| | | | | | | | | | dCs; lnaAs; | |
| | | | | | | | | | dAs; | |
| | | | | | | | | | lnaAs; dCs; | |
| | | | | | | | | | lnaAs; | |
| | | | | | | | | | dAs; lnaAs; | |
| | | | | | | | | | dC-Sup | |
| EPO-19 | 1.125911235 | 0.042739497 | EPO | in | HepG2 | 10 | qRTP | UAAAA | dTs; lnaAs; | EPO:3523L15 |
| | | | | vitro | | | CR | ACAAAC | dAs; lnaAs; | |
| | | | | | | | | AAAC | dAs; lnaAs; | |
| | | | | | | | | | dCs; lnaAs; | |
| | | | | | | | | | dAs; | |
| | | | | | | | | | lnaAs; dCs; | |
| | | | | | | | | | lnaAs; | |
| | | | | | | | | | dAs; lnaAs; | |
| | | | | | | | | | dC-Sup | |
| EPO-19 | 0.863390977 | 0.036414307 | EPO | in | HepG2 | 30 | qRTP | UAAAA | dTs; lnaAs; | EPO:3523L15 |
| | | | | vitro | | | CR | ACAAAC | dAs; lnaAs; | |
| | | | | | | | | AAAC | dAs; lnaAs; | |
| | | | | | | | | | dCs; lnaAs; | |
| | | | | | | | | | dAs; | |
| | | | | | | | | | lnaAs; dCs; | |
| | | | | | | | | | lnaAs; | |
| | | | | | | | | | dAs; lnaAs; | |
| | | | | | | | | | dC-Sup | |
| EPO-19 | 1.69257533 | 0.023937937 | EPO | in | Hep3B | 50 | qRTP | UAAAA | dTs; lnaAs; | EPO:3523L15 |
| | | | | vitro | | | CR | ACAAAC | dAs; lnaAs; | |
| | | | | | | | | AAAC | dAs; lnaAs; | |
| | | | | | | | | | dCs; lnaAs; | |
| | | | | | | | | | dAs; | |
| | | | | | | | | | lnaAs; dCs; | |
| | | | | | | | | | lnaAs; | |
| | | | | | | | | | dAs; lnaAs; | |
| | | | | | | | | | dC-Sup | |
| EPO-19 | 1.78818333 | 0.014627228 | EPO | in | Hep3B | 100 | qRTP | UAAAA | dTs; lnaAs; | EPO:3523L15 |
| | | | | vitro | | | CR | ACAAAC | dAs; lnaAs; | |
| | | | | | | | | AAAC | dAs; lnaAs; | |
| | | | | | | | | | dCs; lnaAs; | |
| | | | | | | | | | dAs; | |
| | | | | | | | | | lnaAs; dCs; | |
| | | | | | | | | | lnaAs; | |
| | | | | | | | | | dAs; lnaAs; | |
| | | | | | | | | | dC-Sup | |
| EPO-19 | 1.78818333 | | EPO | in | Hep3B | 20 | qRTP | UAAAA | dTs; lnaAs; | EPO:3523L15 |
| | | | | vitro | | | CR | ACAAAC | dAs; lnaAs; | |
| | | | | | | | | AAAC | dAs; lnaAs; | |
| | | | | | | | | | dCs; lnaAs; | |
| | | | | | | | | | dAs; | |
| | | | | | | | | | lnaAs; dCs; | |
| | | | | | | | | | lnaAs; | |
| | | | | | | | | | dAs; lnaAs; | |
| | | | | | | | | | dC-Sup | |
| EPO-19 | 1.69257533 | 0.023937937 | EPO | in | Hep3B | 50 | qRTP | UAAAA | dTs; lnaAs; | EPO:3523L15 |
| | | | | vitro | | | CR | ACAAAC | dAs; lnaAs; | |
| | | | | | | | | AAAC | dAs; lnaAs; | |
| | | | | | | | | | dCs; lnaAs; | |
| | | | | | | | | | dAs; | |
| | | | | | | | | | lnaAs; dCs; | |
| | | | | | | | | | lnaAs; | |
| | | | | | | | | | dAs; lnaAs; | |
| | | | | | | | | | dC-Sup | |
| EPO-19 | 1.658343015 | 0.135404111 | EPO | in | HepG2 | 20 | qRTP | UAAAA | dTs; lnaAs; | EPO:3523L15 |
| | | | | vitro | | | CR | ACAAAC | dAs; lnaAs; | |
| | | | | | | | | AAAC | dAs; lnaAs; | |
| | | | | | | | | | dCs; lnaAs; | |
| | | | | | | | | | dAs; | |
| | | | | | | | | | lnaAs; dCs; | |
| | | | | | | | | | lnaAs; | |
| | | | | | | | | | dAs; lnaAs; | |
| | | | | | | | | | dC-Sup | |
| EPO-19 | 3.710933483 | 0.18784157 | EPO | in | HepG2 | 50 | qRTP | UAAAA | dTs; lnaAs; | EPO:3523L15 |
| | | | | vitro | | | CR | ACAAAC | dAs; lnaAs; | |
| | | | | | | | | AAAC | dAs; lnaAs; | |
| | | | | | | | | | dCs; lnaAs; | |
| | | | | | | | | | dAs; | |
| | | | | | | | | | lnaAs; dCs; | |
| | | | | | | | | | lnaAs; | |
| | | | | | | | | | dAs; lnaAs; | |
| | | | | | | | | | dC-Sup | |
| EPO-20 | 1.017188517 | 0.169760757 | EPO | in | HepG2 | 30 | qRTP | UCACA | dTs; lnaCs; | EPO:3500L15 |
| | | | | vitro | | | CR | AAUAU | dAs; lnaCs; | |
| | | | | | | | | AUAAA | dAs; lnaAs; | |
| | | | | | | | | | dAs; lnaTs; | |
| | | | | | | | | | dAs; | |
| | | | | | | | | | lnaTs; dAs; | |
| | | | | | | | | | lnaTs; dAs; | |
| | | | | | | | | | lnaAs; | |
| | | | | | | | | | dA-Sup | |
| EPO-20 | 1.015087817 | 0.197057701 | EPO | in | HepG2 | 10 | qRTP | UCACA | dTs; lnaCs; | EPO:3500L15 |
| | | | | vitro | | | CR | AAUAU | dAs; lnaCs; | |
| | | | | | | | | AUAAA | dAs; lnaAs; | |
| | | | | | | | | | dAs; lnaTs; | |
| | | | | | | | | | dAs; | |
| | | | | | | | | | lnaTs; dAs; | |
| | | | | | | | | | lnaTs; dAs; | |
| | | | | | | | | | lnaAs; | |
| | | | | | | | | | dA-Sup | |
| EPO-20 | 1.015087817 | 0.197057701 | EPO | in | HepG2 | 10 | qRTP | UCACA | dTs; lnaCs; | EPO:3500L15 |
| | | | | vitro | | | CR | AAUAU | dAs; lnaCs; | |
| | | | | | | | | AUAAA | dAs; lnaAs; | |
| | | | | | | | | | dAs; lnaTs; | |
| | | | | | | | | | dAs; | |
| | | | | | | | | | lnaTs; dAs; | |
| | | | | | | | | | lnaTs; dAs; | |
| | | | | | | | | | lnaAs; | |
| | | | | | | | | | dA-Sup | |
| EPO-20 | 1.017188517 | 0.169760757 | EPO | in | HepG2 | 30 | qRTP | UCACA | dTs; lnaCs; | EPO:3500L15 |
| | | | | vitro | | | CR | AAUAU | dAs; lnaCs; | |
| | | | | | | | | AUAAA | dAs; lnaAs; | |
| | | | | | | | | | dAs; lnaTs; | |
| | | | | | | | | | dAs; | |
| | | | | | | | | | lnaTs; dAs; | |
| | | | | | | | | | lnaTs; dAs; | |
| | | | | | | | | | lnaAs; | |
| | | | | | | | | | dA-Sup | |
| EPO-20 | 1.715732386 | 0.14884015 | EPO | in | Hep3B | 50 | qRTP | UCACA | dTs; lnaCs; | EPO:3500L15 |
| | | | | vitro | | | CR | AAUAU | dAs; lnaCs; | |
| | | | | | | | | AUAAA | dAs; lnaAs; | |
| | | | | | | | | | dAs; lnaTs; | |
| | | | | | | | | | dAs; | |
| | | | | | | | | | lnaTs; dAs; | |
| | | | | | | | | | lnaTs; dAs; | |
| | | | | | | | | | lnaAs; | |
| | | | | | | | | | dA-Sup | |
| EPO-20 | 2.569908037 | 0.120393773 | EPO | in | Hep3B | 100 | qRTP | UCACA | dTs; lnaCs; | EPO:3500L15 |
| | | | | vitro | | | CR | AAUAU | dAs; lnaCs; | |
| | | | | | | | | AUAAA | dAs; lnaAs; | |
| | | | | | | | | | dAs; lnaTs; | |
| | | | | | | | | | dAs; | |
| | | | | | | | | | lnaTs; dAs; | |
| | | | | | | | | | lnaTs; dAs; | |
| | | | | | | | | | lnaAs; | |
| | | | | | | | | | dA-Sup | |
| EPO-20 | 2.569908037 | 0.120393773 | EPO | in | Hep3B | 20 | qRTP | UCACA | dTs; lnaCs; | EPO:3500L15 |
| | | | | vitro | | | CR | AAUAU | dAs; lnaCs; | |
| | | | | | | | | AUAAA | dAs; lnaAs; | |
| | | | | | | | | | dAs; lnaTs; | |
| | | | | | | | | | dAs; | |
| | | | | | | | | | lnaTs; dAs; | |
| | | | | | | | | | lnaTs; dAs; | |
| | | | | | | | | | lnaAs; | |
| | | | | | | | | | dA-Sup | |
| EPO-20 | 1.715732386 | 0.14884015 | EPO | in | Hep3B | 50 | qRTP | UCACA | dTs; lnaCs; | EPO:3500L15 |
| | | | | vitro | | | CR | AAUAU | dAs; lnaCs; | |
| | | | | | | | | AUAAA | dAs; lnaAs; | |
| | | | | | | | | | dAs; lnaTs; | |
| | | | | | | | | | dAs; | |
| | | | | | | | | | lnaTs; dAs; | |
| | | | | | | | | | lnaTs; dAs; | |
| | | | | | | | | | lnaAs; | |
| | | | | | | | | | dA-Sup | |
| EPO-20 | 1.636431735 | 0.097549519 | EPO | in | HepG2 | 20 | qRTP | UCACA | dTs; lnaCs; | EPO:3500L15 |
| | | | | vitro | | | CR | AAUAU | dAs; lnaCs; | |
| | | | | | | | | AUAAA | dAs; lnaAs; | |
| | | | | | | | | | dAs; lnaTs; | |
| | | | | | | | | | dAs; | |
| | | | | | | | | | lnaTs; dAs; | |
| | | | | | | | | | lnaTs; dAs; | |
| | | | | | | | | | lnaAs; | |
| | | | | | | | | | dA-Sup | |
| EPO-20 | 4.31463677 | 0.171244763 | EPO | in | HepG2 | 50 | qRTP | UCACA | dTs; lnaCs; | EPO:3500L15 |
| | | | | vitro | | | CR | AAUAU | dAs; lnaCs; | |
| | | | | | | | | AUAAA | dAs; lnaAs; | |
| | | | | | | | | | dAs; lnaTs; | |
| | | | | | | | | | dAs; | |
| | | | | | | | | | lnaTs; dAs; | |
| | | | | | | | | | lnaTs; dAs; | |
| | | | | | | | | | lnaAs; | |
| | | | | | | | | | dA-Sup | |
| EPO-21 | 0.593207783 | 0.102503394 | EPO | in | HepG2 | 30 | qRTP | UGAGC | dTs; lnaGs; | EPO:4055L15 |
| | | | | vitro | | | CR | CACCG | dAs; lnaGs; | |
| | | | | | | | | UGCCU | dCs; lnaCs; | |
| | | | | | | | | | dAs; lnaCs; | |
| | | | | | | | | | dCs; | |
| | | | | | | | | | lnaGs; dTs; | |
| | | | | | | | | | lnaGs; | |
| | | | | | | | | | dCs; lnaCs; | |
| | | | | | | | | | dT-Sup | |
| EPO-21 | 0.84511423 | 0.157260044 | EPO | in | HepG2 | 10 | qRTP | UGAGC | dTs; lnaGs; | EPO:4055L15 |
| | | | | vitro | | | CR | CACCG | dAs; lnaGs; | |
| | | | | | | | | UGCCU | dCs; lnaCs; | |
| | | | | | | | | | dAs; lnaCs; | |
| | | | | | | | | | dCs; | |
| | | | | | | | | | lnaGs; dTs; | |
| | | | | | | | | | lnaGs; | |
| | | | | | | | | | dCs; lnaCs; | |
| | | | | | | | | | dT-Sup | |
| EPO-21 | 0.84511423 | 0.157260044 | EPO | in | HepG2 | 10 | qRTP | UGAGC | dTs; lnaGs; | EPO:4055L15 |
| | | | | vitro | | | CR | CACCG | dAs; lnaGs; | |
| | | | | | | | | UGCCU | dCs; lnaCs; | |
| | | | | | | | | | dAs; lnaCs; | |
| | | | | | | | | | dCs; | |
| | | | | | | | | | lnaGs; dTs; | |
| | | | | | | | | | lnaGs; | |
| | | | | | | | | | dCs; lnaCs; | |
| | | | | | | | | | dT-Sup | |
| EPO-21 | 0.593207783 | 0.102503394 | EPO | in | HepG2 | 30 | qRTP | UGAGC | dTs; lnaGs; | EPO:4055L15 |
| | | | | vitro | | | CR | CACCG | dAs; lnaGs; | |
| | | | | | | | | UGCCU | dCs; lnaCs; | |
| | | | | | | | | | dAs; lnaCs; | |
| | | | | | | | | | dCs; | |
| | | | | | | | | | lnaGs; dTs; | |
| | | | | | | | | | lnaGs; | |
| | | | | | | | | | dCs; lnaCs; | |
| | | | | | | | | | dT-Sup | |
| EPO-21 | 1.064628306 | 0.064711238 | EPO | in | Hep3B | 50 | qRTP | UGAGC | dTs; lnaGs; | EPO:4055L15 |
| | | | | vitro | | | CR | CACCG | dAs; lnaGs; | |
| | | | | | | | | UGCCU | dCs; lnaCs; | |
| | | | | | | | | | dAs; lnaCs; | |
| | | | | | | | | | dCs; | |
| | | | | | | | | | lnaGs; dTs; | |
| | | | | | | | | | lnaGs; | |
| | | | | | | | | | dCs; lnaCs; | |
| | | | | | | | | | dT-Sup | |
| EPO-21 | 1.272971505 | 0.0489838 | EPO | in | Hep3B | 100 | qRTP | UGAGC | dTs; lnaGs; | EPO:4055L15 |
| | | | | vitro | | | CR | CACCG | dAs; lnaGs; | |
| | | | | | | | | UGCCU | dCs; lnaCs; | |
| | | | | | | | | | dAs; lnaCs; | |
| | | | | | | | | | dCs; | |
| | | | | | | | | | lnaGs; dTs; | |
| | | | | | | | | | lnaGs; | |
| | | | | | | | | | dCs; lnaCs; | |
| | | | | | | | | | dT-Sup | |
| EPO-21 | 1.272971505 | | EPO | in | Hep3B | 20 | qRTP | UGAGC | dTs; lnaGs; | EPO:4055L15 |
| | | | | vitro | | | CR | CACCG | dAs; lnaGs; | |
| | | | | | | | | UGCCU | dCs; lnaCs; | |
| | | | | | | | | | dAs; lnaCs; | |
| | | | | | | | | | dCs; | |
| | | | | | | | | | lnaGs; dTs; | |
| | | | | | | | | | lnaGs; | |
| | | | | | | | | | dCs; lnaCs; | |
| | | | | | | | | | dT-Sup | |
| EPO-21 | 1.064628306 | 0.064711238 | EPO | in | Hep3B | 50 | qRTP | UGAGC | dTs; lnaGs; | EPO:4055L15 |
| | | | | vitro | | | CR | CACCG | dAs; lnaGs; | |
| | | | | | | | | UGCCU | dCs; lnaCs; | |
| | | | | | | | | | dAs; lnaCs; | |
| | | | | | | | | | dCs; | |
| | | | | | | | | | lnaGs; dTs; | |
| | | | | | | | | | lnaGs; | |
| | | | | | | | | | dCs; lnaCs; | |
| | | | | | | | | | dT-Sup | |
| EPO-21 | 1.41013956 | 0.056434832 | EPO | in | HepG2 | 20 | qRTP | UGAGC | dTs; lnaGs; | EPO:4055L15 |
| | | | | vitro | | | CR | CACCG | dAs; lnaGs; | |
| | | | | | | | | UGCCU | dCs; lnaCs; | |
| | | | | | | | | | dAs; lnaCs; | |
| | | | | | | | | | dCs; | |
| | | | | | | | | | lnaGs; dTs; | |
| | | | | | | | | | lnaGs; | |
| | | | | | | | | | dCs; lnaCs; | |
| | | | | | | | | | dT-Sup | |
| EPO-21 | 3.564730921 | 0.483192864 | EPO | in | HepG2 | 50 | qRTP | UGAGC | dTs; lnaGs; | EPO:4055L15 |
| | | | | vitro | | | CR | CACCG | dAs; lnaGs; | |
| | | | | | | | | UGCCU | dCs; lnaCs; | |
| | | | | | | | | | dAs; lnaCs; | |
| | | | | | | | | | dCs; | |
| | | | | | | | | | lnaGs; dTs; | |
| | | | | | | | | | lnaGs; | |
| | | | | | | | | | dCs; lnaCs; | |
| | | | | | | | | | dT-Sup | |
| EPO-22 | 0.795458409 | 0.08260448 | EPO | in | HepG2 | 30 | qRTP | UCCCA | dTs; lnaCs; | EPO:4036L15 |
| | | | | vitro | | | CR | UACAG | dCs; lnaCs; | |
| | | | | | | | | UUUUA | dAs; lnaTs; | |
| | | | | | | | | | dAs; lnaCs; | |
| | | | | | | | | | dAs; | |
| | | | | | | | | | lnaGs; dTs; | |
| | | | | | | | | | lnaTs; | |
| | | | | | | | | | dTs; lnaTs; | |
| | | | | | | | | | dA-Sup | |
| EPO-22 | 1.173247039 | 0.027723895 | EPO | in | HepG2 | 10 | qRTP | UCCCA | dTs; lnaCs; | EPO:4036L15 |
| | | | | vitro | | | CR | UACAG | dCs; lnaCs; | |
| | | | | | | | | UUUUA | dAs; lnaTs; | |
| | | | | | | | | | dAs; lnaCs; | |
| | | | | | | | | | dAs; | |
| | | | | | | | | | lnaGs; dTs; | |
| | | | | | | | | | lnaTs; | |
| | | | | | | | | | dTs; lnaTs; | |
| | | | | | | | | | dA-Sup | |
| EPO-22 | 1.173247039 | 0.027723895 | EPO | in | HepG2 | 10 | qRTP | UCCCA | dTs; lnaCs; | EPO:4036L15 |
| | | | | vitro | | | CR | UACAG | dCs; lnaCs; | |
| | | | | | | | | UUUUA | dAs; lnaTs; | |
| | | | | | | | | | dAs; lnaCs; | |
| | | | | | | | | | dAs; | |
| | | | | | | | | | lnaGs; dTs; | |
| | | | | | | | | | lnaTs; | |
| | | | | | | | | | dTs; lnaTs; | |
| | | | | | | | | | dA-Sup | |
| EPO-22 | 0.795458409 | 0.08260448 | EPO | in | HepG2 | 30 | qRTP | UCCCA | dTs; lnaCs; | EPO:4036L15 |
| | | | | vitro | | | CR | UACAG | dCs; lnaCs; | |
| | | | | | | | | UUUUA | dAs; lnaTs; | |
| | | | | | | | | | dAs; lnaCs; | |
| | | | | | | | | | dAs; | |
| | | | | | | | | | lnaGs; dTs; | |
| | | | | | | | | | lnaTs; | |
| | | | | | | | | | dTs; lnaTs; | |
| | | | | | | | | | dA-Sup | |
| EPO-22 | 1.850191809 | 0.160636631 | EPO | in | Hep3B | 50 | qRTP | UCCCA | dTs; lnaCs; | EPO:4036L15 |
| | | | | vitro | | | CR | UACAG | dCs; lnaCs; | |
| | | | | | | | | UUUUA | dAs; lnaTs; | |
| | | | | | | | | | dAs; lnaCs; | |
| | | | | | | | | | dAs; | |
| | | | | | | | | | lnaGs; dTs; | |
| | | | | | | | | | lnaTs; | |
| | | | | | | | | | dTs; lnaTs; | |
| | | | | | | | | | dA-Sup | |
| EPO-22 | 3.652538388 | 0.719915187 | EPO | in | Hep3B | 100 | qRTP | UCCCA | dTs; lnaCs; | EPO:4036L15 |
| | | | | vitro | | | CR | UACAG | dCs; lnaCs; | |
| | | | | | | | | UUUUA | dAs; lnaTs; | |
| | | | | | | | | | dAs; lnaCs; | |
| | | | | | | | | | dAs; | |
| | | | | | | | | | lnaGs; dTs; | |
| | | | | | | | | | lnaTs; | |
| | | | | | | | | | dTs; lnaTs; | |
| | | | | | | | | | dA-Sup | |
| EPO-22 | 3.652538388 | 0.719915187 | EPO | in | Hep3B | 20 | qRTP | UCCCA | dTs; lnaCs; | EPO:4036L15 |
| | | | | vitro | | | CR | UACAG | dCs; lnaCs; | |
| | | | | | | | | UUUUA | dAs; lnaTs; | |
| | | | | | | | | | dAs; lnaCs; | |
| | | | | | | | | | dAs; | |
| | | | | | | | | | lnaGs; dTs; | |
| | | | | | | | | | lnaTs; | |
| | | | | | | | | | dTs; lnaTs; | |
| | | | | | | | | | dA-Sup | |
| EPO-22 | 1.850191809 | 0.160636631 | EPO | in | Hep3B | 50 | qRTP | UCCCA | dTs; lnaCs; | EPO:4036L15 |
| | | | | vitro | | | CR | UACAG | dCs; lnaCs; | |
| | | | | | | | | UUUUA | dAs; lnaTs; | |
| | | | | | | | | | dAs; lnaCs; | |
| | | | | | | | | | dAs; | |
| | | | | | | | | | lnaGs; dTs; | |
| | | | | | | | | | lnaTs; | |
| | | | | | | | | | dTs; lnaTs; | |
| | | | | | | | | | dA-Sup | |
| EPO-22 | 1.315782333 | 0.069856109 | EPO | in | HepG2 | 20 | qRTP | UCCCA | dTs; lnaCs; | EPO:4036L15 |
| | | | | vitro | | | CR | UACAG | dCs; lnaCs; | |
| | | | | | | | | UUUUA | dAs; lnaTs; | |
| | | | | | | | | | dAs; lnaCs; | |
| | | | | | | | | | dAs; | |
| | | | | | | | | | lnaGs; dTs; | |
| | | | | | | | | | lnaTs; | |
| | | | | | | | | | dTs; lnaTs; | |
| | | | | | | | | | dA-Sup | |
| EPO-22 | 4.491567709 | 0.762081668 | EPO | in | HepG2 | 50 | qRTP | UCCCA | dTs; lnaCs; | EPO:4036L15 |
| | | | | vitro | | | CR | UACAG | dCs; lnaCs; | |
| | | | | | | | | UUUUA | dAs; lnaTs; | |
| | | | | | | | | | dAs; lnaCs; | |
| | | | | | | | | | dAs; | |
| | | | | | | | | | lnaGs; dTs; | |
| | | | | | | | | | lnaTs; | |
| | | | | | | | | | dTs; lnaTs; | |
| | | | | | | | | | dA-Sup | |
| EPO-22f | NA | NA | EPO | NA | NA | 0 | NA | UCCCA | dTs; fluCs; | EPO:4036L15 |
| | | | | | | | | UACAG | dCs; fluCs; | |
| | | | | | | | | UUUUA | dAs; fluUs; | |
| | | | | | | | | | dAs; fluCs; | |
| | | | | | | | | | dAs; | |
| | | | | | | | | | fluGs; dTs; | |
| | | | | | | | | | fluUs; dTs; | |
| | | | | | | | | | fluUs; dA- | |
| | | | | | | | | | Sup | |
| EPO- | NA | NA | EPO | NA | NA | 0 | NA | UCCCA | dTs; omeCs; | EPO:4036L15 |
| 22m | | | | | | | | UACAG | dCs; omeCs; | |
| | | | | | | | | UUUUA | dAs; | |
| | | | | | | | | | omeUs; | |
| | | | | | | | | | dAs; omeCs; | |
| | | | | | | | | | dAs; | |
| | | | | | | | | | omeGs; dTs; | |
| | | | | | | | | | omeUs; | |
| | | | | | | | | | dTs; omeUs; | |
| | | | | | | | | | dA- | |
| | | | | | | | | | Sup | |
| EPO-23 | 0.695552629 | 0.094887447 | EPO | in | HepG2 | 30 | qRTP | UUUGC | dTs; lnaTs; | EPO:4013L15 |
| | | | | vitro | | | CR | UGUCU | dTs; lnaGs; | |
| | | | | | | | | GCACA | dCs; lnaTs; | |
| | | | | | | | | | dGs; lnaTs; | |
| | | | | | | | | | dCs; | |
| | | | | | | | | | lnaTs; dGs; | |
| | | | | | | | | | lnaCs; | |
| | | | | | | | | | dAs; lnaCs; | |
| | | | | | | | | | dA-Sup | |
| EPO-23 | 0.819610866 | 0.118673987 | EPO | in | HepG2 | 10 | qRTP | UUUGC | dTs; lnaTs; | EPO:4013L15 |
| | | | | vitro | | | CR | UGUCU | dTs; lnaGs; | |
| | | | | | | | | GCACA | dCs; lnaTs; | |
| | | | | | | | | | dGs; lnaTs; | |
| | | | | | | | | | dCs; | |
| | | | | | | | | | lnaTs; dGs; | |
| | | | | | | | | | lnaCs; | |
| | | | | | | | | | dAs; lnaCs; | |
| | | | | | | | | | dA-Sup | |
| EPO-23 | 0.819610866 | 0.118673987 | EPO | in | HepG2 | 10 | qRTP | UUUGC | dTs; lnaTs; | EPO:4013L15 |
| | | | | vitro | | | CR | UGUCU | dTs; lnaGs; | |
| | | | | | | | | GCACA | dCs; lnaTs; | |
| | | | | | | | | | dGs; lnaTs; | |
| | | | | | | | | | dCs; | |
| | | | | | | | | | lnaTs; dGs; | |
| | | | | | | | | | lnaCs; | |
| | | | | | | | | | dAs; lnaCs; | |
| | | | | | | | | | dA-Sup | |
| EPO-23 | 0.695552629 | 0.094887447 | EPO | in | HepG2 | 30 | qRTP | UUUGC | dTs; lnaTs; | EPO:4013L15 |
| | | | | vitro | | | CR | UGUCU | dTs; lnaGs; | |
| | | | | | | | | GCACA | dCs; lnaTs; | |
| | | | | | | | | | dGs; lnaTs; | |
| | | | | | | | | | dCs; | |
| | | | | | | | | | lnaTs; dGs; | |
| | | | | | | | | | lnaCs; | |
| | | | | | | | | | dAs; lnaCs; | |
| | | | | | | | | | dA-Sup | |
| EPO-23 | 1.969899684 | 0.132033823 | EPO | in | Hep3B | 50 | qRTP | UUUGC | dTs; lnaTs; | EPO:4013L15 |
| | | | | vitro | | | CR | UGUCU | dTs; lnaGs; | |
| | | | | | | | | GCACA | dCs; lnaTs; | |
| | | | | | | | | | dGs; lnaTs; | |
| | | | | | | | | | dCs; | |
| | | | | | | | | | lnaTs; dGs; | |
| | | | | | | | | | lnaCs; | |
| | | | | | | | | | dAs; lnaCs; | |
| | | | | | | | | | dA-Sup | |
| EPO-23 | 3.187911538 | 0.987459642 | EPO | in | Hep3B | 100 | qRTP | UUUGC | dTs; lnaTs; | EPO:4013L15 |
| | | | | vitro | | | CR | UGUCU | dTs; lnaGs; | |
| | | | | | | | | GCACA | dCs; lnaTs; | |
| | | | | | | | | | dGs; lnaTs; | |
| | | | | | | | | | dCs; | |
| | | | | | | | | | lnaTs; dGs; | |
| | | | | | | | | | lnaCs; | |
| | | | | | | | | | dAs; lnaCs; | |
| | | | | | | | | | dA-Sup | |
| EPO-23 | 3.187911538 | 0.987459642 | EPO | in | Hep3B | 20 | qRTP | UUUGC | dTs; lnaTs; | EPO:4013L15 |
| | | | | vitro | | | CR | UGUCU | dTs; lnaGs; | |
| | | | | | | | | GCACA | dCs; lnaTs; | |
| | | | | | | | | | dGs; lnaTs; | |
| | | | | | | | | | dCs; | |
| | | | | | | | | | lnaTs; dGs; | |
| | | | | | | | | | lnaCs; | |
| | | | | | | | | | dAs; lnaCs; | |
| | | | | | | | | | dA-Sup | |
| EPO-23 | 1.969899684 | 0.132033823 | EPO | in | Hep3B | 50 | qRTP | UUUGC | dTs; lnaTs; | EPO:4013L15 |
| | | | | vitro | | | CR | UGUCU | dTs; lnaGs; | |
| | | | | | | | | GCACA | dCs; lnaTs; | |
| | | | | | | | | | dGs; lnaTs; | |
| | | | | | | | | | dCs; | |
| | | | | | | | | | lnaTs; dGs; | |
| | | | | | | | | | lnaCs; | |
| | | | | | | | | | dAs; lnaCs; | |
| | | | | | | | | | dA-Sup | |
| EPO-23 | 1.725476745 | 0.014564676 | EPO | in | HepG2 | 20 | qRTP | UUUGC | dTs; lnaTs; | EPO:4013L15 |
| | | | | vitro | | | CR | UGUCU | dTs; lnaGs; | |
| | | | | | | | | GCACA | dCs; lnaTs; | |
| | | | | | | | | | dGs; lnaTs; | |
| | | | | | | | | | dCs; | |
| | | | | | | | | | lnaTs; dGs; | |
| | | | | | | | | | lnaCs; | |
| | | | | | | | | | dAs; lnaCs; | |
| | | | | | | | | | dA-Sup | |
| EPO-23 | 4.110172498 | 0.203465534 | EPO | in | HepG2 | 50 | qRTP | UUUGC | dTs; lnaTs; | EPO:4013L15 |
| | | | | vitro | | | CR | UGUCU | dTs; lnaGs; | |
| | | | | | | | | GCACA | dCs; lnaTs; | |
| | | | | | | | | | dGs; lnaTs; | |
| | | | | | | | | | dCs; | |
| | | | | | | | | | lnaTs; dGs; | |
| | | | | | | | | | lnaCs; | |
| | | | | | | | | | dAs; lnaCs; | |
| | | | | | | | | | dA-Sup | |
| EPO-23f | NA | NA | EPO | NA | NA | 0 | NA | UUUGC | dTs; fluUs; | EPO:4013L15 |
| | | | | | | | | UGUCU | dTs; fluGs; | |
| | | | | | | | | GCACA | dCs; fluUs; | |
| | | | | | | | | | dGs; fluUs; | |
| | | | | | | | | | dCs; | |
| | | | | | | | | | fluUs; dGs; | |
| | | | | | | | | | fluCs; dAs; | |
| | | | | | | | | | fluCs; | |
| | | | | | | | | | dA-Sup | |
| EPO- | NA | NA | EPO | NA | NA | 0 | NA | UUUGC | dTs; omeUs; | EPO:4013L15 |
| 23m | | | | | | | | UGUCU | dTs; omeGs; | |
| | | | | | | | | GCACA | dCs; | |
| | | | | | | | | | omeUs; | |
| | | | | | | | | | dGs; omeUs; | |
| | | | | | | | | | dCs; | |
| | | | | | | | | | omeUs; dGs; | |
| | | | | | | | | | omeCs; | |
| | | | | | | | | | dAs; omeCs; | |
| | | | | | | | | | dA- | |
| | | | | | | | | | Sup | |
| EPO-24 | 0.239087052 | 0.067907345 | EPO | in | HepG2 | 30 | qRTP | UGCAC | dTs; lnaGs; | EPO:4004L15 |
| | | | | vitro | | | CR | AGGUC | dCs; lnaAs; | |
| | | | | | | | | CCGCC | dCs; lnaAs; | |
| | | | | | | | | | dGs; lnaGs; | |
| | | | | | | | | | dTs; | |
| | | | | | | | | | lnaCs; dCs; | |
| | | | | | | | | | lnaCs; dGs; | |
| | | | | | | | | | lnaCs; | |
| | | | | | | | | | dC-Sup | |
| EPO-24 | 0.43053905 | 0.04467954 | EPO | in | HepG2 | 10 | qRTP | UGCAC | dTs; lnaGs; | EPO:4004L15 |
| | | | | vitro | | | CR | AGGUC | dCs; lnaAs; | |
| | | | | | | | | CCGCC | dCs; lnaAs; | |
| | | | | | | | | | dGs; lnaGs; | |
| | | | | | | | | | dTs; | |
| | | | | | | | | | lnaCs; dCs; | |
| | | | | | | | | | lnaCs; dGs; | |
| | | | | | | | | | lnaCs; | |
| | | | | | | | | | dC-Sup | |
| EPO-24 | 0.43053905 | 0.04467954 | EPO | in | HepG2 | 10 | qRTP | UGCAC | dTs; lnaGs; | EPO:4004L15 |
| | | | | vitro | | | CR | AGGUC | dCs; lnaAs; | |
| | | | | | | | | CCGCC | dCs; lnaAs; | |
| | | | | | | | | | dGs; lnaGs; | |
| | | | | | | | | | dTs; | |
| | | | | | | | | | lnaCs; dCs; | |
| | | | | | | | | | lnaCs; dGs; | |
| | | | | | | | | | lnaCs; | |
| | | | | | | | | | dC-Sup | |
| EPO-24 | 0.239087052 | 0.067907345 | EPO | in | HepG2 | 30 | qRTP | UGCAC | dTs; lnaGs; | EPO:4004L15 |
| | | | | vitro | | | CR | AGGUC | dCs; lnaAs; | |
| | | | | | | | | CCGCC | dCs; lnaAs; | |
| | | | | | | | | | dGs; lnaGs; | |
| | | | | | | | | | dTs; | |
| | | | | | | | | | lnaCs; dCs; | |
| | | | | | | | | | lnaCs; dGs; | |
| | | | | | | | | | lnaCs; | |
| | | | | | | | | | dC-Sup | |
| EPO-24 | 0.10369274 | 0.03483061 | EPO | in | Hep3B | 50 | qRTP | UGCAC | dTs; lnaGs; | EPO:4004L15 |
| | | | | vitro | | | CR | AGGUC | dCs; lnaAs; | |
| | | | | | | | | CCGCC | dCs; lnaAs; | |
| | | | | | | | | | dGs; lnaGs; | |
| | | | | | | | | | dTs; | |
| | | | | | | | | | lnaCs; dCs; | |
| | | | | | | | | | lnaCs; dGs; | |
| | | | | | | | | | lnaCs; | |
| | | | | | | | | | dC-Sup | |
| EPO-24 | 0.077995941 | 0.008302209 | EPO | in | Hep3B | 100 | qRTP | UGCAC | dTs; lnaGs; | EPO:4004L15 |
| | | | | vitro | | | CR | AGGUC | dCs; lnaAs; | |
| | | | | | | | | CCGCC | dCs; lnaAs; | |
| | | | | | | | | | dGs; lnaGs; | |
| | | | | | | | | | dTs; | |
| | | | | | | | | | lnaCs; dCs; | |
| | | | | | | | | | lnaCs; dGs; | |
| | | | | | | | | | lnaCs; | |
| | | | | | | | | | dC-Sup | |
| EPO-24 | 0.077995941 | 0.008302209 | EPO | in | Hep3B | 20 | qRTP | UGCAC | dTs; lnaGs; | EPO:4004L15 |
| | | | | vitro | | | CR | AGGUC | dCs; lnaAs; | |
| | | | | | | | | CCGCC | dCs; lnaAs; | |
| | | | | | | | | | dGs; lnaGs; | |
| | | | | | | | | | dTs; | |
| | | | | | | | | | lnaCs; dCs; | |
| | | | | | | | | | lnaCs; dGs; | |
| | | | | | | | | | lnaCs; | |
| | | | | | | | | | dC-Sup | |
| EPO-24 | 0.10369274 | 0.03483061 | EPO | in | Hep3B | 50 | qRTP | UGCAC | dTs; lnaGs; | EPO:4004L15 |
| | | | | vitro | | | CR | AGGUC | dCs; lnaAs; | |
| | | | | | | | | CCGCC | dCs; lnaAs; | |
| | | | | | | | | | dGs; lnaGs; | |
| | | | | | | | | | dTs; | |
| | | | | | | | | | lnaCs; dCs; | |
| | | | | | | | | | lnaCs; dGs; | |
| | | | | | | | | | lnaCs; | |
| | | | | | | | | | dC-Sup | |
| EPO-24 | 1.13723662 | 0.082249629 | EPO | in | HepG2 | 20 | qRTP | UGCAC | dTs; lnaGs; | EPO:4004L15 |
| | | | | vitro | | | CR | AGGUC | dCs; lnaAs; | |
| | | | | | | | | CCGCC | dCs; lnaAs; | |
| | | | | | | | | | dGs; lnaGs; | |
| | | | | | | | | | dTs; | |
| | | | | | | | | | lnaCs; dCs; | |
| | | | | | | | | | lnaCs; dGs; | |
| | | | | | | | | | lnaCs; | |
| | | | | | | | | | dC-Sup | |
| EPO-24 | 2.547648145 | 0.340515543 | EPO | in | HepG2 | 50 | qRTP | UGCAC | dTs; lnaGs; | EPO:4004L15 |
| | | | | vitro | | | CR | AGGUC | dCs; lnaAs; | |
| | | | | | | | | CCGCC | dCs; lnaAs; | |
| | | | | | | | | | dGs; lnaGs; | |
| | | | | | | | | | dTs; | |
| | | | | | | | | | lnaCs; dCs; | |
| | | | | | | | | | lnaCs; dGs; | |
| | | | | | | | | | lnaCs; | |
| | | | | | | | | | dC-Sup | |
| EPO-25 | 0.425938559 | 0.090356587 | EPO | in | HepG2 | 30 | qRTP | UCCUC | dTs; lnaCs; | EPO:3992L15 |
| | | | | vitro | | | CR | AGUGG | dCs; lnaTs; | |
| | | | | | | | | UCCUU | dCs; lnaAs; | |
| | | | | | | | | | dGs; lnaTs; | |
| | | | | | | | | | dGs; | |
| | | | | | | | | | lnaGs; dTs; | |
| | | | | | | | | | lnaCs; | |
| | | | | | | | | | dCs; lnaTs; | |
| | | | | | | | | | dT-Sup | |
| EPO-25 | 0.694769815 | 0.124601231 | EPO | in | HepG2 | 10 | qRTP | UCCUC | dTs; lnaCs; | EPO:3992L15 |
| | | | | vitro | | | CR | AGUGG | dCs; lnaTs; | |
| | | | | | | | | UCCUU | dCs; lnaAs; | |
| | | | | | | | | | dGs; | |
| | | | | | | | | | lnaTs; dGs; | |
| | | | | | | | | | lnaGs; dTs; | |
| | | | | | | | | | lnaCs; | |
| | | | | | | | | | dCs; lnaTs; | |
| | | | | | | | | | dT-Sup | |
| EPO-25 | 0.694769815 | 0.124601231 | EPO | in | HepG2 | 10 | qRTP | UCCUC | dTs; lnaCs; | EPO:3992L15 |
| | | | | vitro | | | CR | AGUGG | dCs; lnaTs; | |
| | | | | | | | | UCCUU | dCs; lnaAs; | |
| | | | | | | | | | dGs; lnaTs; | |
| | | | | | | | | | dGs; | |
| | | | | | | | | | lnaGs; dTs; | |
| | | | | | | | | | lnaCs; | |
| | | | | | | | | | dCs; lnaTs; | |
| | | | | | | | | | dT-Sup | |
| EPO-25 | 0.425938559 | 0.090356587 | EPO | in | HepG2 | 30 | qRTP | UCCUC | dTs; lnaCs; | EPO:3992L15 |
| | | | | vitro | | | CR | AGUGG | dCs; lnaTs; | |
| | | | | | | | | UCCUU | dCs; lnaAs; | |
| | | | | | | | | | dGs; lnaTs; | |
| | | | | | | | | | dGs; | |
| | | | | | | | | | lnaGs; dTs; | |
| | | | | | | | | | lnaCs; | |
| | | | | | | | | | dCs; lnaTs; | |
| | | | | | | | | | dT-Sup | |
| EPO-25 | 0.44115642 | 0.035597465 | EPO | in | Hep3B | 50 | qRTP | UCCUC | dTs; lnaCs; | EPO:3992L15 |
| | | | | vitro | | | CR | AGUGG | dCs; lnaTs; | |
| | | | | | | | | UCCUU | dCs; lnaAs; | |
| | | | | | | | | | dGs; lnaTs; | |
| | | | | | | | | | dGs; | |
| | | | | | | | | | lnaGs; dTs; | |
| | | | | | | | | | lnaCs; | |
| | | | | | | | | | dCs; lnaTs; | |
| | | | | | | | | | dT-Sup | |
| EPO-25 | 0.641559127 | 0.149673986 | EPO | in | Hep3B | 100 | qRTP | UCCUC | dTs; lnaCs; | EPO:3992L15 |
| | | | | vitro | | | CR | AGUGG | dCs; lnaTs; | |
| | | | | | | | | UCCUU | dCs; lnaAs; | |
| | | | | | | | | | dGs; lnaTs; | |
| | | | | | | | | | dGs; | |
| | | | | | | | | | lnaGs; dTs; | |
| | | | | | | | | | lnaCs; | |
| | | | | | | | | | dCs; lnaTs; | |
| | | | | | | | | | dT-Sup | |
| EPO-25 | 0.641559127 | 0.149673986 | EPO | in | Hep3B | 20 | qRTP | UCCUC | dTs; lnaCs; | EPO:3992L15 |
| | | | | vitro | | | CR | AGUGG | dCs; lnaTs; | |
| | | | | | | | | UCCUU | dCs; lnaAs; | |
| | | | | | | | | | dGs; lnaTs; | |
| | | | | | | | | | dGs; | |
| | | | | | | | | | lnaGs; dTs; | |
| | | | | | | | | | lnaCs; | |
| | | | | | | | | | dCs; lnaTs; | |
| | | | | | | | | | dT-Sup | |
| EPO-25 | 0.44115642 | 0.035597465 | EPO | in | Hep3B | 50 | qRTP | UCCUC | dTs; lnaCs; | EPO:3992L15 |
| | | | | vitro | | | CR | AGUGG | dCs; lnaTs; | |
| | | | | | | | | UCCUU | dCs; lnaAs; | |
| | | | | | | | | | dGs; lnaTs; | |
| | | | | | | | | | dGs; | |
| | | | | | | | | | lnaGs; dTs; | |
| | | | | | | | | | lnaCs; | |
| | | | | | | | | | dCs; lnaTs; | |
| | | | | | | | | | dT-Sup | |
| EPO-25 | 1.084106898 | 0.165882812 | EPO | in | HepG2 | 20 | qRTP | UCCUC | dTs; lnaCs; | EPO:3992L15 |
| | | | | vitro | | | CR | AGUGG | dCs; lnaTs; | |
| | | | | | | | | UCCUU | dCs; lnaAs; | |
| | | | | | | | | | dGs; lnaTs; | |
| | | | | | | | | | dGs; | |
| | | | | | | | | | lnaGs; dTs; | |
| | | | | | | | | | lnaCs; | |
| | | | | | | | | | dCs; lnaTs; | |
| | | | | | | | | | dT-Sup | |
| EPO-25 | 2.43720491 | 0.353722016 | EPO | in | HepG2 | 50 | qRTP | UCCUC | dTs; lnaCs; | EPO:3992L15 |
| | | | | vitro | | | CR | AGUGG | dCs; lnaTs; | |
| | | | | | | | | UCCUU | dCs; lnaAs; | |
| | | | | | | | | | dGs; lnaTs; | |
| | | | | | | | | | dGs; | |
| | | | | | | | | | lnaGs; dTs; | |
| | | | | | | | | | lnaCs; | |
| | | | | | | | | | dCs; lnaTs; | |
| | | | | | | | | | dT-Sup | |
| EPO-26 | 0.384262413 | 0.121843596 | EPO | in | HepG2 | 30 | qRTP | UUUCC | dTs; lnaTs; | EPO:3979L15 |
| | | | | vitro | | | CR | CGCUG | dTs; lnaCs; | |
| | | | | | | | | AAGCA | dCs; lnaCs; | |
| | | | | | | | | | dGs; lnaCs; | |
| | | | | | | | | | dTs; | |
| | | | | | | | | | lnaGs; dAs; | |
| | | | | | | | | | lnaAs; | |
| | | | | | | | | | dGs; lnaCs; | |
| | | | | | | | | | dA-Sup | |
| EPO-26 | 0.382929795 | 0.062492371 | EPO | in | HepG2 | 10 | qRTP | UUUCC | dTs; lnaTs; | EPO:3979L15 |
| | | | | vitro | | | CR | CGCUG | dTs; lnaCs; | |
| | | | | | | | | AAGCA | dCs; lnaCs; | |
| | | | | | | | | | dGs; lnaCs; | |
| | | | | | | | | | dTs; | |
| | | | | | | | | | lnaGs; dAs; | |
| | | | | | | | | | lnaAs; | |
| | | | | | | | | | dGs; lnaCs; | |
| | | | | | | | | | dA-Sup | |
| EPO-26 | 0.382929795 | 0.062492371 | EPO | in | HepG2 | 10 | qRTP | UUUCC | dTs; lnaTs; | EPO:3979L15 |
| | | | | vitro | | | CR | CGCUG | dTs; lnaCs; | |
| | | | | | | | | AAGCA | dCs; lnaCs; | |
| | | | | | | | | | dGs; lnaCs; | |
| | | | | | | | | | dTs; | |
| | | | | | | | | | lnaGs; dAs; | |
| | | | | | | | | | lnaAs; | |
| | | | | | | | | | dGs; lnaCs; | |
| | | | | | | | | | dA-Sup | |
| EPO-26 | 0.384262413 | 0.121843596 | EPO | in | HepG2 | 30 | qRTP | UUUCC | dTs; lnaTs; | EPO:3979L15 |
| | | | | vitro | | | CR | CGCUG | dTs; lnaCs; | |
| | | | | | | | | AAGCA | dCs; lnaCs; | |
| | | | | | | | | | dGs; lnaCs; | |
| | | | | | | | | | dTs; | |
| | | | | | | | | | lnaGs; dAs; | |
| | | | | | | | | | lnaAs; | |
| | | | | | | | | | dGs; lnaCs; | |
| | | | | | | | | | dA-Sup | |
| EPO-26 | 0.50751605 | 0.04897375 | EPO | in | Hep3B | 50 | qRTP | UUUCC | dTs; lnaTs; | EPO:3979L15 |
| | | | | vitro | | | CR | CGCUG | dTs; lnaCs; | |
| | | | | | | | | AAGCA | dCs; lnaCs; | |
| | | | | | | | | | dGs; lnaCs; | |
| | | | | | | | | | dTs; | |
| | | | | | | | | | lnaGs; dAs; | |
| | | | | | | | | | lnaAs; | |
| | | | | | | | | | dGs; lnaCs; | |
| | | | | | | | | | dA-Sup | |
| EPO-26 | 0.409821446 | 0.113198006 | EPO | in | Hep3B | 100 | qRTP | UUUCC | dTs; lnaTs; | EPO:3979L15 |
| | | | | vitro | | | CR | CGCUG | dTs; lnaCs; | |
| | | | | | | | | AAGCA | dCs; lnaCs; | |
| | | | | | | | | | dGs; lnaCs; | |
| | | | | | | | | | dTs; | |
| | | | | | | | | | lnaGs; dAs; | |
| | | | | | | | | | lnaAs; | |
| | | | | | | | | | dGs; lnaCs; | |
| | | | | | | | | | dA-Sup | |
| EPO-26 | 0.409821446 | 0.113198006 | EPO | in | Hep3B | 20 | qRTP | UUUCC | dTs; lnaTs; | EPO:3979L15 |
| | | | | vitro | | | CR | CGCUG | dTs; lnaCs; | |
| | | | | | | | | AAGCA | dCs; lnaCs; | |
| | | | | | | | | | dGs; lnaCs; | |
| | | | | | | | | | dTs; | |
| | | | | | | | | | lnaGs; dAs; | |
| | | | | | | | | | lnaAs; | |
| | | | | | | | | | dGs; lnaCs; | |
| | | | | | | | | | dA-Sup | |
| EPO-26 | 0.50751605 | 0.04897375 | EPO | in | Hep3B | 50 | qRTP | UUUCC | dTs; lnaTs; | EPO:3979L15 |
| | | | | vitro | | | CR | CGCUG | dTs; lnaCs; | |
| | | | | | | | | AAGCA | dCs; lnaCs; | |
| | | | | | | | | | dGs; lnaCs; | |
| | | | | | | | | | dTs; | |
| | | | | | | | | | lnaGs; dAs; | |
| | | | | | | | | | lnaAs; | |
| | | | | | | | | | dGs; lnaCs; | |
| | | | | | | | | | dA-Sup | |
| EPO-26 | 0.907797793 | 0.035999108 | EPO | in | HepG2 | 20 | qRTP | UUUCC | dTs; lnaTs; | EPO:3979L15 |
| | | | | vitro | | | CR | CGCUG | dTs; lnaCs; | |
| | | | | | | | | AAGCA | dCs; lnaCs; | |
| | | | | | | | | | dGs; lnaCs; | |
| | | | | | | | | | dTs; | |
| | | | | | | | | | lnaGs; dAs; | |
| | | | | | | | | | lnaAs; | |
| | | | | | | | | | dGs; lnaCs; | |
| | | | | | | | | | dA-Sup | |
| EPO-26 | 2.506372821 | 0.173665169 | EPO | in | HepG2 | 50 | qRTP | UUUCC | dTs; lnaTs; | EPO:3979L15 |
| | | | | vitro | | | CR | CGCUG | dTs; lnaCs; | |
| | | | | | | | | AAGCA | dCs; lnaCs; | |
| | | | | | | | | | dGs; lnaCs; | |
| | | | | | | | | | dTs; | |
| | | | | | | | | | lnaGs; dAs; | |
| | | | | | | | | | lnaAs; | |
| | | | | | | | | | dGs; lnaCs; | |
| | | | | | | | | | dA-Sup | |
| EPO-27 | 0.70201316 | 0.058487373 | EPO | in | HepG2 | 30 | qRTP | UUAUU | dTs; lnaTs; | EPO:3964L15 |
| | | | | vitro | | | CR | UUUGA | dAs; lnaTs; | |
| | | | | | | | | GAAGG | dTs; lnaTs; | |
| | | | | | | | | | dTs; lnaTs; | |
| | | | | | | | | | dGs; | |
| | | | | | | | | | lnaAs; dGs; | |
| | | | | | | | | | lnaAs; | |
| | | | | | | | | | dAs; lnaGs; | |
| | | | | | | | | | dG-Sup | |
| EPO-27 | 1.004855525 | 0.049519084 | EPO | in | HepG2 | 10 | qRTP | UUAUU | dTs; lnaTs; | EPO:3964L15 |
| | | | | vitro | | | CR | UUUGA | dAs; lnaTs; | |
| | | | | | | | | GAAGG | dTs; lnaTs; | |
| | | | | | | | | | dTs; lnaTs; | |
| | | | | | | | | | dGs; | |
| | | | | | | | | | lnaAs; dGs; | |
| | | | | | | | | | lnaAs; | |
| | | | | | | | | | dAs; lnaGs; | |
| | | | | | | | | | dG-Sup | |
| EPO-27 | 1.004855525 | 0.049519084 | EPO | in | HepG2 | 10 | qRTP | UUAUU | dTs; lnaTs; | EPO:3964L15 |
| | | | | vitro | | | CR | UUUGA | dAs; lnaTs; | |
| | | | | | | | | GAAGG | dTs; lnaTs; | |
| | | | | | | | | | dTs; lnaTs; | |
| | | | | | | | | | dGs; | |
| | | | | | | | | | lnaAs; dGs; | |
| | | | | | | | | | lnaAs; | |
| | | | | | | | | | dAs; lnaGs; | |
| | | | | | | | | | dG-Sup | |
| EPO-27 | 0.70201316 | 0.058487373 | EPO | in | HepG2 | 30 | qRTP | UUAUU | dTs; lnaTs; | EPO:3964L15 |
| | | | | vitro | | | CR | UUUGA | dAs; lnaTs; | |
| | | | | | | | | GAAGG | dTs; lnaTs; | |
| | | | | | | | | | dTs; lnaTs; | |
| | | | | | | | | | dGs; | |
| | | | | | | | | | lnaAs; dGs; | |
| | | | | | | | | | lnaAs; | |
| | | | | | | | | | dAs; lnaGs; | |
| | | | | | | | | | dG-Sup | |
| EPO-27 | 1.327118125 | 0.033868996 | EPO | in | Hep3B | 50 | qRTP | UUAUU | dTs; lnaTs; | EPO:3964L15 |
| | | | | vitro | | | CR | UUUGA | dAs; lnaTs; | |
| | | | | | | | | GAAGG | dTs; lnaTs; | |
| | | | | | | | | | dTs; lnaTs; | |
| | | | | | | | | | dGs; | |
| | | | | | | | | | lnaAs; dGs; | |
| | | | | | | | | | lnaAs; | |
| | | | | | | | | | dAs; lnaGs; | |
| | | | | | | | | | dG-Sup | |
| EPO-27 | 1.665191429 | 0.122411006 | EPO | in | Hep3B | 100 | qRTP | UUAUU | dTs; lnaTs; | EPO:3964L15 |
| | | | | vitro | | | CR | UUUGA | dAs; lnaTs; | |
| | | | | | | | | GAAGG | dTs; lnaTs; | |
| | | | | | | | | | dTs; lnaTs; | |
| | | | | | | | | | dGs; | |
| | | | | | | | | | lnaAs; dGs; | |
| | | | | | | | | | lnaAs; | |
| | | | | | | | | | dAs; lnaGs; | |
| | | | | | | | | | dG-Sup | |
| EPO-27 | 1.665191429 | 0.122411006 | EPO | in | Hep3B | 20 | qRTP | UUAUU | dTs; lnaTs; | EPO:3964L15 |
| | | | | vitro | | | CR | UUUGA | dAs; lnaTs; | |
| | | | | | | | | GAAGG | dTs; lnaTs; | |
| | | | | | | | | | dTs; lnaTs; | |
| | | | | | | | | | dGs; | |
| | | | | | | | | | lnaAs; dGs; | |
| | | | | | | | | | lnaAs; | |
| | | | | | | | | | dAs; lnaGs; | |
| | | | | | | | | | dG-Sup | |
| EPO-27 | 1.327118125 | 0.033868996 | EPO | in | Hep3B | 50 | qRTP | UUAUU | dTs; lnaTs; | EPO:3964L15 |
| | | | | vitro | | | CR | UUUGA | dAs; lnaTs; | |
| | | | | | | | | GAAGG | dTs; lnaTs; | |
| | | | | | | | | | dTs; lnaTs; | |
| | | | | | | | | | dGs; | |
| | | | | | | | | | lnaAs; dGs; | |
| | | | | | | | | | lnaAs; | |
| | | | | | | | | | dAs; lnaGs; | |
| | | | | | | | | | dG-Sup | |
| EPO-27 | 1.624437141 | 0.253742831 | EPO | in | HepG2 | 20 | qRTP | UUAUU | dTs; lnaTs; | EPO:3964L15 |
| | | | | vitro | | | CR | UUUGA | dAs; lnaTs; | |
| | | | | | | | | GAAGG | dTs; lnaTs; | |
| | | | | | | | | | dTs; lnaTs; | |
| | | | | | | | | | dGs; | |
| | | | | | | | | | lnaAs; dGs; | |
| | | | | | | | | | lnaAs; | |
| | | | | | | | | | dAs; lnaGs; | |
| | | | | | | | | | dG-Sup | |
| EPO-27 | 3.500327115 | 0.253061702 | EPO | in | HepG2 | 50 | qRTP | UUAUU | dTs; lnaTs; | EPO:3964L15 |
| | | | | vitro | | | CR | UUUGA | dAs; lnaTs; | |
| | | | | | | | | GAAGG | dTs; lnaTs; | |
| | | | | | | | | | dTs; lnaTs; | |
| | | | | | | | | | dGs; | |
| | | | | | | | | | lnaAs; dGs; | |
| | | | | | | | | | lnaAs; | |
| | | | | | | | | | dAs; lnaGs; | |
| | | | | | | | | | dG-Sup | |
| EPO-28 | 0.757981822 | 0.113490004 | EPO | in | HepG2 | 30 | qRTP | UGUAC | dTs; lnaGs; | EPO:3415L15 |
| | | | | vitro | | | CR | CGCCCC | dTs; lnaAs; | |
| | | | | | | | | UUUU | dCs; lnaCs; | |
| | | | | | | | | | dGs; lnaCs; | |
| | | | | | | | | | dCs; | |
| | | | | | | | | | lnaCs; dCs; | |
| | | | | | | | | | lnaTs; dTs; | |
| | | | | | | | | | lnaTs; | |
| | | | | | | | | | dT-Sup | |
| EPO-28 | 0.784678806 | 0.170860731 | EPO | in | HepG2 | 10 | qRTP | UGUAC | dTs; lnaGs; | EPO:3415L15 |
| | | | | vitro | | | CR | CGCCCC | dTs; lnaAs; | |
| | | | | | | | | UUUU | dCs; lnaCs; | |
| | | | | | | | | | dGs; lnaCs; | |
| | | | | | | | | | dCs; | |
| | | | | | | | | | lnaCs; dCs; | |
| | | | | | | | | | lnaTs; dTs; | |
| | | | | | | | | | lnaTs; | |
| | | | | | | | | | dT-Sup | |
| EPO-28 | 0.784678806 | 0.170860731 | EPO | in | HepG2 | 10 | qRTP | UGUAC | dTs; lnaGs; | EPO:3415L15 |
| | | | | vitro | | | CR | CGCCCC | dTs; lnaAs; | |
| | | | | | | | | UUUU | dCs; lnaCs; | |
| | | | | | | | | | dGs; lnaCs; | |
| | | | | | | | | | dCs; | |
| | | | | | | | | | lnaCs; dCs; | |
| | | | | | | | | | lnaTs; dTs; | |
| | | | | | | | | | lnaTs; | |
| | | | | | | | | | dT-Sup | |
| EPO-28 | 0.757981822 | 0.113490004 | EPO | in | HepG2 | 30 | qRTP | UGUAC | dTs; lnaGs; | EPO:3415L15 |
| | | | | vitro | | | CR | CGCCCC | dTs; lnaAs; | |
| | | | | | | | | UUUU | dCs; lnaCs; | |
| | | | | | | | | | dGs; lnaCs; | |
| | | | | | | | | | dCs; | |
| | | | | | | | | | lnaCs; dCs; | |
| | | | | | | | | | lnaTs; dTs; | |
| | | | | | | | | | lnaTs; | |
| | | | | | | | | | dT-Sup | |
| EPO-28 | 1.619267296 | 0.116253359 | EPO | in | Hep3B | 50 | qRTP | UGUAC | dTs; lnaGs; | EPO:3415L15 |
| | | | | vitro | | | CR | CGCCCC | dTs; lnaAs; | |
| | | | | | | | | UUUU | dCs; lnaCs; | |
| | | | | | | | | | dGs; lnaCs; | |
| | | | | | | | | | dCs; | |
| | | | | | | | | | lnaCs; dCs; | |
| | | | | | | | | | lnaTs; dTs; | |
| | | | | | | | | | lnaTs; | |
| | | | | | | | | | dT-Sup | |
| EPO-28 | 1.134189635 | 0.188124879 | EPO | in | Hep3B | 100 | qRTP | UGUAC | dTs; lnaGs; | EPO:3415L15 |
| | | | | vitro | | | CR | CGCCCC | dTs; lnaAs; | |
| | | | | | | | | UUUU | dCs; lnaCs; | |
| | | | | | | | | | dGs; lnaCs; | |
| | | | | | | | | | dCs; | |
| | | | | | | | | | lnaCs; dCs; | |
| | | | | | | | | | lnaTs; dTs; | |
| | | | | | | | | | lnaTs; | |
| | | | | | | | | | dT-Sup | |
| EPO-28 | 1.134189635 | 0.188124879 | EPO | in | Hep3B | 20 | qRTP | UGUAC | dTs; lnaGs; | EPO:3415L15 |
| | | | | vitro | | | CR | CGCCCC | dTs; lnaAs; | |
| | | | | | | | | UUUU | dCs; lnaCs; | |
| | | | | | | | | | dGs; lnaCs; | |
| | | | | | | | | | dCs; | |
| | | | | | | | | | lnaCs; dCs; | |
| | | | | | | | | | lnaTs; dTs; | |
| | | | | | | | | | lnaTs; | |
| | | | | | | | | | dT-Sup | |
| EPO-28 | 1.619267296 | 0.116253359 | EPO | in | Hep3B | 50 | qRTP | UGUAC | dTs; lnaGs; | EPO:3415L15 |
| | | | | vitro | | | CR | CGCCCC | dTs; lnaAs; | |
| | | | | | | | | UUUU | dCs; lnaCs; | |
| | | | | | | | | | dGs; lnaCs; | |
| | | | | | | | | | dCs; | |
| | | | | | | | | | lnaCs; dCs; | |
| | | | | | | | | | lnaTs; dTs; | |
| | | | | | | | | | lnaTs; | |
| | | | | | | | | | dT-Sup | |
| EPO-28 | 0.97193285 | 0.041609919 | EPO | in | HepG2 | 20 | qRTP | UGUAC | dTs; lnaGs; | EPO:3415L15 |
| | | | | vitro | | | CR | CGCCCC | dTs; lnaAs; | |
| | | | | | | | | UUUU | dCs; lnaCs; | |
| | | | | | | | | | dGs; lnaCs; | |
| | | | | | | | | | dCs; | |
| | | | | | | | | | lnaCs; dCs; | |
| | | | | | | | | | lnaTs; dTs; | |
| | | | | | | | | | lnaTs; | |
| | | | | | | | | | dT-Sup | |
| EPO-28 | 3.55614684 | 0.187200072 | EPO | in | HepG2 | 50 | qRTP | UGUAC | dTs; lnaGs; | EPO:3415L15 |
| | | | | vitro | | | CR | CGCCCC | dTs; lnaAs; | |
| | | | | | | | | UUUU | dCs; lnaCs; | |
| | | | | | | | | | dGs; lnaCs; | |
| | | | | | | | | | dCs; | |
| | | | | | | | | | lnaCs; dCs; | |
| | | | | | | | | | lnaTs; dTs; | |
| | | | | | | | | | lnaTs; | |
| | | | | | | | | | dT-Sup | |
| EPO-29 | 1.800339378 | 0.43434591 | EPO | in | HepG2 | 30 | qRTP | UAUAG | dTs; lnaAs; | EPO:3443L15 |
| | | | | vitro | | | CR | AGGUG | dTs; lnaAs; | |
| | | | | | | | | GCUCC | dGs; lnaAs; | |
| | | | | | | | | | dGs; | |
| | | | | | | | | | lnaGs; dTs; | |
| | | | | | | | | | lnaGs; | |
| | | | | | | | | | dGs; lnaCs; | |
| | | | | | | | | | dTs; lnaCs; | |
| | | | | | | | | | dC- | |
| | | | | | | | | | Sup | |
| EPO-29 | 2.007810668 | 0.175487274 | EPO | in | HepG2 | 10 | qRTP | UAUAG | dTs; lnaAs; | EPO:3443L15 |
| | | | | vitro | | | CR | AGGUG | dTs; lnaAs; | |
| | | | | | | | | GCUCC | dGs; lnaAs; | |
| | | | | | | | | | dGs; | |
| | | | | | | | | | lnaGs; dTs; | |
| | | | | | | | | | lnaGs; | |
| | | | | | | | | | dGs; lnaCs; | |
| | | | | | | | | | dTs; lnaCs; | |
| | | | | | | | | | dC- | |
| | | | | | | | | | Sup | |
| EPO-29 | 2.007810668 | 0.175487274 | EPO | in | HepG2 | 10 | qRTP | UAUAG | dTs; lnaAs; | EPO:3443L15 |
| | | | | vitro | | | CR | AGGUG | dTs; lnaAs; | |
| | | | | | | | | GCUCC | dGs; lnaAs; | |
| | | | | | | | | | dGs; | |
| | | | | | | | | | lnaGs; dTs; | |
| | | | | | | | | | lnaGs; | |
| | | | | | | | | | dGs; lnaCs; | |
| | | | | | | | | | dTs; lnaCs; | |
| | | | | | | | | | dC- | |
| | | | | | | | | | Sup | |
| EPO-29 | 1.800339378 | 0.43434591 | EPO | in | HepG2 | 30 | qRTP | UAUAG | dTs; lnaAs; | EPO:3443L15 |
| | | | | vitro | | | CR | AGGUG | dTs; lnaAs; | |
| | | | | | | | | GCUCC | dGs; lnaAs; | |
| | | | | | | | | | dGs; | |
| | | | | | | | | | lnaGs; dTs; | |
| | | | | | | | | | lnaGs; | |
| | | | | | | | | | dGs; lnaCs; | |
| | | | | | | | | | dTs; lnaCs; | |
| | | | | | | | | | dC- | |
| | | | | | | | | | Sup | |
| EPO-29 | 2.131352923 | 0.250394136 | EPO | in | Hep3B | 50 | qRTP | UAUAG | dTs; lnaAs; | EPO:3443L15 |
| | | | | vitro | | | CR | AGGUG | dTs; lnaAs; | |
| | | | | | | | | GCUCC | dGs; lnaAs; | |
| | | | | | | | | | dGs; | |
| | | | | | | | | | lnaGs; dTs; | |
| | | | | | | | | | lnaGs; | |
| | | | | | | | | | dGs; lnaCs; | |
| | | | | | | | | | dTs; lnaCs; | |
| | | | | | | | | | dC- | |
| | | | | | | | | | Sup | |
| EPO-29 | 2.586634547 | 0.160048134 | EPO | in | Hep3B | 100 | qRTP | UAUAG | dTs; lnaAs; | EPO:3443L15 |
| | | | | vitro | | | CR | AGGUG | dTs; lnaAs; | |
| | | | | | | | | GCUCC | dGs; lnaAs; | |
| | | | | | | | | | dGs; | |
| | | | | | | | | | lnaGs; dTs; | |
| | | | | | | | | | lnaGs; | |
| | | | | | | | | | dGs; lnaCs; | |
| | | | | | | | | | dTs; lnaCs; | |
| | | | | | | | | | dC- | |
| | | | | | | | | | Sup | |
| EPO-29 | 2.586634547 | 0.160048134 | EPO | in | Hep3B | 20 | qRTP | UAUAG | dTs; lnaAs; | EPO:3443L15 |
| | | | | vitro | | | CR | AGGUG | dTs; lnaAs; | |
| | | | | | | | | GCUCC | dGs; lnaAs; | |
| | | | | | | | | | dGs; | |
| | | | | | | | | | lnaGs; dTs; | |
| | | | | | | | | | lnaGs; | |
| | | | | | | | | | dGs; lnaCs; | |
| | | | | | | | | | dTs; lnaCs; | |
| | | | | | | | | | dC- | |
| | | | | | | | | | Sup | |
| EPO-29 | 2.131352923 | 0.250394136 | EPO | in | Hep3B | 50 | qRTP | UAUAG | dTs; lnaAs; | EPO:3443L15 |
| | | | | vitro | | | CR | AGGUG | dTs; lnaAs; | |
| | | | | | | | | GCUCC | dGs; lnaAs; | |
| | | | | | | | | | dGs; | |
| | | | | | | | | | lnaGs; dTs; | |
| | | | | | | | | | lnaGs; | |
| | | | | | | | | | dGs; lnaCs; | |
| | | | | | | | | | dTs; lnaCs; | |
| | | | | | | | | | dC- | |
| | | | | | | | | | Sup | |
| EPO-29 | 1.751559139 | 0.125318619 | EPO | in | HepG2 | 20 | qRTP | UAUAG | dTs; lnaAs; | EPO:3443L15 |
| | | | | vitro | | | CR | AGGUG | dTs; lnaAs; | |
| | | | | | | | | GCUCC | dGs; lnaAs; | |
| | | | | | | | | | dGs; | |
| | | | | | | | | | lnaGs; dTs; | |
| | | | | | | | | | lnaGs; | |
| | | | | | | | | | dGs; lnaCs; | |
| | | | | | | | | | dTs; lnaCs; | |
| | | | | | | | | | dC- | |
| | | | | | | | | | Sup | |
| EPO-29 | 4.478682909 | 0.424595639 | EPO | in | HepG2 | 50 | qRTP | UAUAG | dTs; lnaAs; | EPO:3443L15 |
| | | | | vitro | | | CR | AGGUG | dTs; lnaAs; | |
| | | | | | | | | GCUCC | dGs; lnaAs; | |
| | | | | | | | | | dGs; | |
| | | | | | | | | | lnaGs; dTs; | |
| | | | | | | | | | lnaGs; | |
| | | | | | | | | | dGs; lnaCs; | |
| | | | | | | | | | dTs; lnaCs; | |
| | | | | | | | | | dC- | |
| | | | | | | | | | Sup | |
| EPO-30 | 0.524262669 | 0.035329273 | EPO | in | HepG2 | 30 | qRTP | UUGUC | dTs; lnaTs; | EPO:3465L15 |
| | | | | vitro | | | CR | CCCGA | dGs; lnaTs; | |
| | | | | | | | | GCAGA | dCs; lnaCs; | |
| | | | | | | | | | dCs; lnaCs; | |
| | | | | | | | | | dGs; | |
| | | | | | | | | | lnaAs; dGs; | |
| | | | | | | | | | lnaCs; | |
| | | | | | | | | | dAs; lnaGs; | |
| | | | | | | | | | dA-Sup | |
| EPO-30 | 0.532850677 | 0.168139927 | EPO | in | HepG2 | 10 | qRTP | UUGUC | dTs; lnaTs; | EPO:3465L15 |
| | | | | vitro | | | CR | CCCGA | dGs; lnaTs; | |
| | | | | | | | | GCAGA | dCs; lnaCs; | |
| | | | | | | | | | dCs; lnaCs; | |
| | | | | | | | | | dGs; | |
| | | | | | | | | | lnaAs; dGs; | |
| | | | | | | | | | lnaCs; | |
| | | | | | | | | | dAs; lnaGs; | |
| | | | | | | | | | dA-Sup | |
| EPO-30 | 0.532850677 | 0.168139927 | EPO | in | HepG2 | 10 | qRTP | UUGUC | dTs; lnaTs; | EPO:3465L15 |
| | | | | vitro | | | CR | CCCGA | dGs; lnaTs; | |
| | | | | | | | | GCAGA | dCs; lnaCs; | |
| | | | | | | | | | dCs; lnaCs; | |
| | | | | | | | | | dGs; | |
| | | | | | | | | | lnaAs; dGs; | |
| | | | | | | | | | lnaCs; | |
| | | | | | | | | | dAs; lnaGs; | |
| | | | | | | | | | dA-Sup | |
| EPO-30 | 0.524262669 | 0.035329273 | EPO | in | HepG2 | 30 | qRTP | UUGUC | dTs; lnaTs; | EPO:3465L15 |
| | | | | vitro | | | CR | CCCGA | dGs; lnaTs; | |
| | | | | | | | | GCAGA | dCs; lnaCs; | |
| | | | | | | | | | dCs; lnaCs; | |
| | | | | | | | | | dGs; | |
| | | | | | | | | | lnaAs; dGs; | |
| | | | | | | | | | lnaCs; | |
| | | | | | | | | | dAs; lnaGs; | |
| | | | | | | | | | dA-Sup | |
| EPO-30 | 0.185004063 | 0.076508846 | EPO | in | Hep3B | 50 | qRTP | UUGUC | dTs; lnaTs; | EPO:3465L15 |
| | | | | vitro | | | CR | CCCGA | dGs; lnaTs; | |
| | | | | | | | | GCAGA | dCs; lnaCs; | |
| | | | | | | | | | dCs; lnaCs; | |
| | | | | | | | | | dGs; | |
| | | | | | | | | | lnaAs; dGs; | |
| | | | | | | | | | lnaCs; | |
| | | | | | | | | | dAs; lnaGs; | |
| | | | | | | | | | dA-Sup | |
| EPO-30 | 0.326091574 | 0.093361059 | EPO | in | Hep3B | 100 | qRTP | UUGUC | dTs; lnaTs; | EPO:3465L15 |
| | | | | vitro | | | CR | CCCGA | dGs; lnaTs; | |
| | | | | | | | | GCAGA | dCs; lnaCs; | |
| | | | | | | | | | dCs; lnaCs; | |
| | | | | | | | | | dGs; | |
| | | | | | | | | | lnaAs; dGs; | |
| | | | | | | | | | lnaCs; | |
| | | | | | | | | | dAs; lnaGs; | |
| | | | | | | | | | dA-Sup | |
| EPO-30 | 0.326091574 | 0.093361059 | EPO | in | Hep3B | 20 | qRTP | UUGUC | dTs; lnaTs; | EPO:3465L15 |
| | | | | vitro | | | CR | CCCGA | dGs; lnaTs; | |
| | | | | | | | | GCAGA | dCs; lnaCs; | |
| | | | | | | | | | dCs; lnaCs; | |
| | | | | | | | | | dGs; | |
| | | | | | | | | | lnaAs; dGs; | |
| | | | | | | | | | lnaCs; | |
| | | | | | | | | | dAs; lnaGs; | |
| | | | | | | | | | dA-Sup | |
| EPO-30 | 0.185004063 | 0.076508846 | EPO | in | Hep3B | 50 | qRTP | UUGUC | dTs; lnaTs; | EPO:3465L15 |
| | | | | vitro | | | CR | CCCGA | dGs; lnaTs; | |
| | | | | | | | | GCAGA | dCs; lnaCs; | |
| | | | | | | | | | dCs; lnaCs; | |
| | | | | | | | | | dGs; | |
| | | | | | | | | | lnaAs; dGs; | |
| | | | | | | | | | lnaCs; | |
| | | | | | | | | | dAs; lnaGs; | |
| | | | | | | | | | dA-Sup | |
| EPO-30 | 1.000740292 | 0.143375871 | EPO | in | HepG2 | 20 | qRTP | UUGUC | dTs; lnaTs; | EPO:3465L15 |
| | | | | vitro | | | CR | CCCGA | dGs; lnaTs; | |
| | | | | | | | | GCAGA | dCs; lnaCs; | |
| | | | | | | | | | dCs; lnaCs; | |
| | | | | | | | | | dGs; | |
| | | | | | | | | | lnaAs; dGs; | |
| | | | | | | | | | lnaCs; | |
| | | | | | | | | | dAs; lnaGs; | |
| | | | | | | | | | dA-Sup | |
| EPO-30 | 3.371418537 | 0.353449329 | EPO | in | HepG2 | 50 | qRTP | UUGUC | dTs; lnaTs; | EPO:3465L15 |
| | | | | vitro | | | CR | CCCGA | dGs; lnaTs; | |
| | | | | | | | | GCAGA | dCs; lnaCs; | |
| | | | | | | | | | dCs; lnaCs; | |
| | | | | | | | | | dGs; | |
| | | | | | | | | | lnaAs; dGs; | |
| | | | | | | | | | lnaCs; | |
| | | | | | | | | | dAs; lnaGs; | |
| | | | | | | | | | dA-Sup | |
| mEPO- | 1.500556901 | 0.10149515 | EPO | in | Hepa1-6 | 30 | qRTP | AUAAA | dAs; lnaTs; | Epo:4884L15 |
| 3 | | | | vitro | | | CR | UCUUU | dAs; lnaAs; | |
| | | | | | | | | UUAAG | dAs; lnaTs; | |
| | | | | | | | | | dCs; lnaTs; | |
| | | | | | | | | | dTs; | |
| | | | | | | | | | lnaTs; dTs; | |
| | | | | | | | | | lnaTs; dAs; | |
| | | | | | | | | | lnaAs; | |
| | | | | | | | | | dG-Sup | |
| mEPO- | 1.591188861 | 0.177728588 | EPO | in | Hepa1-6 | 10 | qRTP | AUAAA | dAs; lnaTs; | Epo:4884L15 |
| 3 | | | | vitro | | | CR | UCUUU | dAs; lnaAs; | |
| | | | | | | | | UUAAG | dAs; lnaTs; | |
| | | | | | | | | | dCs; lnaTs; | |
| | | | | | | | | | dTs; | |
| | | | | | | | | | lnaTs; dTs; | |
| | | | | | | | | | lnaTs; dAs; | |
| | | | | | | | | | lnaAs; | |
| | | | | | | | | | dG-Sup | |
| mEPO- | 1.500556901 | 0.10149515 | EPO | in | Hepa1-6 | 30 | qRTP | AUAAA | dAs; lnaTs; | Epo:4884L15 |
| 3 | | | | vitro | | | CR | UCUUU | dAs; lnaAs; | |
| | | | | | | | | UUAAG | dAs; lnaTs; | |
| | | | | | | | | | dCs; lnaTs; | |
| | | | | | | | | | dTs; | |
| | | | | | | | | | lnaTs; dTs; | |
| | | | | | | | | | lnaTs; dAs; | |
| | | | | | | | | | lnaAs; | |
| | | | | | | | | | dG-Sup | |
| mEPO- | 1.591188861 | 0.177728588 | EPO | in | Hepa1-6 | 10 | qRTP | AUAAA | dAs; lnaTs; | Epo:4884L15 |
| 3 | | | | vitro | | | CR | UCUUU | dAs; lnaAs; | |
| | | | | | | | | UUAAG | dAs; lnaTs; | |
| | | | | | | | | | dCs; lnaTs; | |
| | | | | | | | | | dTs; | |
| | | | | | | | | | lnaTs; dTs; | |
| | | | | | | | | | lnaTs; dAs; | |
| | | | | | | | | | lnaAs; | |
| | | | | | | | | | dG-Sup | |
| mEPO- | 2.931772636 | 0.477100531 | EPO | in | Hepa1-6 | 30 | qRTP | UUGAA | dTs; lnaTs; | Epo:4871U15 |
| 4 | | | | vitro | | | CR | AUUUU | dGs; lnaAs; | |
| | | | | | | | | UUUCU | dAs; lnaAs; | |
| | | | | | | | | | dTs; lnaTs; | |
| | | | | | | | | | dTs; | |
| | | | | | | | | | lnaTs; dTs; | |
| | | | | | | | | | lnaTs; dTs; | |
| | | | | | | | | | lnaCs; | |
| | | | | | | | | | dT-Sup | |
| mEPO- | 1.606123295 | 0.109637757 | EPO | in | Hepa1-6 | 10 | qRTP | UUGAA | dTs; lnaTs; | Epo:4871U15 |
| 4 | | | | vitro | | | CR | AUUUU | dGs; lnaAs; | |
| | | | | | | | | UUUCU | dAs; lnaAs; | |
| | | | | | | | | | dTs; lnaTs; | |
| | | | | | | | | | dTs; | |
| | | | | | | | | | lnaTs; dTs; | |
| | | | | | | | | | lnaTs; dTs; | |
| | | | | | | | | | lnaCs; | |
| | | | | | | | | | dT-Sup | |
| mEPO- | 2.931772636 | 0.477100531 | EPO | in | Hepa1-6 | 30 | qRTP | UUGAA | dTs; lnaTs; | Epo:4871U15 |
| 4 | | | | vitro | | | CR | AUUUU | dGs; lnaAs; | |
| | | | | | | | | UUUCU | dAs; lnaAs; | |
| | | | | | | | | | dTs; lnaTs; | |
| | | | | | | | | | dTs; | |
| | | | | | | | | | lnaTs; dTs; | |
| | | | | | | | | | lnaTs; dTs; | |
| | | | | | | | | | lnaCs; | |
| | | | | | | | | | dT-Sup | |
| mEPO- | 1.606123295 | 0.109637757 | EPO | in | Hepa1-6 | 10 | qRTP | UUGAA | dTs; lnaTs; | Epo:4871U15 |
| 4 | | | | vitro | | | CR | AUUUU | dGs; lnaAs; | |
| | | | | | | | | UUUCU | dAs; lnaAs; | |
| | | | | | | | | | dTs; lnaTs; | |
| | | | | | | | | | dTs; | |
| | | | | | | | | | lnaTs; | |
| | | | | | | | | | dTs; | |
| | | | | | | | | | lnaTs; dTs; | |
| | | | | | | | | | lnaCs; | |
| | | | | | | | | | dT-Sup | |
| mEPO- | 1.736631631 | 0.364094703 | EPO | in | Hepa1-6 | 30 | qRTP | AUGCU | dAs; lnaTs; | Epo:4149L15 |
| 7 | | | | vitro | | | CR | UUCCC | dGs; lnaCs; | |
| | | | | | | | | ACAUG | dTs; lnaTs; | |
| | | | | | | | | | dTs; lnaCs; | |
| | | | | | | | | | dCs; | |
| | | | | | | | | | lnaCs; dAs; | |
| | | | | | | | | | lnaCs; | |
| | | | | | | | | | dAs; lnaTs; | |
| | | | | | | | | | dG-Sup | |
| mEPO- | 1.465292288 | 0.274598494 | EPO | in | Hepa1-6 | 10 | qRTP | AUGCU | dAs; lnaTs; | Epo:4149L15 |
| 7 | | | | vitro | | | CR | UUCCC | dGs; lnaCs; | |
| | | | | | | | | ACAUG | dTs; lnaTs; | |
| | | | | | | | | | dTs; lnaCs; | |
| | | | | | | | | | dCs; | |
| | | | | | | | | | lnaCs; dAs; | |
| | | | | | | | | | lnaCs; | |
| | | | | | | | | | dAs; lnaTs; | |
| | | | | | | | | | dG-Sup | |
| mEPO- | 1.736631631 | 0.364094703 | EPO | in | Hepa1-6 | 30 | qRTP | AUGCU | dAs; lnaTs; | Epo:4149L15 |
| 7 | | | | vitro | | | CR | UUCCC | dGs; lnaCs; | |
| | | | | | | | | ACAUG | dTs; lnaTs; | |
| | | | | | | | | | dTs; lnaCs; | |
| | | | | | | | | | dCs; | |
| | | | | | | | | | lnaCs; dAs; | |
| | | | | | | | | | lnaCs; | |
| | | | | | | | | | dAs; lnaTs; | |
| | | | | | | | | | dG-Sup | |
| mEPO- | 1.465292288 | 0.274598494 | EPO | in | Hepa1-6 | 10 | qRTP | AUGCU | dAs; lnaTs; | Epo:4149L15 |
| 7 | | | | vitro | | | CR | UUCCC | dGs; lnaCs; | |
| | | | | | | | | ACAUG | dTs; lnaTs; | |
| | | | | | | | | | dTs; lnaCs; | |
| | | | | | | | | | dCs; | |
| | | | | | | | | | lnaCs; dAs; | |
| | | | | | | | | | lnaCs; | |
| | | | | | | | | | dAs; lnaTs; | |
| | | | | | | | | | dG-Sup | |
| mEPO- | 2.108536842 | 0.270032201 | EPO | in | Hepa1-6 | 30 | qRTP | AACGA | dAs; lnaAs; | Epo:4108L15 |
| 8 | | | | vitro | | | CR | CUUGG | dCs; lnaGs; | |
| | | | | | | | | AGUCA | dAs; lnaCs; | |
| | | | | | | | | | dTs; | |
| | | | | | | | | | lnaTs; dGs; | |
| | | | | | | | | | lnaGs; | |
| | | | | | | | | | dAs; lnaGs; | |
| | | | | | | | | | dTs; lnaCs; | |
| | | | | | | | | | dA- | |
| | | | | | | | | | Sup | |
| mEPO- | 1.025098072 | 0.182555427 | EPO | in | Hepa1-6 | 10 | qRTP | AACGA | dAs; lnaAs; | Epo:4108L15 |
| 8 | | | | vitro | | | CR | CUUGG | dCs; lnaGs; | |
| | | | | | | | | AGUCA | dAs; lnaCs; | |
| | | | | | | | | | dTs; | |
| | | | | | | | | | lnaTs; dGs; | |
| | | | | | | | | | lnaGs; | |
| | | | | | | | | | dAs; lnaGs; | |
| | | | | | | | | | dTs; lnaCs; | |
| | | | | | | | | | dA- | |
| | | | | | | | | | Sup | |
| mEPO- | 2.108536842 | 0.270032201 | EPO | in | Hepa1-6 | 30 | qRTP | AACGA | dAs; lnaAs; | Epo:4108L15 |
| 8 | | | | vitro | | | CR | CUUGG | dCs; lnaGs; | |
| | | | | | | | | AGUCA | dAs; lnaCs; | |
| | | | | | | | | | dTs; | |
| | | | | | | | | | lnaTs; dGs; | |
| | | | | | | | | | lnaGs; | |
| | | | | | | | | | dAs; lnaGs; | |
| | | | | | | | | | dTs; lnaCs; | |
| | | | | | | | | | dA- | |
| | | | | | | | | | Sup | |
| mEPO- | 1.025098072 | 0.182555427 | EPO | in | Hepa1-6 | 10 | qRTP | AACGA | dAs; lnaAs; | Epo:4108L15 |
| 8 | | | | vitro | | | CR | CUUGG | dCs; lnaGs; | |
| | | | | | | | | AGUCA | dAs; lnaCs; | |
| | | | | | | | | | dTs; | |
| | | | | | | | | | lnaTs; dGs; | |
| | | | | | | | | | lnaGs; | |
| | | | | | | | | | dAs; lnaGs; | |
| | | | | | | | | | dTs; lnaCs; | |
| | | | | | | | | | dA- | |
| | | | | | | | | | Sup | |
| mEPO- | −28.3142235 | 9.795055781 | EPO | in vivo | blood mus | 10 | ELISA | AACGA | dAs; lnaAs; | Epo:4108L15 |
| 8 | | | | | C57BI | | | CUUGG | dCs; lnaGs; | |
| | | | | | | | | AGUCA | dAs; lnaCs; | |
| | | | | | | | | | dTs; | |
| | | | | | | | | | lnaTs; dGs; | |
| | | | | | | | | | lnaGs; | |
| | | | | | | | | | dAs; lnaGs; | |
| | | | | | | | | | dTs; lnaCs; | |
| | | | | | | | | | dA- | |
| | | | | | | | | | Sup | |
| mEPO- | 16.9868525 | 26.95640432 | EPO | in vivo | blood mus | 25 | ELISA | AACGA | dAs; lnaAs; | Epo:4108L15 |
| 8 | | | | | C57BI | | | CUUGG | dCs; lnaGs; | |
| | | | | | | | | AGUCA | dAs; lnaCs; | |
| | | | | | | | | | dTs; | |
| | | | | | | | | | lnaTs; dGs; | |
| | | | | | | | | | lnaGs; | |
| | | | | | | | | | dAs; lnaGs; | |
| | | | | | | | | | dTs; lnaCs; | |
| | | | | | | | | | dA- | |
| | | | | | | | | | Sup | |
| mEPO- | 2.158833169 | 0.217042064 | EPO | in | Hepa1-6 | 30 | qRTP | UCGUU | dTs; lnaCs; | Epo:4118U15 |
| 9 | | | | vitro | | | CR | CCUUG | dGs; lnaTs; | |
| | | | | | | | | GAUUC | dTs; lnaCs; | |
| | | | | | | | | | dCs; lnaTs; | |
| | | | | | | | | | dTs; | |
| | | | | | | | | | lnaGs; dGs; | |
| | | | | | | | | | lnaAs; | |
| | | | | | | | | | dTs; lnaTs; | |
| | | | | | | | | | dC-Sup | |
| mEPO- | 1.578882659 | 0.533247095 | EPO | in | Hepa1-6 | 10 | qRTP | UCGUU | dTs; lnaCs; | Epo:4118U15 |
| 9 | | | | vitro | | | CR | CCUUG | dGs; lnaTs; | |
| | | | | | | | | GAUUC | dTs; lnaCs; | |
| | | | | | | | | | dCs; lnaTs; | |
| | | | | | | | | | dTs; | |
| | | | | | | | | | lnaGs; dGs; | |
| | | | | | | | | | lnaAs; | |
| | | | | | | | | | dTs; lnaTs; | |
| | | | | | | | | | dC-Sup | |
| mEPO- | 2.158833169 | 0.217042064 | EPO | in | Hepa1-6 | 30 | qRTP | UCGUU | dTs; lnaCs; | Epo:4118U15 |
| 9 | | | | vitro | | | CR | CCUUG | dGs; lnaTs; | |
| | | | | | | | | GAUUC | dTs; lnaCs; | |
| | | | | | | | | | dCs; lnaTs; | |
| | | | | | | | | | dTs; | |
| | | | | | | | | | lnaGs; dGs; | |
| | | | | | | | | | lnaAs; | |
| | | | | | | | | | dTs; lnaTs; | |
| | | | | | | | | | dC-Sup | |
| mEPO- | 1.578882659 | 0.533247095 | EPO | in | Hepa1-6 | 10 | qRTP | UCGUU | dTs; lnaCs; | Epo:4118U15 |
| 9 | | | | vitro | | | CR | CCUUG | dGs; lnaTs; | |
| | | | | | | | | GAUUC | dTs; lnaCs; | |
| | | | | | | | | | dCs; lnaTs; | |
| | | | | | | | | | dTs; | |
| | | | | | | | | | lnaGs; dGs; | |
| | | | | | | | | | lnaAs; | |
| | | | | | | | | | dTs; lnaTs; | |
| | | | | | | | | | dC-Sup | |
| mEPO- | −33.600784 | 4.459534109 | EPO | in vivo | blood mus | 10 | ELISA | UCGUU | dTs; lnaCs; | Epo:4118U15 |
| 9 | | | | | C57BI | | | CCUUG | dGs; lnaTs; | |
| | | | | | | | | GAUUC | dTs; lnaCs; | |
| | | | | | | | | | dCs; lnaTs; | |
| | | | | | | | | | dTs; | |
| | | | | | | | | | lnaGs; dGs; | |
| | | | | | | | | | lnaAs; | |
| | | | | | | | | | dTs; lnaTs; | |
| | | | | | | | | | dC-Sup | |
| mEPO- | −7.34191875 | 14.36962423 | EPO | in vivo | blood mus | 25 | ELISA | UCGUU | dTs; lnaCS; | Epo:4118U15 |
| 9 | | | | | C57BI | | | CCUUG | dGs; lnaTs; | |
| | | | | | | | | GAUUC | dTs; lnaCs; | |
| | | | | | | | | | dCs; lnaTs; | |
| | | | | | | | | | dTs; | |
| | | | | | | | | | lnaGs; dGs; | |
| | | | | | | | | | lnaAs; | |
| | | | | | | | | | dTs; lnaTs; | |
| | | | | | | | | | dC-Sup | |
| mEPO- | NA | NA | EPO | NA | NA | 0 | NA | UCGUU | dTs; omeCs; | Epo:4118U15 |
| 09- | | | | | | | | CCUUG | dGs; omeUs; | |
| 2OMe | | | | | | | | GAUUC | dTs; | |
| | | | | | | | | | omeCs; | |
| | | | | | | | | | dCs; omeUs; | |
| | | | | | | | | | dTs; omeGs; | |
| | | | | | | | | | dGs; omeAs; | |
| | | | | | | | | | dTs; omeUs; | |
| | | | | | | | | | dC- | |
| | | | | | | | | | Sup | |
| mEPO- | 1.982808568 | 0.399088954 | EPO | in | Hepa1-6 | 30 | qRTP | UAGUG | dTs; lnaAs; | Epo:4141U15 |
| 10 | | | | vitro | | | CR | CUUCA | dGs; lnaTs; | |
| | | | | | | | | UGUGG | dGs; lnaCs; | |
| | | | | | | | | | dTs; lnaTs; | |
| | | | | | | | | | dCs; | |
| | | | | | | | | | lnaAs; dTs; | |
| | | | | | | | | | lnaGs; dTs; | |
| | | | | | | | | | lnaGs; | |
| | | | | | | | | | dG-Sup | |
| mEPO- | 1.682704828 | 0.362612652 | EPO | in | Hepa1-6 | 10 | qRTP | UAGUG | dTs; lnaAs; | Epo:4141U15 |
| 10 | | | | vitro | | | CR | CUUCA | dGs; lnaTs; | |
| | | | | | | | | UGUGG | dGs; lnaCs; | |
| | | | | | | | | | dTs; lnaTs; | |
| | | | | | | | | | dCs; | |
| | | | | | | | | | lnaAs; dTs; | |
| | | | | | | | | | lnaGs; dTs; | |
| | | | | | | | | | lnaGs; | |
| | | | | | | | | | dG-Sup | |
| mEPO- | 1.982808568 | 0.399088954 | EPO | in | Hepa1-6 | 30 | qRTP | UAGUG | dTs; lnaAs; | Epo:4141U15 |
| 10 | | | | vitro | | | CR | CUUCA | dGs; lnaTs; | |
| | | | | | | | | UGUGG | dGs; lnaCs; | |
| | | | | | | | | | dTs; lnaTs; | |
| | | | | | | | | | dCs; | |
| | | | | | | | | | lnaAs; dTs; | |
| | | | | | | | | | lnaGs; dTs; | |
| | | | | | | | | | lnaGs; | |
| | | | | | | | | | dG-Sup | |
| mEPO- | 1.682704828 | 0.362612652 | EPO | in | Hepa1-6 | 10 | qRTP | UAGUG | dTs; lnaAs; | Epo:4141U15 |
| 10 | | | | vitro | | | CR | CUUCA | dGs; lnaTs; | |
| | | | | | | | | UGUGG | dGs; lnaCs; | |
| | | | | | | | | | dTs; lnaTs; | |
| | | | | | | | | | dCs; | |
| | | | | | | | | | lnaAs; dTs; | |
| | | | | | | | | | lnaGs; dTs; | |
| | | | | | | | | | lnaGs; | |
| | | | | | | | | | dG-Sup | |
| mEPO- | 1.49939365 | 0.284562834 | EPO | in | Hepa1-6 | 30 | qRTP | UAGGA | dTs; lnaAs; | Epo:4167U15 |
| 11 | | | | vitro | | | CR | GAGAG | dGs; lnaGs; | |
| | | | | | | | | ACCCA | dAs; lnaGs; | |
| | | | | | | | | | dAs; | |
| | | | | | | | | | lnaGs; dAs; | |
| | | | | | | | | | lnaGs; | |
| | | | | | | | | | dAs; lnaCs; | |
| | | | | | | | | | dCs; lnaCs; | |
| | | | | | | | | | dA- | |
| | | | | | | | | | Sup | |
| mEPO- | 1.440761064 | 0.284339748 | EPO | in | Hepa1-6 | 10 | qRTP | UAGGA | dTs; lnaAs; | Epo:4167U15 |
| 11 | | | | vitro | | | CR | GAGAG | dGs; lnaGs; | |
| | | | | | | | | ACCCA | dAs; lnaGs; | |
| | | | | | | | | | dAs; | |
| | | | | | | | | | lnaGs; dAs; | |
| | | | | | | | | | lnaGs; | |
| | | | | | | | | | dAs; lnaCs; | |
| | | | | | | | | | dCs; lnaCs; | |
| | | | | | | | | | dA- | |
| | | | | | | | | | Sup | |
| mEPO- | 1.49939365 | 0.284562834 | EPO | in | Hepa1-6 | 30 | qRTP | UAGGA | dTs; lnaAs; | Epo:4167U15 |
| 11 | | | | vitro | | | CR | GAGAG | dGs; lnaGs; | |
| | | | | | | | | ACCCA | dAs; lnaGs; | |
| | | | | | | | | | dAs; | |
| | | | | | | | | | lnaGs; dAs; | |
| | | | | | | | | | lnaGs; | |
| | | | | | | | | | dAs; lnaCs; | |
| | | | | | | | | | dCs; lnaCs; | |
| | | | | | | | | | dA- | |
| | | | | | | | | | Sup | |
| mEPO- | 1.440761064 | 0.284339748 | EPO | in | Hepa1-6 | 10 | qRTP | UAGGA | dTs; lnaAs; | Epo:4167U15 |
| 11 | | | | vitro | | | CR | GAGAG | dGs; lnaGs; | |
| | | | | | | | | ACCCA | dAs; lnaGs; | |
| | | | | | | | | | dAs; | |
| | | | | | | | | | lnaGs; dAs; | |
| | | | | | | | | | lnaGs; | |
| | | | | | | | | | dAs; lnaCs; | |
| | | | | | | | | | dCs; lnaCs; | |
| | | | | | | | | | dA- | |
| | | | | | | | | | Sup | |
| mEPO- | −3.39268375 | 16.39139578 | EPO | in vivo | blood mus | 10 | ELISA | UAGGA | dTs; lnaAs; | Epo:4167U15 |
| 11 | | | | | C57BI | | | GAGAG | dGs; lnaGs; | |
| | | | | | | | | ACCCA | dAs; lnaGs; | |
| | | | | | | | | | dAs; | |
| | | | | | | | | | lnaGs; dAs; | |
| | | | | | | | | | lnaGs; | |
| | | | | | | | | | dAs; lnaCs; | |
| | | | | | | | | | dCs; lnaCs; | |
| | | | | | | | | | dA- | |
| | | | | | | | | | Sup | |
| mEPO- | 102.1739463 | 36.37912617 | EPO | in vivo | blood mus | 25 | ELISA | UAGGA | dTs; lnaAs; | Epo:4167U15 |
| 11 | | | | | C57BI | | | GAGAG | dGs; lnaGs; | |
| | | | | | | | | ACCCA | dAs; lnaGs; | |
| | | | | | | | | | dAs; | |
| | | | | | | | | | lnaGs; dAs; | |
| | | | | | | | | | lnaGs; | |
| | | | | | | | | | dAs; lnaCs; | |
| | | | | | | | | | dCs; lnaCs; | |
| | | | | | | | | | dA- | |
| | | | | | | | | | Sup | |
| mEPO- | NA | NA | EPO | NA | NA | 0 | NA | UAGGA | dTs; omeAs; | Epo:4167U15 |
| 11- | | | | | | | | GAGAG | dGs; omeGs; | |
| 2OMe | | | | | | | | ACCCA | dAs; | |
| | | | | | | | | | omeGs; | |
| | | | | | | | | | dAs; omeGs; | |
| | | | | | | | | | dAs; | |
| | | | | | | | | | omeGs; dAs; | |
| | | | | | | | | | omeCs; | |
| | | | | | | | | | dCs; omeCs; | |
| | | | | | | | | | dA- | |
| | | | | | | | | | Sup | |
| mEPO- | NA | NA | EPO | NA | NA | 0 | NA | UAGGA | dTs; enaAs; | Epo:4167U15 |
| 11-ENA | | | | | | | | GAGAG | dGs; enaGs; | |
| | | | | | | | | ACCCA | dAs; | |
| | | | | | | | | | enaGs; dAs; | |
| | | | | | | | | | enaGs; | |
| | | | | | | | | | dAs; enaGs; | |
| | | | | | | | | | dAs; enaCs; | |
| | | | | | | | | | dCs; | |
| | | | | | | | | | enaCs; dA- | |
| | | | | | | | | | Sup | |
| mEPO- | 3.583227425 | 0.04474226 | EPO | in | Hepa1-6 | 30 | qRTP | UCCAU | dTs; lnaCs; | Epo:2942U15 |
| 15 | | | | vitro | | | CR | UCUGA | dCs; lnaAs; | |
| | | | | | | | | AAUCU | dTs; lnaTs; | |
| | | | | | | | | | dCs; lnaTs; | |
| | | | | | | | | | dGs; | |
| | | | | | | | | | lnaAs; dAs; | |
| | | | | | | | | | lnaAs; | |
| | | | | | | | | | dTs; lnaCs; | |
| | | | | | | | | | dT-Sup | |
| mEPO- | 1.619098766 | 0.162739446 | EPO | in | Hepa1-6 | 10 | qRTP | UCCAU | dTs; lnaCs; | Epo:2942U15 |
| 15 | | | | vitro | | | CR | UCUGA | dCs; lnaAs; | |
| | | | | | | | | AAUCU | dTs; lnaTs; | |
| | | | | | | | | | dCs; lnaTs; | |
| | | | | | | | | | dGs; | |
| | | | | | | | | | lnaAs; dAs; | |
| | | | | | | | | | lnaAs; | |
| | | | | | | | | | dTs; lnaCs; | |
| | | | | | | | | | dT-Sup | |
| mEPO- | 3.583227425 | 0.04474226 | EPO | in | Hepa1-6 | 30 | qRTP | UCCAU | dTs; lnaCs; | Epo:2942U15 |
| 15 | | | | vitro | | | CR | UCUGA | dCs; lnaAs; | |
| | | | | | | | | AAUCU | dTs; lnaTs; | |
| | | | | | | | | | dCs; lnaTs; | |
| | | | | | | | | | dGs; | |
| | | | | | | | | | lnaAs; dAs; | |
| | | | | | | | | | lnaAs; | |
| | | | | | | | | | dTs; lnaCs; | |
| | | | | | | | | | dT-Sup | |
| mEPO- | 1.619098766 | 0.162739446 | EPO | in | Hepa1-6 | 10 | qRTP | UCCAU | dTs; lnaCs; | Epo:2942U15 |
| 15 | | | | vitro | | | CR | UCUGA | dCs; lnaAs; | |
| | | | | | | | | AAUCU | dTs; lnaTs; | |
| | | | | | | | | | dCs; lnaTs; | |
| | | | | | | | | | dGs; | |
| | | | | | | | | | lnaAs; dAs; | |
| | | | | | | | | | lnaAs; | |
| | | | | | | | | | dTs; lnaCs; | |
| | | | | | | | | | dT-Sup | |
| mEPO- | 1.281807135 | 0.34348502 | EPO | in | Hepa1-6 | 30 | qRTP | AGUCU | dAs; lnaGs; | Epo:2876U15 |
| 18 | | | | vitro | | | CR | GUCCC | dTs; lnaCs; | |
| | | | | | | | | AUGGA | dTs; lnaGs; | |
| | | | | | | | | | dTs; lnaCs; | |
| | | | | | | | | | dCs; | |
| | | | | | | | | | lnaCs; dAs; | |
| | | | | | | | | | lnaTs; | |
| | | | | | | | | | dGs; lnaGs; | |
| | | | | | | | | | dA-Sup | |
| mEPO- | 1.304787405 | 0.219606649 | EPO | in | Hepa1-6 | 10 | qRTP | AGUCU | dAs; lnaGs; | Epo:2876U15 |
| 18 | | | | vitro | | | CR | GUCCC | dTs; lnaCs; | |
| | | | | | | | | AUGGA | dTs; lnaGs; | |
| | | | | | | | | | dTs; lnaCs; | |
| | | | | | | | | | dCs; | |
| | | | | | | | | | lnaCs; dAs; | |
| | | | | | | | | | lnaTs; | |
| | | | | | | | | | dGs; lnaGs; | |
| | | | | | | | | | dA-Sup | |
| mEPO- | 1.281807135 | 0.34348502 | EPO | in | Hepa1-6 | 30 | qRTP | AGUCU | dAs; lnaGs; | Epo:2876U15 |
| 18 | | | | vitro | | | CR | GUCCC | dTs; lnaCs; | |
| | | | | | | | | AUGGA | dTs; lnaGs; | |
| | | | | | | | | | dTs; lnaCs; | |
| | | | | | | | | | dCs; | |
| | | | | | | | | | lnaCs; dAs; | |
| | | | | | | | | | lnaTs; | |
| | | | | | | | | | dGs; lnaGs; | |
| | | | | | | | | | dA-Sup | |
| mEPO- | 1.304787405 | 0.219606649 | EPO | in | Hepa1-6 | 10 | qRTP | AGUCU | dAs; lnaGs; | Epo:2876U15 |
| 18 | | | | vitro | | | CR | GUCCC | dTs; lnaCs; | |
| | | | | | | | | AUGGA | dTs; lnaGs; | |
| | | | | | | | | | dTs; lnaCs; | |
| | | | | | | | | | dCs; | |
| | | | | | | | | | lnaCs; dAs; | |
| | | | | | | | | | lnaTs; | |
| | | | | | | | | | dGs; lnaGs; | |
| | | | | | | | | | dA-Sup | |
| mEPO- | −25.87813 | 9.579031304 | EPO | in vivo | blood mus | 10 | ELISA | AGUCU | dAs; lnaGs; | Epo:2876U15 |
| 18 | | | | | C57BI | | | GUCCC | dTs; lnaCs; | |
| | | | | | | | | AUGGA | dTs; lnaGs; | |
| | | | | | | | | | dTs; lnaCs; | |
| | | | | | | | | | dCs; | |
| | | | | | | | | | lnaCs; dAs; | |
| | | | | | | | | | lnaTs; | |
| | | | | | | | | | dGs; lnaGs; | |
| | | | | | | | | | dA-Sup | |
| mEPO- | 163.3289988 | 53.60017297 | EPO | in vivo | blood mus | 25 | ELISA | AGUCU | dAs; lnaGs; | Epo:2876U15 |
| 18 | | | | | C57BI | | | GUCCC | dTs; lnaCs; | |
| | | | | | | | | AUGGA | dTs; lnaGs; | |
| | | | | | | | | | dTs; lnaCs; | |
| | | | | | | | | | dCs; | |
| | | | | | | | | | lnaCs; dAs; | |
| | | | | | | | | | lnaTs; | |
| | | | | | | | | | dGs; lnaGs; | |
| | | | | | | | | | dA-Sup | |
| mEPO- | NA | NA | EPO | NA | NA | 0 | NA | AGUCU | dAs; omeGs; | Epo:2876U15 |
| 18- | | | | | | | | GUCCC | dTs; omeCs; | |
| 2OMe | | | | | | | | AUGGA | dTs; | |
| | | | | | | | | | omeGs; | |
| | | | | | | | | | dTs; omeCs; | |
| | | | | | | | | | dCs; omeCs; | |
| | | | | | | | | | dAs; | |
| | | | | | | | | | omeUs; | |
| | | | | | | | | | dGs; omeGs; | |
| | | | | | | | | | dA- | |
| | | | | | | | | | Sup | |
| mEPO- | NA | NA | EPO | NA | NA | 0 | NA | AGUCU | dAs; enaGs; | Epo:2876U15 |
| 18-ENA | | | | | | | | GUCCC | dTs; enaCs; | |
| | | | | | | | | AUGGA | dTs; | |
| | | | | | | | | | enaGs; dTs; | |
| | | | | | | | | | enaCs; | |
| | | | | | | | | | dCs; enaCs; | |
| | | | | | | | | | dAs; enaTs; | |
| | | | | | | | | | dGs; | |
| | | | | | | | | | enaGs; dA- | |
| | | | | | | | | | Sup | |
| mEPO- | 1.628615057 | 0.068267201 | EPO | in | Hepa1-6 | 30 | qRTP | AACUG | dAs; lnaAs; | Epo:2722U15 |
| 23 | | | | vitro | | | CR | AAGCU | dCs; lnaTs; | |
| | | | | | | | | GUACA | dGs; lnaAs; | |
| | | | | | | | | | dAs; lnaGs; | |
| | | | | | | | | | dCs; | |
| | | | | | | | | | lnaTs; dGs; | |
| | | | | | | | | | lnaTs; | |
| | | | | | | | | | dAs; lnaCs; | |
| | | | | | | | | | dA-Sup | |
| mEPO- | 1.56892643 | 0.128795624 | EPO | in | Hepa1-6 | 10 | qRTP | AACUG | dAs; lnaAs; | Epo:2722U15 |
| 23 | | | | vitro | | | CR | AAGCU | dCs; lnaTs; | |
| | | | | | | | | GUACA | dGs; lnaAs; | |
| | | | | | | | | | dAs; lnaGs; | |
| | | | | | | | | | dCs; | |
| | | | | | | | | | lnaTs; dGs; | |
| | | | | | | | | | lnaTs; | |
| | | | | | | | | | dAs; lnaCs; | |
| | | | | | | | | | dA-Sup | |
| mEPO- | 1.628615057 | 0.068267201 | EPO | in | Hepa1-6 | 30 | qRTP | AACUG | dAs; lnaAs; | Epo:2722U15 |
| 23 | | | | vitro | | | CR | AAGCU | dCs; lnaTs; | |
| | | | | | | | | GUACA | dGs; lnaAs; | |
| | | | | | | | | | dAs; lnaGs; | |
| | | | | | | | | | dCs; | |
| | | | | | | | | | lnaTs; dGs; | |
| | | | | | | | | | lnaTs; | |
| | | | | | | | | | dAs; lnaCs; | |
| | | | | | | | | | dA-Sup | |
| mEPO- | 1.56892643 | 0.128795624 | EPO | in | Hepa1-6 | 10 | qRTP | AACUG | dAs; lnaAs; | Epo:2722U15 |
| 23 | | | | vitro | | | CR | AAGCU | dCs; lnaTs; | |
| | | | | | | | | GUACA | dGs; lnaAs; | |
| | | | | | | | | | dAs; lnaGs; | |
| | | | | | | | | | dCs; | |
| | | | | | | | | | lnaTs; dGs; | |
| | | | | | | | | | lnaTs; | |
| | | | | | | | | | dAs; lnaCs; | |
| | | | | | | | | | dA-Sup | |
| mEPO- | 1.622347112 | 0.140922726 | EPO | in | Hepa1-6 | 30 | qRTP | AGUUU | dAs; lnaGs; | Epo:2711L15 |
| 24 | | | | vitro | | | CR | CCCCCG | dTs; lnaTs; | |
| | | | | | | | | GAGG | dTs; lnaCs; | |
| | | | | | | | | | dCs; lnaCs; | |
| | | | | | | | | | dCs; | |
| | | | | | | | | | lnaCs; dGs; | |
| | | | | | | | | | lnaGs; | |
| | | | | | | | | | dAs; lnaGs; | |
| | | | | | | | | | dG- | |
| | | | | | | | | | Sup | |
| mEPO- | 1.977392809 | 0.185072154 | EPO | in | Hepa1-6 | 10 | qRTP | AGUUU | dAs; lnaGs; | Epo:2711L15 |
| 24 | | | | vitro | | | CR | CCCCCG | dTs; lnaTs; | |
| | | | | | | | | GAGG | dTs; lnaCs; | |
| | | | | | | | | | dCs; lnaCs; | |
| | | | | | | | | | dCs; | |
| | | | | | | | | | lnaCs; dGs; | |
| | | | | | | | | | lnaGs; | |
| | | | | | | | | | dAs; lnaGs; | |
| | | | | | | | | | dG- | |
| | | | | | | | | | Sup | |
| mEPO- | 1.622347112 | 0.140922726 | EPO | in | Hepa1-6 | 30 | qRTP | AGUUU | dAs; lnaGs; | Epo:2711L15 |
| 24 | | | | vitro | | | CR | CCCCCG | dTs; lnaTs; | |
| | | | | | | | | GAGG | dTs; lnaCs; | |
| | | | | | | | | | dCs; lnaCs; | |
| | | | | | | | | | dCs; | |
| | | | | | | | | | lnaCs; dGs; | |
| | | | | | | | | | lnaGs; | |
| | | | | | | | | | dAs; lnaGs; | |
| | | | | | | | | | dG- | |
| | | | | | | | | | Sup | |
| mEPO- | 1.977392809 | 0.185072154 | EPO | in | Hepa1-6 | 10 | qRTP | AGUUU | dAs; lnaGs; | Epo:2711L15 |
| 24 | | | | vitro | | | CR | CCCCCG | dTs; lnaTs; | |
| | | | | | | | | GAGG | dTs; lnaCs; | |
| | | | | | | | | | dCs; lnaCs; | |
| | | | | | | | | | dCs; | |
| | | | | | | | | | lnaCs; dGs; | |
| | | | | | | | | | lnaGs; | |
| | | | | | | | | | dAs; lnaGs; | |
| | | | | | | | | | dG- | |
| | | | | | | | | | Sup | |
| mEPO- | −18.65044125 | 10.68048585 | EPO | in vivo | blood mus | 10 | ELISA | AGUUU | dAs; lnaGs; | Epo:2711L15 |
| 24 | | | | | C57BI | | | CCCCCG | dTs; lnaTs; | |
| | | | | | | | | GAGG | dTs; lnaCs; | |
| | | | | | | | | | dCs; lnaCs; | |
| | | | | | | | | | dCs; | |
| | | | | | | | | | lnaCs; dGs; | |
| | | | | | | | | | lnaGs; | |
| | | | | | | | | | dAs; lnaGs; | |
| | | | | | | | | | dG- | |
| | | | | | | | | | Sup | |
| mEPO- | −24.60016825 | 12.1577921 | EPO | in vivo | blood mus | 25 | ELISA | AGUUU | dAs; lnaGs; | Epo:2711L15 |
| 24 | | | | | C57BI | | | CCCCCG | dTs; lnaTs; | |
| | | | | | | | | GAGG | dTs; lnaCs; | |
| | | | | | | | | | dCs; lnaCs; | |
| | | | | | | | | | dCs; | |
| | | | | | | | | | lnaCs; dGs; | |
| | | | | | | | | | lnaGs; | |
| | | | | | | | | | dAs; lnaGs; | |
| | | | | | | | | | dG- | |
| | | | | | | | | | Sup | |
| mEPO- | 2.867521141 | 0.312157732 | EPO | in | Hepa1-6 | 30 | qRTP | AGAAC | dAs; lnaGs; | Epo:25U15 |
| 29 | | | | vitro | | | CR | UUCCA | dAs; lnaAs; | |
| | | | | | | | | AGGAU | dCs; lnaTs; | |
| | | | | | | | | | dTs; lnaCs; | |
| | | | | | | | | | dCs; | |
| | | | | | | | | | lnaAs; dAs; | |
| | | | | | | | | | lnaGs; | |
| | | | | | | | | | dGs; lnaAs; | |
| | | | | | | | | | dT-Sup | |
| mEPO- | 1.39041297 | 0.389629298 | EPO | in | Hepa1-6 | 10 | qRTP | AGAAC | dAs; lnaGs; | Epo:25U15 |
| 29 | | | | vitro | | | CR | UUCCA | dAs; lnaAs; | |
| | | | | | | | | AGGAU | dCs; lnaTs; | |
| | | | | | | | | | dTs; lnaCs; | |
| | | | | | | | | | dCs; | |
| | | | | | | | | | lnaAs; dAs; | |
| | | | | | | | | | lnaGs; | |
| | | | | | | | | | dGs; lnaAs; | |
| | | | | | | | | | dT-Sup | |
| mEPO- | 2.867521141 | 0.312157732 | EPO | in | Hepa1-6 | 30 | qRTP | AGAAC | dAs; lnaGs; | Epo:25U15 |
| 29 | | | | vitro | | | CR | UUCCA | dAs; lnaAs; | |
| | | | | | | | | AGGAU | dCs; lnaTs; | |
| | | | | | | | | | dTs; lnaCs; | |
| | | | | | | | | | dCs; | |
| | | | | | | | | | lnaAs; dAs; | |
| | | | | | | | | | lnaGs; | |
| | | | | | | | | | dGs; lnaAs; | |
| | | | | | | | | | dT-Sup | |
| mEPO- | 1.39041297 | 0.389629298 | EPO | in | Hepa1-6 | 10 | qRTP | AGAAC | dAs; lnaGs; | Epo:25U15 |
| 29 | | | | vitro | | | CR | UUCCA | dAs; lnaAs; | |
| | | | | | | | | AGGAU | dCs; lnaTs; | |
| | | | | | | | | | dTs; lnaCs; | |
| | | | | | | | | | dCs; | |
| | | | | | | | | | lnaAs; dAs; | |
| | | | | | | | | | lnaGs; | |
| | | | | | | | | | dGs; lnaAs; | |
| | | | | | | | | | dT-Sup | |
| mEPO- | −17.52425375 | 11.65852859 | EPO | in vivo | blood mus | 10 | ELISA | AGAAC | dAs; lnaGs; | Epo:25U15 |
| 29 | | | | | C57BI | | | UUCCA | dAs; lnaAs; | |
| | | | | | | | | AGGAU | dCs; lnaTs; | |
| | | | | | | | | | dTs; lnaCs; | |
| | | | | | | | | | dCs; | |
| | | | | | | | | | lnaAs; dAs; | |
| | | | | | | | | | lnaGs; | |
| | | | | | | | | | dGs; lnaAs; | |
| | | | | | | | | | dT-Sup | |
| mEPO- | −3.344425 | 2.189440103 | EPO | in vivo | blood mus | 25 | ELISA | AGAAC | dAs; lnaGs; | Epo:25U15 |
| 29 | | | | | C57BI | | | UUCCA | dAs; lnaAs; | |
| | | | | | | | | AGGAU | dCs; lnaTs; | |
| | | | | | | | | | dTs; lnaCs; | |
| | | | | | | | | | dCs; | |
| | | | | | | | | | lnaAs; dAs; | |
| | | | | | | | | | lnaGs; | |
| | | | | | | | | | dGs; lnaAs; | |
| | | | | | | | | | dT-Sup | |
| mEPO- | NA | NA | EPO | NA | NA | 0 | NA | UCGUU | dTs; enaCs; | Epo:4118U15 |
| 9-ENA | | | | | | | | CCUUG | dGs; enaTs; | |
| | | | | | | | | GAUUC | dTs; | |
| | | | | | | | | | enaCs; dCs; | |
| | | | | | | | | | enaTs; | |
| | | | | | | | | | dTs; enaGs; | |
| | | | | | | | | | dGs; enaAs; | |
| | | | | | | | | | dTs; | |
| | | | | | | | | | enaTs; dC- | |
| | | | | | | | | | Sup | |
| F7-01 | 1.854532506 | 0.05397424 | F7 | in | Hep3B | 30 | qRTP | UGAAG | dTs; lnaGs; | F7:6110L20 |
| | | | | vitro | | | CR | UGCGC | dAs; lnaAs; | |
| | | | | | | | | CCUGA | dGs; lnaTs; | |
| | | | | | | | | GUGUG | dGs; | |
| | | | | | | | | | lnaCs; dGs; | |
| | | | | | | | | | lnaCs; | |
| | | | | | | | | | dCs; lnaCs; | |
| | | | | | | | | | dTs; lnaGs; | |
| | | | | | | | | | dAs; lnaGs; | |
| | | | | | | | | | dTs; | |
| | | | | | | | | | lnaGs; dTs; | |
| | | | | | | | | | lnaG- | |
| | | | | | | | | | Sup | |
| F7-01 | 1.237345267 | 0.098413816 | F7 | in | Hep3B | 10 | qRTP | UGAAG | dTs; lnaGs; | F7:6110L20 |
| | | | | vitro | | | CR | UGCGC | dAs; lnaAs; | |
| | | | | | | | | CCUGA | dGs; lnaTs; | |
| | | | | | | | | GUGUG | dGs; | |
| | | | | | | | | | lnaCs; dGs; | |
| | | | | | | | | | lnaCs; | |
| | | | | | | | | | dCs; lnaCs; | |
| | | | | | | | | | dTs; lnaGs; | |
| | | | | | | | | | dAs; lnaGs; | |
| | | | | | | | | | dTs; | |
| | | | | | | | | | lnaGs; dTs; | |
| | | | | | | | | | lnaG- | |
| | | | | | | | | | Sup | |
| F7-02 | 10.62268828 | 3.225128948 | F7 | in | Hep3B | 30 | qRTP | GUGUG | omeGs; omeUs; omeGs; omeUs; omeGs; | F7:6113L20 |
| | | | | | | | CR | AAGUG | omeAs; omeAs; omeGs; omeUs; omeGs; | |
| | | | | vitro | | | | CGCCC | omeCs; omeGs; omeCs; omeCs; omeCs; | |
| | | | | | | | | UGAGU | omeUs; omeGs; omeAs; omeGs; omeU-Sup | |
| F7-02 | 1.859019545 | 0.390428384 | F7 | in | Hep3B | 10 | qRTP | GUGUG | omeGs; omeUs; omeGs; omeUs; omeGs; | F7:6113L20 |
| | | | | | | | CR | AAGUG | omeAs; omeAs; omeGs; omeUs; omeGs; | |
| | | | | vitro | | | | CGCCC | omeCs; omeGs; omeCs; omeCs; omeCs; | |
| | | | | | | | | UGAGU | omeUs; omeGs; omeAs; omeGs; omeU-Sup | |
| F7-03 | 3.146733303 | 1.328865754 | F7 | in | Hep3B | 30 | qRTP | AGUGU | omeAs; omeGs; omeUs; omeGs; omeUs; | F7:6114L20 |
| | | | | | | | CR | GAAGU | omeGs; omeAs; omeAs; omeGs; omeUs; | |
| | | | | vitro | | | | GCGCC | omeGs; omeCs; omeGs; omeCs; omeCs; | |
| | | | | | | | | CUGAG | omeCs; omeUs; omeGs; omeAs; omeG-Sup | |
| F7-03 | 1.076023367 | 0.055893012 | F7 | in | Hep3B | 10 | qRTP | AGUGU | omeAs; omeGs; omeUs; omeGs; omeUs; | F7:6114L20 |
| | | | | | | | CR | GAAGU | omeGs; omeAs; omeAs; omeGs; omeUs; | |
| | | | | vitro | | | | GCGCC | omeGs; omeCs; omeGs; omeCs; omeCs; | |
| | | | | | | | | CUGAG | omeCs; omeUs; omeGs; omeAs; omeG-Sup | |
| F7-04 | 11.37111993 | 3.99799625 | F7 | in | Hep3B | 30 | qRTP | GAGUG | omeGs; omeAs; omeGs; omeUs; omeGs; | F7:6115L20 |
| | | | | | | | CR | UGAAG | omeUs; omeGs; omeAs; omeAs; omeGs; | |
| | | | | vitro | | | | UGCGC | omeUs; omeGs; omeCs; omeGs; omeCs; | |
| | | | | | | | | CCUGA | omeCs; omeCs; omeUs; omeGs; omeA-Sup | |
| F7-04 | 1.974233894 | 0.186138133 | F7 | in | Hep3B | 10 | qRTP | GAGUG | omeGs; omeAs; omeGs; omeUs; omeGs; | F7:6115L20 |
| | | | | | | | CR | UGAAG | omeUs; omeGs; omeAs; omeAs; omeGs; | |
| | | | | vitro | | | | UGCGC | omeUs; omeGs; omeCs; omeGs; omeCs; | |
| | | | | | | | | CCUGA | omeCs; omeCs; omeUs; omeGs; omeA-Sup | |
| F7-05 | 2.441235968 | 0.1364197 | F7 | in | Hep3B | 30 | qRTP | UGAGU | dTs; lnaGs; | F7:6116L20 |
| | | | | vitro | | | CR | GUGAA | dAs; lnaGs; | |
| | | | | | | | | GUGCG | dTs; lnaGs; | |
| | | | | | | | | CCCUG | dTs; lnaGs; | |
| | | | | | | | | | dAs; | |
| | | | | | | | | | lnaAs; dGs; | |
| | | | | | | | | | lnaTs; | |
| | | | | | | | | | dGs; lnaCs; | |
| | | | | | | | | | dGs; lnaCs; | |
| | | | | | | | | | dCs; lnaCs; | |
| | | | | | | | | | dTs; lnaG- | |
| | | | | | | | | | Sup | |
| F7-05 | 1.616686271 | 0.016982726 | F7 | in | Hep3B | 10 | qRTP | UGAGU | dTs; lnaGs; | F7:6116L20 |
| | | | | vitro | | | CR | GUGAA | dAs; lnaGs; | |
| | | | | | | | | GUGCG | dTs; lnaGs; | |
| | | | | | | | | CCCUG | dTs; lnaGs; | |
| | | | | | | | | | dAs; | |
| | | | | | | | | | lnaAs; dGs; | |
| | | | | | | | | | lnaTs; | |
| | | | | | | | | | dGs; lnaCs; | |
| | | | | | | | | | dGs; lnaCs; | |
| | | | | | | | | | dCs; lnaCs; | |
| | | | | | | | | | dTs; lnaG- | |
| | | | | | | | | | Sup | |
| F7-06 | 7.303225888 | 1.582415365 | F7 | in | Hep3B | 30 | qRTP | CCGUG | omeCs; omeCs; omeGs; omeUs; omeGs; | F7:6119L20 |
| | | | | | | | CR | AGUGU | omeAs; omeGs; omeUs; omeGs; omeUs; | |
| | | | | vitro | | | | GAAGU | omeGs; omeAs; omeAs; omeGs; omeUs; | |
| | | | | | | | | GCGCC | omeGs; omeCs; omeGs; omeCs; omeC-Sup | |
| F7-06 | 2.25509744 | 0.032999276 | F7 | in | Hep3B | 10 | qRTP | CCGUG | omeCs; omeCs; omeGs; omeUs; omeGs; | F7:6119L20 |
| | | | | | | | CR | AGUGU | omeAs; omeGs; omeUs; omeGs; omeUs; | |
| | | | | vitro | | | | GAAGU | omeGs; omeAs; omeAs; omeGs; omeUs; | |
| | | | | | | | | GCGCC | omeGs; omeCs; omeGs; omeCs; omeC-Sup | |
| F7-07 | 3.266707711 | 0.124443723 | F7 | in | Hep3B | 30 | qRTP | CCCGU | omeCs; omeCs; omeCs; omeGs; omeUs; | F7:6120L20 |
| | | | | | | | CR | GAGUG | omeGs; omeAs; omeGs; omeUs; omeGs; | |
| | | | | vitro | | | | UGAAG | omeUs; omeGs; omeAs; omeAs; omeGs; | |
| | | | | | | | | UGCGC | omeUs; omeGs; omeCs; omeGs; omeC-Sup | |
| F7-07 | 2.511963688 | 0.306596563 | F7 | in | Hep3B | 10 | qRTP | CCCGU | omeCs; omeCs; omeCs; omeGs; omeUs; | F7:6120L20 |
| | | | | | | | CR | GAGUG | omeGs; omeAs; omeGs; omeUs; omeGs; | |
| | | | | vitro | | | | UGAAG | omeUs; omeGs; omeAs; omeAs; omeGs; | |
| | | | | | | | | UGCGC | omeUs; omeGs; omeCs; omeGs; omeC-Sup | |
| F7-08 | 7.553122741 | 1.14314046 | F7 | in | Hep3B | 30 | qRTP | GACCC | omeGs; omeAs; omeCs; omeCs; omeCs; | F7:6122L20 |
| | | | | | | | CR | GUGAG | omeGs; omeUs; omeGs; omeAs; omeGs; | |
| | | | | vitro | | | | UGUGA | omeUs; omeGs; omeUs; omeGs; omeAs; | |
| | | | | | | | | AGUGC | omeAs; omeGs; omeUs; omeGs; omeC-Sup | |
| F7-08 | 4.43362333 | 0.793675626 | F7 | in | Hep3B | 10 | qRTP | GACCC | omeGs; omeAs; omeCs; omeCs; omeCs; | F7:6122L20 |
| | | | | | | | CR | GUGAG | omeGs; omeUs; omeGs; omeAs; omeGs; | |
| | | | | vitro | | | | UGUGA | omeUs; omeGs; omeUs; omeGs; omeAs; | |
| | | | | | | | | AGUGC | omeAs; omeGs; omeUs; omeGs; omeC-Sup | |
| F7-09 | 1.710805064 | 0.153253681 | F7 | in | Hep3B | 30 | qRTP | AACUG | omeAs; omeAs; omeCs; omeUs; omeGs; | F7:13282L20 |
| | | | | | | | CR | CAGAA | omeCs; omeAs; omeGs; omeAs; omeAs; | |
| | | | | vitro | | | | GAAUA | omeGs; omeAs; omeAs; omeUs; omeAs; | |
| | | | | | | | | UAUGG | omeUs; omeAs; omeUs; omeGs; omeG-Sup | |
| F7-09 | 1.30521124 | 0.190795412 | F7 | in | Hep3B | 10 | qRTP | AACUG | omeAs; omeAs; omeCs; omeUs; omeGs; | F7:13282L20 |
| | | | | | | | CR | CAGAA | omeCs; omeAs; omeGs; omeAs; omeAs; | |
| | | | | vitro | | | | GAAUA | omeGs; omeAs; omeAs; omeUs; omeAs; | |
| | | | | | | | | UAUGG | omeUs; omeAs; omeUs; omeGs; omeG-Sup | |
| F7-10 | 1.714665671 | 0.189844743 | F7 | in | Hep3B | 30 | qRTP | UAACU | dTs; lnaAs; | F7:13283L20 |
| | | | | vitro | | | CR | GCAGA | dAs; lnaCs; | |
| | | | | | | | | AGAAU | dTs; lnaGs; | |
| | | | | | | | | AUAUG | dCs; lnaAs; | |
| | | | | | | | | | dGs; | |
| | | | | | | | | | lnaAs; dAs; | |
| | | | | | | | | | lnaGs; | |
| | | | | | | | | | dAs; lnaAs; | |
| | | | | | | | | | dTs; lnaAs; | |
| | | | | | | | | | dTs; lnaAs; | |
| | | | | | | | | | dTs; lnaG- | |
| | | | | | | | | | Sup | |
| F7-10 | 1.148881561 | 0.061319454 | F7 | in | Hep3B | 10 | qRTP | UAACU | dTs; lnaAs; | F7:13283L20 |
| | | | | vitro | | | CR | GCAGA | dAs; lnaCs; | |
| | | | | | | | | AGAAU | dTs; lnaGs; | |
| | | | | | | | | AUAUG | dCs; lnaAs; | |
| | | | | | | | | | dGs; | |
| | | | | | | | | | lnaAs; dAs; | |
| | | | | | | | | | lnaGs; | |
| | | | | | | | | | dAs; lnaAs; | |
| | | | | | | | | | dTs; lnaAs; | |
| | | | | | | | | | dTs; lnaAs; | |
| | | | | | | | | | dTs; lnaG- | |
| | | | | | | | | | Sup | |
| F7-11 | 3.176029302 | 1.629103893 | F7 | in | Hep3B | 30 | qRTP | UUAAC | dTs; lnaTs; | F7:13284L20 |
| | | | | vitro | | | CR | UGCAG | dAs; lnaAs; | |
| | | | | | | | | AAGAA | dCs; lnaTs; | |
| | | | | | | | | UAUAU | dGs; lnaCs; | |
| | | | | | | | | | dAs; | |
| | | | | | | | | | lnaGs; dAs; | |
| | | | | | | | | | lnaAs; | |
| | | | | | | | | | dGs; lnaAs; | |
| | | | | | | | | | dAs; lnaTs; | |
| | | | | | | | | | dAs; lnaTs; | |
| | | | | | | | | | dAs; lnaT- | |
| | | | | | | | | | Sup | |
| F7-11 | 1.461999858 | 0.163810715 | F7 | in | Hep3B | 10 | qRTP | UUAAC | dTs; lnaTs; | F7:13284L20 |
| | | | | vitro | | | CR | UGCAG | dAs; lnaAs; | |
| | | | | | | | | AAGAA | dCs; lnaTs; | |
| | | | | | | | | UAUAU | dGs; lnaCs; | |
| | | | | | | | | | dAs; | |
| | | | | | | | | | lnaGs; dAs; | |
| | | | | | | | | | lnaAs; | |
| | | | | | | | | | dGs; lnaAs; | |
| | | | | | | | | | dAs; lnaTs; | |
| | | | | | | | | | dAs; lnaTs; | |
| | | | | | | | | | dAs; lnaT- | |
| | | | | | | | | | Sup | |
| F7-12 | 1.348366077 | 0.126349287 | F7 | in | Hep3B | 30 | qRTP | CAUUA | omeCs; omeAs; omeUs; omeUs; omeAs; | F7:13286L20 |
| | | | | | | | CR | ACUGC | omeAs; omeCs; omeUs; omeGs; omeCs; | |
| | | | | vitro | | | | AGAAG | omeAs; omeGs; omeAs; omeAs; omeGs; | |
| | | | | | | | | AAUAU | omeAs; omeAs; omeUs; omeAs; omeU-Sup | |
| F7-12 | 0.920419998 | 0.035815246 | F7 | in | Hep3B | 10 | qRTP | CAUUA | omeCs; omeAs; omeUs; omeUs; omeAs; | F7:13286L20 |
| | | | | | | | CR | ACUGC | omeAs; omeCs; omeUs; omeGs; omeCs; | |
| | | | | vitro | | | | AGAAG | omeAs; omeGs; omeAs; omeAs; omeGs; | |
| | | | | | | | | AAUAU | omeAs; omeAs; omeUs; omeAs; omeU-Sup | |
| F7-13 | 1.253972386 | 0.096241585 | F7 | in | Hep3B | 30 | qRTP | CCCAU | omeCs; omeCs; omeCs; omeAs; omeUs; | F7:13288L20 |
| | | | | | | | CR | UAACU | omeUs; omeAs; omeAs; omeCs; omeUs; | |
| | | | | vitro | | | | GCAGA | omeGs; omeCs; omeAs; omeGs; omeAs; | |
| | | | | | | | | AGAAU | omeAs; omeGs; omeAs; omeAs; omeU-Sup | |
| F7-13 | 1.110981929 | 0.056407506 | F7 | in | Hep3B | 10 | qRTP | CCCAU | omeCs; omeCs; omeCs; omeAs; omeUs; | F7:13288L20 |
| | | | | | | | CR | UAACU | omeUs; omeAs; omeAs; omeCs; omeUs; | |
| | | | | vitro | | | | GCAGA | omeGs; omeCs; omeAs; omeGs; omeAs; | |
| | | | | | | | | AGAAU | omeAs; omeGs; omeAs; omeAs; omeU-Sup | |
| F7-14 | 1.513719955 | 0.096373836 | F7 | in | Hep3B | 30 | qRTP | CCCCAU | omeCs; omeCs; omeCs; omeCs; omeAs; | F7:13289L20 |
| | | | | | | | CR | UAACU | omeUs; omeUs; omeAs; omeAs; omeCs; | |
| | | | | vitro | | | | GCAGA | omeUs; omeGs; omeCs; omeAs; omeGs; | |
| | | | | | | | | AGAA | omeAs; omeAs; omeGs; omeAs; omeA-Sup | |
| F7-14 | 0.93727608 | 0.024859794 | F7 | in | Hep3B | 10 | qRTP | CCCCAU | omeCs; omeCs; omeCs; omeCs; omeAs; | F7:13289L20 |
| | | | | | | | CR | UAACU | omeUs; omeUs; omeAs; omeAs; omeCs; | |
| | | | | vitro | | | | GCAGA | omeUs; omeGs; omeCs; omeAs; omeGs; | |
| | | | | | | | | AGAA | omeAs; omeAs; omeGs; omeAs; omeA-Sup | |
| F7-15 | 1.902497301 | 0.210919712 | F7 | in | Hep3B | 30 | qRTP | UACCCC | dTs; lnaAs; | F7:13291L20 |
| | | | | vitro | | | CR | AUUAA | dCs; lnaCs; | |
| | | | | | | | | CUGCA | dCs; lnaCs; | |
| | | | | | | | | GAAG | dAs; lnaTs; | |
| | | | | | | | | | dTs; | |
| | | | | | | | | | lnaAs; dAs; | |
| | | | | | | | | | lnaCs; | |
| | | | | | | | | | dTs; lnaGs; | |
| | | | | | | | | | dCs; lnaAs; | |
| | | | | | | | | | dGs; lnaAs; | |
| | | | | | | | | | dAs; | |
| | | | | | | | | | lnaG- | |
| | | | | | | | | | Sup | |
| F7-15 | 1.293534913 | 0.029690701 | F7 | in | Hep3B | 10 | qRTP | UACCCC | dTs; lnaAs; | F7:13291L20 |
| | | | | vitro | | | CR | AUUAA | dCs; lnaCs; | |
| | | | | | | | | CUGCA | dCs; lnaCs; | |
| | | | | | | | | GAAG | dAs; lnaTs; | |
| | | | | | | | | | dTs; | |
| | | | | | | | | | lnaAs; dAs; | |
| | | | | | | | | | lnaCs; | |
| | | | | | | | | | dTs; lnaGs; | |
| | | | | | | | | | dCs; lnaAs; | |
| | | | | | | | | | dGs; lnaAs; | |
| | | | | | | | | | dAs; | |
| | | | | | | | | | lnaG- | |
| | | | | | | | | | Sup | |
| F7-16 | 1.055803391 | 0.068759217 | F7 | in | Hep3B | 30 | qRTP | UCUAC | dTs; lnaCs; | F7:13293L20 |
| | | | | vitro | | | CR | CCCAU | dTs; lnaAs; | |
| | | | | | | | | UAACU | dCs; lnaCs; | |
| | | | | | | | | GCAGA | dCs; lnaCs; | |
| | | | | | | | | | dAs; | |
| | | | | | | | | | lnaTs; dTs; | |
| | | | | | | | | | lnaAs; dAs; | |
| | | | | | | | | | lnaCs; | |
| | | | | | | | | | dTs; lnaGs; | |
| | | | | | | | | | dCs; lnaAs; | |
| | | | | | | | | | dGs; lnaA- | |
| | | | | | | | | | Sup | |
| F7-16 | 0.970258984 | 0.031625244 | F7 | in | Hep3B | 10 | qRTP | UCUAC | dTs; lnaCs; | F7:13293L20 |
| | | | | vitro | | | CR | CCCAU | dTs; lnaAs; | |
| | | | | | | | | UAACU | dCs; lnaCs; | |
| | | | | | | | | GCAGA | dCs; lnaCs; | |
| | | | | | | | | | dAs; | |
| | | | | | | | | | lnaTs; dTs; | |
| | | | | | | | | | lnaAs; dAs; | |
| | | | | | | | | | lnaCs; | |
| | | | | | | | | | dTs; lnaGs; | |
| | | | | | | | | | dCs; lnaAs; | |
| | | | | | | | | | dGs; lnaA- | |
| | | | | | | | | | Sup | |
| F7-17 | 1.021959188 | 0.103090602 | F7 | in | Hep3B | 30 | qRTP | CUCUA | omeCs; omeUs; omeCs; omeUs; omeAs; | F7:13294L20 |
| | | | | | | | CR | CCCCAU | omeCs; omeCs; omeCs; omeCs; omeAs; | |
| | | | | vitro | | | | UAACU | omeUs; omeUs; omeAs; omeAs; omeCs; | |
| | | | | | | | | GCAG | omeUs; omeGs; omeCs; omeAs; omeG-Sup | |
| F7-17 | 0.924322827 | 0.04331959 | F7 | in | Hep3B | 10 | qRTP | CUCUA | omeCs; omeUs; omeCs; omeUs; omeAs; | F7:13294L20 |
| | | | | | | | CR | CCCCAU | omeCs; omeCs; omeCs; omeCs; omeAs; | |
| | | | | vitro | | | | UAACU | omeUs; omeUs; omeAs; omeAs; omeCs; | |
| | | | | | | | | GCAG | omeUs; omeGs; omeCs; omeAs; omeG-Sup | |
| F7-18 | 0.692485744 | 0.059144989 | F7 | in | Hep3B | 30 | qRTP | CCUCU | omeCs; omeCs; omeUs; omeCs; omeUs; | F7:13295L20 |
| | | | | | | | CR | ACCCCA | omeAs; omeCs; omeCs; omeCs; omeCs; | |
| | | | | vitro | | | | UUAAC | omeAs; omeUs; omeUs; omeAs; omeAs; | |
| | | | | | | | | UGCA | omeCs; omeUs; omeGs; omeCs; omeA-Sup | |
| F7-18 | 0.715114339 | 0.019041702 | F7 | in | Hep3B | 10 | qRTP | CCUCU | omeCs; omeCs; omeUs; omeCs; omeUs; | F7:13295L20 |
| | | | | | | | CR | ACCCCA | omeAs; omeCs; omeCs; omeCs; omeCs; | |
| | | | | vitro | | | | UUAAC | omeAs; omeUs; omeUs; omeAs; omeAs; | |
| | | | | | | | | UGCA | omeCs; omeUs; omeGs; omeCs; omeA-Sup | |
| F7-19 | 1.12384628 | 0.076566736 | F7 | in | Hep3B | 30 | qRTP | CCCUCC | omeCs; omeCs; omeCs; omeUs; omeCs; | F7:13299L20 |
| | | | | | | | CR | UCUAC | omeCs; omeUs; omeCs; omeUs; omeAs; | |
| | | | | vitro | | | | CCCAU | omeCs; omeCs; omeCs; omeCs; omeAs; | |
| | | | | | | | | UAAC | omeUs; omeUs; omeAs; omeAs; omeC-Sup | |
| F7-19 | 0.906212834 | 0.014582031 | F7 | in | Hep3B | 10 | qRTP | CCCUCC | omeCs; omeCs; omeCs; omeUs; omeCs; | F7:13299L20 |
| | | | | | | | CR | UCUAC | omeCs; omeUs; omeCs; omeUs; omeAs; | |
| | | | | vitro | | | | CCCAU | omeCs; omeCs; omeCs; omeCs; omeAs; | |
| | | | | | | | | UAAC | omeUs; omeUs; omeAs; omeAs; omeC-Sup | |
| F7-20 | 2.255451177 | 0.243710586 | F7 | in | Hep3B | 30 | qRTP | GCCCU | omeGs; omeCs; omeCs; omeCs; omeUs; | F7:13300L20 |
| | | | | | | | CR | CCUCU | omeCs; omeCs; omeUs; omeCs; omeUs; | |
| | | | | vitro | | | | ACCCCA | omeAs; omeCs; omeCs; omeCs; omeCs; | |
| | | | | | | | | UUAA | omeAs; omeUs; omeUs; omeAs; omeA-Sup | |
| F7-20 | 1.156836938 | 0.079037591 | F7 | in | Hep3B | 10 | qRTP | GCCCU | omeGs; omeCs; omeCs; omeCs; omeUs; | F7:13300L20 |
| | | | | | | | CR | CCUCU | omeCs; omeCs; omeUs; omeCs; omeUs; | |
| | | | | vitro | | | | ACCCCA | omeAs; omeCs; omeCs; omeCs; omeCs; | |
| | | | | | | | | UUAA | omeAs; omeUs; omeUs; omeAs; omeA-Sup | |
| F7-21 | 1.706878562 | 0.13030232 | F7 | in | Hep3B | 30 | qRTP | UGCCC | dTs; lnaGs; | F7:13301L20 |
| | | | | vitro | | | CR | UCCUC | dCs; lnaCs; | |
| | | | | | | | | UACCCC | dCs; lnaTs; | |
| | | | | | | | | AUUA | dCs; lnaCs; | |
| | | | | | | | | | dTs; | |
| | | | | | | | | | lnaCs; dTs; | |
| | | | | | | | | | lnaAs; dCs; | |
| | | | | | | | | | lnaCs; | |
| | | | | | | | | | dCs; lnaCs; | |
| | | | | | | | | | dAs; lnaTs; | |
| | | | | | | | | | dTs; lnaA- | |
| | | | | | | | | | Sup | |
| F7-21 | 1.16657597 | 0.019372891 | F7 | in | Hep3B | 10 | qRTP | UGCCC | dTs; lnaGs; | F7:13301L20 |
| | | | | vitro | | | CR | UCCUC | dCs; lnaCs; | |
| | | | | | | | | UACCCC | dCs; lnaTs; | |
| | | | | | | | | AUUA | dCs; lnaCs; | |
| | | | | | | | | | dTs; | |
| | | | | | | | | | lnaCs; dTs; | |
| | | | | | | | | | lnaAs; dCs; | |
| | | | | | | | | | lnaCs; | |
| | | | | | | | | | dCs; lnaCs; | |
| | | | | | | | | | dAs; lnaTs; | |
| | | | | | | | | | dTs; lnaA- | |
| | | | | | | | | | Sup | |
| F7-22 | 1.098747922 | 0.121239519 | F7 | in | Hep3B | 30 | qRTP | UCCCA | dTs; lnaCs; | F7:13306L20 |
| | | | | vitro | | | CR | UGCCC | dCs; lnaCs; | |
| | | | | | | | | UCCUC | dAs; lnaTs; | |
| | | | | | | | | UACCC | dGs; lnaCs; | |
| | | | | | | | | | dCs; | |
| | | | | | | | | | lnaCs; dTs; | |
| | | | | | | | | | lnaCs; dCs; | |
| | | | | | | | | | lnaTs; | |
| | | | | | | | | | dCs; lnaTs; | |
| | | | | | | | | | dAs; lnaCs; | |
| | | | | | | | | | dCs; lnaC- | |
| | | | | | | | | | Sup | |
| F7-22 | 0.920843704 | 0.067977339 | F7 | in | Hep3B | 10 | qRTP | UCCCA | dTs; lnaCs; | F7:13306L20 |
| | | | | vitro | | | CR | UGCCC | dCs; lnaCs; | |
| | | | | | | | | UCCUC | dAs; lnaTs; | |
| | | | | | | | | UACCC | dGs; lnaCs; | |
| | | | | | | | | | dCs; | |
| | | | | | | | | | lnaCs; dTs; | |
| | | | | | | | | | lnaCs; dCs; | |
| | | | | | | | | | lnaTs; | |
| | | | | | | | | | dCs; lnaTs; | |
| | | | | | | | | | dAs; lnaCs; | |
| | | | | | | | | | dCs; lnaC- | |
| | | | | | | | | | Sup | |
| F7-23 | 1.187567213 | 0.086489007 | F7 | in | Hep3B | 30 | qRTP | CUCCCA | omeCs; omeUs; omeCs; omeCs; omeCs; | F7:13307L20 |
| | | | | | | | CR | UGCCC | omeAs; omeUs; omeGs; omeCs; omeCs; | |
| | | | | vitro | | | | UCCUC | omeCs; omeUs; omeCs; omeCs; omeUs; | |
| | | | | | | | | UACC | omeCs; omeUs; omeAs; omeCs; omeC-Sup | |
| F7-23 | 0.94607936 | 0.030472543 | F7 | in | Hep3B | 10 | qRTP | CUCCCA | omeCs; omeUs; omeCs; omeCs; omeCs; | F7:13307L20 |
| | | | | | | | CR | UGCCC | omeAs; omeUs; omeGs; omeCs; omeCs; | |
| | | | | vitro | | | | UCCUC | omeCs; omeUs; omeCs; omeCs; omeUs; | |
| | | | | | | | | UACC | omeCs; omeUs; omeAs; omeCs; omeC-Sup | |
| F7-24 | 2.050299642 | 0.182659756 | F7 | in | Hep3B | 30 | qRTP | CCUCCC | omeCs; omeCs; omeUs; omeCs; omeCs; | F7:13308L20 |
| | | | | | | | CR | AUGCC | omeCs; omeAs; omeUs; omeGs; omeCs; | |
| | | | | vitro | | | | CUCCU | omeUs; omeCs; omeCs; omeUs; omeCs; | |
| | | | | | | | | CUAC | omeCs; omeCs; omeUs; omeAs; omeC-Sup | |
| F7-24 | 1.26917925 | 0.057745051 | F7 | in | Hep3B | 10 | qRTP | CCUCCC | omeCs; omeCs; omeUs; omeCs; omeCs; | F7:13308L20 |
| | | | | | | | CR | AUGCC | omeCs; omeAs; omeUs; omeGs; omeCs; | |
| | | | | vitro | | | | CUCCU | omeCs; omeCs; omeUs; omeCs; omeCs; | |
| | | | | | | | | CUAC | omeUs; omeCs; omeUs; omeAs; omeC-Sup | |
| F7-25 | 2.059522883 | 0.157827093 | F7 | in | Hep3B | 30 | qRTP | UCCCU | dTs; lnaCs; | F7:13310L20 |
| | | | | vitro | | | CR | CCCAU | dCs; lnaCs; | |
| | | | | | | | | GCCCU | dTs; lnaCs; | |
| | | | | | | | | CCUCU | dCs; lnaCs; | |
| | | | | | | | | | dAs; | |
| | | | | | | | | | lnaTs; dGs; | |
| | | | | | | | | | lnaCs; | |
| | | | | | | | | | dCs; lnaCs; | |
| | | | | | | | | | dTs; lnaCs; | |
| | | | | | | | | | dCs; lnaTs; | |
| | | | | | | | | | dCs; lnaT- | |
| | | | | | | | | | Sup | |
| F7-25 | 1.328835681 | 0.033809182 | F7 | in | Hep3B | 10 | qRTP | UCCCU | dTs; lnaCs; | F7:13310L20 |
| | | | | vitro | | | CR | CCCAU | dCs; lnaCs; | |
| | | | | | | | | GCCCU | dTs; lnaCs; | |
| | | | | | | | | CCUCU | dCs; lnaCs; | |
| | | | | | | | | | dAs; | |
| | | | | | | | | | lnaTs; dGs; | |
| | | | | | | | | | lnaCs; | |
| | | | | | | | | | dCs; lnaCs; | |
| | | | | | | | | | dTs; lnaCs; | |
| | | | | | | | | | dCs; lnaTs; | |
| | | | | | | | | | dCs; lnaT- | |
| | | | | | | | | | Sup | |
| F7-26 | 1.819850954 | 0.140894278 | F7 | in | Hep3B | 30 | qRTP | CUCCC | omeCs; omeUs; omeCs; omeCs; omeCs; | F7:13311L20 |
| | | | | | | | CR | UCCCA | omeUs; omeCs; omeCs; omeCs; omeAs; | |
| | | | | vitro | | | | UGCCC | omeUs; omeGs; omeCs; omeCs; omeCs; | |
| | | | | | | | | UCCUC | omeUs; omeCs; omeCs; omeUs; omeC-Sup | |
| F7-26 | 1.154213886 | 0.055928934 | F7 | in | Hep3B | 10 | qRTP | CUCCC | omeCs; omeUs; omeCs; omeCs; omeCs; | F7:13311L20 |
| | | | | | | | CR | UCCCA | omeUs; omeCs; omeCs; omeCs; omeAs; | |
| | | | | vitro | | | | UGCCC | omeUs; omeGs; omeCs; omeCs; omeCs; | |
| | | | | | | | | UCCUC | omeUs; omeCs; omeCs; omeUs; omeC-Sup | |
| F7-27 | 2.098000964 | 0.339358197 | F7 | in | Hep3B | 30 | qRTP | CCUCCC | omeCs; omeCs; omeUs; omeCs; omeCs; | F7:13312L20 |
| | | | | | | | CR | UCCCA | omeCs; omeUs; omeCs; omeCs; omeCs; | |
| | | | | vitro | | | | UGCCC | omeAs; omeUs; omeGs; omeCs; omeCs; | |
| | | | | | | | | UCCU | omeCs; omeUs; omeCs; omeCs; omeU-Sup | |
| F7-27 | 1.296573803 | 0.04557471 | F7 | in | Hep3B | 10 | qRTP | CCUCCC | omeCs; omeCs; omeUs; omeCs; omeCs; | F7:13312L20 |
| | | | | | | | CR | UCCCA | omeCs; omeUs; omeCs; omeCs; omeCs; | |
| | | | | vitro | | | | UGCCC | omeAs; omeUs; omeGs; omeCs; omeCs; | |
| | | | | | | | | UCCU | omeCs; omeUs; omeCs; omeCs; omeU-Sup | |
| F7-28 | 1.41837334 | 0.138092641 | F7 | in | Hep3B | 30 | qRTP | CCCUCC | omeCs; omeCs; omeCs; omeUs; omeCs; | F7:13313L20 |
| | | | | | | | CR | CUCCCA | omeCs; omeCs; omeUs; omeCs; omeCs; | |
| | | | | vitro | | | | UGCCC | omeCs; omeAs; omeUs; omeGs; omeCs; | |
| | | | | | | | | UCC | omeCs; omeCs; omeUs; omeCs; omeC-Sup | |
| F7-28 | 0.972079771 | 0.051838055 | F7 | in | Hep3B | 10 | qRTP | CCCUCC | omeCs; omeCs; omeCs; omeUs; omeCs; | F7:13313L20 |
| | | | | | | | CR | CUCCCA | omeCs; omeCs; omeUs; omeCs; omeCs; | |
| | | | | vitro | | | | UGCCC | omeCs; omeAs; omeUs; omeGs; omeCs; | |
| | | | | | | | | UCC | omeCs; omeCs; omeUs; omeCs; omeC-Sup | |
| F7-29 | 2.410294373 | 1.401086827 | F7 | in | Hep3B | 30 | qRTP | CCUCU | omeCs; omeCs; omeUs; omeCs; omeUs; | F7:13318L20 |
| | | | | | | | CR | CCCUCC | omeCs; omeCs; omeCs; omeUs; omeCs; | |
| | | | | vitro | | | | CUCCCA | omeCs; omeCs; omeUs; omeCs; omeCs; | |
| | | | | | | | | UGC | omeCs; omeAs; omeUs; omeGs; omeC-Sup | |
| F7-30 | 1.136834466 | 0.085310519 | F7 | in | Hep3B | 30 | qRTP | GUCUC | omeGs; omeUs; omeCs; omeUs; omeCs; | F7:13331L20 |
| | | | | | | | CR | CCUCCC | omeCs; omeCs; omeUs; omeCs; omeCs; | |
| | | | | vitro | | | | CACCUC | omeCs; omeCs; omeAs; omeCs; omeCs; | |
| | | | | | | | | UCC | omeUs; omeCs; omeUs; omeCs; omeC-Sup | |
| F7-30 | 0.779387574 | 0.044509784 | F7 | in | Hep3B | 10 | qRTP | GUCUC | omeGs; omeUs; omeCs; omeUs; omeCs; | F7:13331L20 |
| | | | | | | | CR | CCUCCC | omeCs; omeCs; omeUs; omeCs; omeCs; | |
| | | | | vitro | | | | CACCUC | omeCs; omeCs; omeAs; omeCs; omeCs; | |
| | | | | | | | | UCC | omeUs; omeCs; omeUs; omeCs; omeC-Sup | |
| KLF1-01 | 78.8525072 | 14.01958964 | KLF1 | in | Hep3B | 30 | qRTP | ACCGU | dAs; lnaCs; | KLF1:1691L15 |
| | | | | vitro | | | CR | CCCGG | dCs; lnaGs; | |
| | | | | | | | | GUCCC | dTs; lnaCs; | |
| | | | | | | | | | dCs; lnaCs; | |
| | | | | | | | | | dGs; | |
| | | | | | | | | | lnaGs; dGs; | |
| | | | | | | | | | lnaTs; | |
| | | | | | | | | | dCs; lnaCs; | |
| | | | | | | | | | dC-Sup | |
| KLF1-01 | 1.010330437 | 0.236114434 | KLF1 | in vivo | liv mus | 25 | qRTP | ACCGU | dAs; lnaCs; | KLF1:1691L15 |
| | | | | | C57BI | | CR | CCCGG | dCs; lnaGs; | |
| | | | | | | | | GUCCC | dTs; lnaCs; | |
| | | | | | | | | | dCs; lnaCs; | |
| | | | | | | | | | dGs; | |
| | | | | | | | | | lnaGs; dGs; | |
| | | | | | | | | | lnaTs; | |
| | | | | | | | | | dCs; lnaCs; | |
| | | | | | | | | | dC-Sup | |
| KLF1-01 | 0.938609705 | 0.123697115 | KLF1 | in vivo | liv mus | 10 | qRTP | ACCGU | dAs; lnaCs; | KLF1:1691L15 |
| | | | | | C57BI | | CR | CCCGG | dCs; lnaGs; | |
| | | | | | | | | GUCCC | dTs; lnaCs; | |
| | | | | | | | | | dCs; lnaCs; | |
| | | | | | | | | | dGs; | |
| | | | | | | | | | lnaGs; dGs; | |
| | | | | | | | | | lnaTs; | |
| | | | | | | | | | dCs; lnaCs; | |
| | | | | | | | | | dC-Sup | |
| KLF1-01 | 1.481800101 | 0.172168138 | KLF1 | in vivo | kid mus | 25 | qRTP | ACCGU | dAs; lnaCs; | KLF1:1691L15 |
| | | | | | C57BI | | CR | CCCGG | dCs; lnaGs; | |
| | | | | | | | | GUCCC | dTs; lnaCs; | |
| | | | | | | | | | dCs; lnaCs; | |
| | | | | | | | | | dGs; | |
| | | | | | | | | | lnaGs; dGs; | |
| | | | | | | | | | lnaTs; | |
| | | | | | | | | | dCs; lnaCs; | |
| | | | | | | | | | dC-Sup | |
| KLF1-01 | 2.082453354 | 0.373737483 | KLF1 | in vivo | kid mus | 10 | qRTP | ACCGU | dAs; lnaCs; | KLF1:1691L15 |
| | | | | | C57BI | | CR | CCCGG | dCs; lnaGs; | |
| | | | | | | | | GUCCC | dTs; lnaCs; | |
| | | | | | | | | | dCs; lnaCs; | |
| | | | | | | | | | dGs; | |
| | | | | | | | | | lnaGs; dGs; | |
| | | | | | | | | | lnaTs; | |
| | | | | | | | | | dCs; lnaCs; | |
| | | | | | | | | | dC-Sup | |
| KLF1-02 | 2.938646415 | 0.653926381 | KLF1 | in | Hep3B | 30 | qRTP | CAAACA | dCs; lnaAs; | KLF1:1671L15 |
| | | | | vitro | | | CR | ACUCA | dAs; lnaAs; | |
| | | | | | | | | GGAA | dCs; lnaAs; | |
| | | | | | | | | | dAs; lnaCs; | |
| | | | | | | | | | dTs; | |
| | | | | | | | | | lnaCs; dAs; | |
| | | | | | | | | | lnaGs; | |
| | | | | | | | | | dGs; lnaAs; | |
| | | | | | | | | | dA-Sup | |
| KLF1-02 | 1.584034268 | 0.159836564 | KLF1 | in vivo | liv mus | 25 | qRTP | CAAACA | dCs; lnaA | KLF1:1671L15 |
| | | | | | C57B1 | | CR | ACUCA | dAs; lnaAs; | |
| | | | | | | | | GGAA | dCs; lnaAs; | |
| | | | | | | | | | dAs; lnaCs; | |
| | | | | | | | | | dTs; | |
| | | | | | | | | | lnaCs; dAs; | |
| | | | | | | | | | lnaGs; | |
| | | | | | | | | | dGs; lnaAs; | |
| | | | | | | | | | dA-Sup | |
| KLF1-02 | 0.807813859 | 0.048331407 | KLF1 | in vivo | liv mus | 10 | qRTP | CAAACA | dCs; lnaAs; | KLF1:1677L15 |
| | | | | | C57BI | | CR | ACUCA | dAs; lnaAs; | |
| | | | | | | | | GGAA | dCs; lnaAs; | |
| | | | | | | | | | dAs; lnaCs; | |
| | | | | | | | | | dTs; | |
| | | | | | | | | | lnaCs; dAs; | |
| | | | | | | | | | lnaGs; | |
| | | | | | | | | | dGs; lnaAs; | |
| | | | | | | | | | dA-Sup | |
| KLF1-02 | 3.557590403 | 0.328715161 | KLF1 | in vivo | kid mus | 25 | qRTP | CAAACA | dCs; lnaAs; | KLF1:1677L15 |
| | | | | | C57BI | | CR | ACUCA | dAs; lnaAs; | |
| | | | | | | | | GGAA | dCs; lnaAs; | |
| | | | | | | | | | dAs; lnaCs; | |
| | | | | | | | | | dTs; | |
| | | | | | | | | | lnaCs; dAs; | |
| | | | | | | | | | lnaGs; | |
| | | | | | | | | | dGs; lnaAs; | |
| | | | | | | | | | dA-Sup | |
| KLF1-02 | 2.098887827 | 0.190119755 | KLF1 | in vivo | kid mus | 10 | qRTP | CAAACA | dCs; lnaAs; | KLF1:1677L15 |
| | | | | | C57BI | | CR | ACUCA | dAs; lnaAs; | |
| | | | | | | | | GGAA | dCs; lnaAs; | |
| | | | | | | | | | dAs; lnaCs; | |
| | | | | | | | | | dTs; | |
| | | | | | | | | | lnaCs; dAs; | |
| | | | | | | | | | lnaGs; | |
| | | | | | | | | | dGs; lnaAs; | |
| | | | | | | | | | dA-Sup | |
| KLF1-03 | 0.791441638 | 0.472576697 | KLF1 | in | Hep3B | 30 | qRTP | CCUGG | dCs; lnaCs; | KLF1:1630L15 |
| | | | | vitro | | | CR | AGCCC | dTs; lnaGs; | |
| | | | | | | | | GCGGA | dGs; lnaAs; | |
| | | | | | | | | | dGs; | |
| | | | | | | | | | lnaCs; dCs; | |
| | | | | | | | | | lnaCs; | |
| | | | | | | | | | dGs; lnaCs; | |
| | | | | | | | | | dGs; lnaGs; | |
| | | | | | | | | | dA- | |
| | | | | | | | | | Sup | |
| KLF1-03 | 1.110182705 | 0.146842187 | KLF1 | in vivo | liv mus | 25 | qRTP | CCUGG | dCs; lnaCs; | KLF1:1630L15 |
| | | | | | C57BI | | CR | AGCCC | dTs; lnaGs; | |
| | | | | | | | | GCGGA | dGs; lnaCs; | |
| | | | | | | | | | lnaAs; dGs; | |
| | | | | | | | | | lnaCs; dCs; | |
| | | | | | | | | | lnaCs; | |
| | | | | | | | | | dGs; lnaCs; | |
| | | | | | | | | | dGs; lnaGs; | |
| | | | | | | | | | dA- | |
| | | | | | | | | | Sup | |
| KLF1-03 | 1.31175986 | 0.12489934 | KLF1 | in vivo | liv mus | 10 | qRTP | CCUGG | dCs; lnaCs; | KLF1:1630L15 |
| | | | | | C57BI | | CR | AGCCC | dTs; lnaGs; | |
| | | | | | | | | GCGGA | dGs; lnaAs; | |
| | | | | | | | | | dGs; | |
| | | | | | | | | | lnaCs; dCs; | |
| | | | | | | | | | lnaCs; | |
| | | | | | | | | | dGs; lnaCs; | |
| | | | | | | | | | dGs; lnaGs; | |
| | | | | | | | | | dA- | |
| | | | | | | | | | Sup | |
| KLF1-03 | 2.891971578 | 0.344290891 | KLF1 | in vivo | kid mus | 25 | qRTP | CCUGG | dCs; lnaCs; | KLF1:1630L15 |
| | | | | | C57BI | | CR | AGCCC | dTs; lnaGs; | |
| | | | | | | | | GCGGA | dGs; lnaAs; | |
| | | | | | | | | | dGs; | |
| | | | | | | | | | lnaCs; dCs; | |
| | | | | | | | | | lnaCs; | |
| | | | | | | | | | dGs; lnaCs; | |
| | | | | | | | | | dGs; lnaGs; | |
| | | | | | | | | | dA- | |
| | | | | | | | | | Sup | |
| KLF1-03 | 2.845247856 | 0.484381196 | KLF1 | in vivo | kid mus | 10 | qRTP | CCUGG | dCs; lnaCs; | KLF1:1630L15 |
| | | | | | C57BI | | CR | AGCCC | dTs; lnaGs; | |
| | | | | | | | | GCGGA | dGs; lnaAs; | |
| | | | | | | | | | dGs; | |
| | | | | | | | | | lnaCs; dCs; | |
| | | | | | | | | | lnaCs; | |
| | | | | | | | | | dGs; lnaCs; | |
| | | | | | | | | | dGs; lnaGs; | |
| | | | | | | | | | dA- | |
| | | | | | | | | | Sup | |
| KLF1-04 | 11.57773086 | 1.045613195 | KLF1 | in | Hep3B | 30 | qRTP | AUAUG | dAs; lnaTs; | KLF1:1308L15 |
| | | | | vitro | | | CR | CGCCCA | dAs; lnaTs; | |
| | | | | | | | | GAGU | dGs; lnaCs; | |
| | | | | | | | | | dGs; lnaCs; | |
| | | | | | | | | | dCs; | |
| | | | | | | | | | lnaCs; dAs; | |
| | | | | | | | | | lnaGs; | |
| | | | | | | | | | dAs; lnaGs; | |
| | | | | | | | | | dT-Sup | |
| KLF1-04 | 1.050974487 | 0.156860143 | KLF1 | in vivo | liv mus | 25 | qRTP | AUAUG | dAs; lnaTs; | KLF1:1308L15 |
| | | | | | C57BI | | CR | CGCCCA | dAs; lnaTs; | |
| | | | | | | | | GAGU | dGs; lnaCs; | |
| | | | | | | | | | dGs; lnaCs; | |
| | | | | | | | | | dCs; | |
| | | | | | | | | | lnaCs; dAs; | |
| | | | | | | | | | lnaGs; | |
| | | | | | | | | | dAs; lnaGs; | |
| | | | | | | | | | dT-Sup | |
| KLF1-04 | 0.724782268 | 0.079953207 | KLF1 | in vivo | liv mus | 10 | qRTP | AUAUG | dAs; lnaTs; | KLF1:1308L15 |
| | | | | | C57BI | | CR | CGCCCA | dAs; lnaTs; | |
| | | | | | | | | GAGU | dGs; lnaCs; | |
| | | | | | | | | | dGs; lnaCs; | |
| | | | | | | | | | dCs; | |
| | | | | | | | | | lnaCs; dAs; | |
| | | | | | | | | | lnaGs; | |
| | | | | | | | | | dAs; lnaGs; | |
| | | | | | | | | | dT-Sup | |
| KLF1-04 | 2.246337923 | 0.244986171 | KLF1 | in vivo | kid mus | 25 | qRTP | AUAUG | dAs; lnaTs; | KLF1:1308L15 |
| | | | | | C57BI | | CR | CGCCCA | dAs; lnaTs; | |
| | | | | | | | | GAGU | dGs; lnaCs; | |
| | | | | | | | | | dGs; lnaCs; | |
| | | | | | | | | | dCs; | |
| | | | | | | | | | lnaCs; dAs; | |
| | | | | | | | | | lnaGs; | |
| | | | | | | | | | dAs; lnaGs; | |
| | | | | | | | | | dT-Sup | |
| KLF1-04 | 1.60875008 | 0.187455333 | KLF1 | in vivo | kid mus | 10 | qRTP | AUAUG | dAs; lnaTs; | KLF1:1308:15 |
| | | | | | C57BI | | CR | CGCCCA | dAs; lnaTs; | |
| | | | | | | | | GAGU | dGs; lnaCs; | |
| | | | | | | | | | dGs; lnaCs; | |
| | | | | | | | | | dCs; | |
| | | | | | | | | | lnaCs; dAs; | |
| | | | | | | | | | lnaGs; | |
| | | | | | | | | | dAs; lnaGs; | |
| | | | | | | | | | dT-Sup | |
| KLF1-05 | 8.657247996 | 1.263025324 | KLF1 | in | Hep3B | 30 | qRTP | AUAUU | dAs; lnaTs; | KLF1:1278L15 |
| | | | | vitro | | | CR | GCGCC | dAs; lnaTs; | |
| | | | | | | | | CCGGA | dTs; lnaGs; | |
| | | | | | | | | | dCs; lnaGs; | |
| | | | | | | | | | dCs; | |
| | | | | | | | | | lnaCs; dCs; | |
| | | | | | | | | | lnaCs; dGs; | |
| | | | | | | | | | lnaGs; | |
| | | | | | | | | | dA-Sup | |
| KLF1-05 | 1.073312386 | 0.229262814 | KLF1 | in vivo | liv mus | 25 | qRTP | AUAUU | dAs; lnaTs; | KLF1:1278L15 |
| | | | | | C57BI | | CR | GCGCC | dAs; lnaTs; | |
| | | | | | | | | CCGGA | dTs; lnaGs; | |
| | | | | | | | | | dCs; lnaGs; | |
| | | | | | | | | | dCs; | |
| | | | | | | | | | lnaCs; dCs; | |
| | | | | | | | | | lnaCs; dGs; | |
| | | | | | | | | | lnaGs; | |
| | | | | | | | | | dA-Sup | |
| KLF1-05 | 1.453325446 | 0.311905253 | KLF1 | in vivo | liv mus | 10 | qRTP | AUAUU | dAs; lnaTs; | KLF1:1278L15 |
| | | | | | C57BI | | CR | GCGCC | dAs; lnaTs; | |
| | | | | | | | | CCGGA | dTs; lnaGs; | |
| | | | | | | | | | dCs; lnaGs; | |
| | | | | | | | | | dCs; | |
| | | | | | | | | | lnaCs; dCs; | |
| | | | | | | | | | lnaCs; dGs; | |
| | | | | | | | | | lnaGs; | |
| | | | | | | | | | dA-Sup | |
| KLF1-05 | 2.785635436 | 0.530652756 | KLF1 | in vivo | kid mus | 25 | qRTP | AUAUU | dAs; lnaTs; | KLF1:1278L15 |
| | | | | | C57BI | | CR | GCGCC | dAs; lnaTs; | |
| | | | | | | | | CCGGA | dTs; lnaGs; | |
| | | | | | | | | | dCs; lnaGs; | |
| | | | | | | | | | dCs; | |
| | | | | | | | | | lnaCs; dCs; | |
| | | | | | | | | | lnaCs; dGs; | |
| | | | | | | | | | lnaGs; | |
| | | | | | | | | | dA-Sup | |
| KLF1-05 | 2.890855863 | 0.525908517 | KLF1 | in vivo | kid mus | 10 | qRTP | AUAUU | dAs; lnaTs; | KLF1:1278L15 |
| | | | | | C57BI | | CR | GCGCC | dAs; lnaTs; | |
| | | | | | | | | CCGGA | dTs; lnaGs; | |
| | | | | | | | | | dCs; lnaGs; | |
| | | | | | | | | | dCs; | |
| | | | | | | | | | lnaCs; dCs; | |
| | | | | | | | | | lnaCs; dGs; | |
| | | | | | | | | | lnaGs; | |
| | | | | | | | | | dA-Sup | |
| KLF1-06 | 11.77427943 | 0.59298307 | KLF1 | in | Hep3B | 30 | qRTP | AGUGU | dAs; lnaGs; | KLF1:813U15 |
| | | | | vitro | | | CR | GGUUC | dTs; lnaGs; | |
| | | | | | | | | CAGAU | dTs; lnaGs; | |
| | | | | | | | | | dGs; | |
| | | | | | | | | | lnaTs; dTs; | |
| | | | | | | | | | lnaCs; dCs; | |
| | | | | | | | | | lnaAs; | |
| | | | | | | | | | dGs; lnaAs; | |
| | | | | | | | | | dT-Sup | |
| KLF1-06 | 1.832492501 | 0.155507384 | KLF1 | in vivo | liv mus | 25 | qRTP | AGUGU | dAs; lnaGs; | KLF1:813U15 |
| | | | | | C57BI | | CR | GGUUC | dTs; lnaGs; | |
| | | | | | | | | CAGAU | dTs; lnaGs; | |
| | | | | | | | | | dGs; | |
| | | | | | | | | | lnaTs; dTs; | |
| | | | | | | | | | lnaCs; dCs; | |
| | | | | | | | | | lnaAs; | |
| | | | | | | | | | dGs; lnaAs; | |
| | | | | | | | | | dT-Sup | |
| KLF1-06 | 1.097612619 | 0.119757591 | KLF1 | in vivo | liv mus | 10 | qRTP | AGUGU | dAs; lnaGs; | KLF1:813U15 |
| | | | | | C57BI | | CR | GGUUC | dTs; lnaGs; | |
| | | | | | | | | CAGAU | dTs; lnaGs; | |
| | | | | | | | | | dGs; | |
| | | | | | | | | | lnaTs; dTs; | |
| | | | | | | | | | lnaCs; dCs; | |
| | | | | | | | | | lnaAs; | |
| | | | | | | | | | dGs; lnaAs; | |
| | | | | | | | | | dT-Sup | |
| KLF1-06 | 3.095102703 | 0.410239494 | KLF1 | in vivo | kid mus | 25 | qRTP | AGUGU | dAs; lnaGs; | KLF1:813U15 |
| | | | | | C57BI | | CR | GGUUC | dTs; lnaGs; | |
| | | | | | | | | CAGAU | dTs; lnaGs; | |
| | | | | | | | | | dGs; | |
| | | | | | | | | | lnaTs; dTs; | |
| | | | | | | | | | lnaCs; dCs; | |
| | | | | | | | | | lnaAs; | |
| | | | | | | | | | dGs; lnaAs; | |
| | | | | | | | | | dT-Sup | |
| KLF1-06 | 2.455979181 | 0.220894306 | KLF1 | in vivo | kid mus | 10 | qRTP | AGUGU | dAs; lnaGs; | KLF1:813U15 |
| | | | | | C57BI | | CR | GGUUC | dTs; lnaGs; | |
| | | | | | | | | CAGAU | dTs; lnaGs; | |
| | | | | | | | | | dGs; | |
| | | | | | | | | | lnaTs; dTs; | |
| | | | | | | | | | lnaCs; dCs; | |
| | | | | | | | | | lnaAs; | |
| | | | | | | | | | dGs; lnaAs; | |
| | | | | | | | | | dT-Sup | |
| KLF1-07 | 0.713423382 | 0.344340332 | KLF1 | in | Hep3B | 30 | qRTP | AUAGU | dAs; lnaTs; | KLF1:826U15 |
| | | | | vitro | | | CR | GGAAG | dAs; lnaGs; | |
| | | | | | | | | UCUUA | dTs; lnaGs; | |
| | | | | | | | | | dGs; | |
| | | | | | | | | | lnaAs; dAs; | |
| | | | | | | | | | lnaGs; dTs; | |
| | | | | | | | | | lnaCs; | |
| | | | | | | | | | dTs; lnaTs; | |
| | | | | | | | | | dA-Sup | |
| KLF1-07 | 1.130109526 | 0.233549431 | KLF1 | in vivo | liv mus | 25 | qRTP | AUAGU | dAs; lnaTs; | KLF1:826U15 |
| | | | | | C57BI | | CR | GGAAG | dAs; lnaGs; | |
| | | | | | | | | UCUUA | dTs; lnaGs; | |
| | | | | | | | | | dGs; | |
| | | | | | | | | | lnaAs; dAs; | |
| | | | | | | | | | lnaGs; dTs; | |
| | | | | | | | | | lnaCs; | |
| | | | | | | | | | dTs; lnaTs; | |
| | | | | | | | | | dA-Sup | |
| KLF1-07 | 0.934810903 | 0.077333922 | KLF1 | in vivo | liv mus | 10 | qRTP | AUAGU | dAs; lnaTs; | KLF1:826U15 |
| | | | | | C57BI | | CR | GGAAG | dAs; lnaGs; | |
| | | | | | | | | UCUUA | dTs; lnaGs; | |
| | | | | | | | | | dGs; | |
| | | | | | | | | | lnaAs; dAs; | |
| | | | | | | | | | lnaGs; dTs; | |
| | | | | | | | | | lnaCs; | |
| | | | | | | | | | dTs; lnaTs; | |
| | | | | | | | | | dA-Sup | |
| KLF1-07 | 2.400673247 | 0.303186885 | KLF1 | in vivo | kid mus | 25 | qRTP | AUAGU | dAs; lnaTs; | KLF1:826U15 |
| | | | | | C57BI | | CR | GGAAG | dAs; lnaGs; | |
| | | | | | | | | UCUUA | dTs; lnaGs; | |
| | | | | | | | | | dGs; | |
| | | | | | | | | | lnaAs; dAs; | |
| | | | | | | | | | lnaGs; dTs; | |
| | | | | | | | | | lnaCs; | |
| | | | | | | | | | dTs; lnaTs; | |
| | | | | | | | | | dA-Sup | |
| KLF1-07 | 1.907660532 | 0.210950269 | KLF1 | in vivo | kid mus | 10 | qRTP | AUAGU | dAs; lnaTs; | KLF1:826U15 |
| | | | | | C57BI | | CR | GGAAG | dAs; lnaGs; | |
| | | | | | | | | UCUUA | dTs; lnaGs; | |
| | | | | | | | | | dGs; | |
| | | | | | | | | | lnaAs; dAs; | |
| | | | | | | | | | lnaGs; dTs; | |
| | | | | | | | | | lnaCs; | |
| | | | | | | | | | dTs; lnaTs; | |
| | | | | | | | | | dA-Sup | |
| KLF1-08 | 3.089976634 | 0.630277836 | KLF1 | in | Hep3B | 30 | qRTP | UGAUC | dTs; lnaGs; | KLF1:862U15 |
| | | | | vitro | | | CR | GGUUU | dAs; lnaTs; | |
| | | | | | | | | CUGUC | dCs; lnaGs; | |
| | | | | | | | | | dGs; | |
| | | | | | | | | | lnaTs; dTs; | |
| | | | | | | | | | lnaTs; dCs; | |
| | | | | | | | | | lnaTs; | |
| | | | | | | | | | dGs; lnaTs; | |
| | | | | | | | | | dC-Sup | |
| KLF1-09 | 5.926598679 | 2.840001124 | KLF1 | in | Hep3B | 30 | qRTP | AUUUU | dAs; lnaTs; | KLF1:658L15 |
| | | | | vitro | | | CR | GGAUG | dTs; lnaTs; | |
| | | | | | | | | UCCCC | dTs; lnaGs; | |
| | | | | | | | | | dGs; | |
| | | | | | | | | | lnaAs; dTs; | |
| | | | | | | | | | lnaGs; dTs; | |
| | | | | | | | | | lnaCs; | |
| | | | | | | | | | dCs; lnaCs; | |
| | | | | | | | | | dC-Sup | |
| KLF1-10 | 5.069793273 | 1.531884337 | KLF1 | in | Hep3B | 30 | qRTP | CCCAGA | dCs; lnaCs; | KLF1:645L15 |
| | | | | vitro | | | CR | CACAC | dCs; lnaAs; | |
| | | | | | | | | UCAU | dGs; lnaAs; | |
| | | | | | | | | | dCs; | |
| | | | | | | | | | lnaAs; dCs; | |
| | | | | | | | | | lnaAs; | |
| | | | | | | | | | dCs; lnaTs; | |
| | | | | | | | | | dCs; lnaAs; | |
| | | | | | | | | | dT- | |
| | | | | | | | | | Sup | |
| KLF1-11 | 1.435557755 | 0.229351692 | KLF1 | in | Hep3B | 30 | qRTP | AGAUC | dAs; lnaGs; | KLF1:592L15 |
| | | | | vitro | | | CR | UCGUU | dAs; lnaTs; | |
| | | | | | | | | CCUUU | dCs; lnaTs; | |
| | | | | | | | | | dCs; lnaGs; | |
| | | | | | | | | | dTs; | |
| | | | | | | | | | lnaTs; dCs; | |
| | | | | | | | | | lnaCs; dTs; | |
| | | | | | | | | | lnaTs; | |
| | | | | | | | | | dT-Sup | |
| KLF1-12 | 12.44375078 | 3.018151203 | KLF1 | in | Hep3B | 30 | qRTP | UGGUG | dTs; lnaGs; | KLF1:-1051L15 |
| | | | | vitro | | | CR | CAUGC | dGs; lnaTs; | |
| | | | | | | | | CCAUA | dGs; lnaCs; | |
| | | | | | | | | | dAs; lnaTs; | |
| | | | | | | | | | dGs; | |
| | | | | | | | | | lnaCs; dCs; | |
| | | | | | | | | | lnaCs; dAs; | |
| | | | | | | | | | lnaTs; | |
| | | | | | | | | | dA-Sup | |
| KLF1-13 | 1.625401795 | 0.535683696 | KLF1 | in | Hep3B | 30 | qRTP | UACUC | dTs; lnaAs; | KLF1:9835U15 |
| | | | | vitro | | | CR | AGGAG | dCs; lnaTs; | |
| | | | | | | | | GCUGA | dCs; lnaAs; | |
| | | | | | | | | | dGs; lnaGs; | |
| | | | | | | | | | dAs; | |
| | | | | | | | | | lnaGs; dGs; | |
| | | | | | | | | | lnaCs; | |
| | | | | | | | | | dTs; lnaGs; | |
| | | | | | | | | | dA-Sup | |
| KLF1-14 | NA | NA | KLF1 | in | Hep3B | 30 | qRTP | AGCCCA | dAs; lnaGs; | KLF1:-1106L15 |
| | | | | vitro | | | CR | GGAGG | dCs; lnaCs; | |
| | | | | | | | | UCGG | dCs; lnaAs; | |
| | | | | | | | | | dGs; lnaGs; | |
| | | | | | | | | | dAs; | |
| | | | | | | | | | lnaGs; dGs; | |
| | | | | | | | | | lnaTs; | |
| | | | | | | | | | dCs; lnaGs; | |
| | | | | | | | | | dG-Sup | |
| KLF1-15 | 4.528614511 | 1.170039467 | KLF1 | in | Hep3B | 30 | qRTP | CCUCC | dCs; lnaCs; | KLF1:10248L15 |
| | | | | vitro | | | CR | UGAGU | dTs; lnaCs; | |
| | | | | | | | | AGCUG | dCs; lnaTs; | |
| | | | | | | | | | dGs; lnaAs; | |
| | | | | | | | | | dGs; | |
| | | | | | | | | | lnaTs; dAs; | |
| | | | | | | | | | lnaGs; | |
| | | | | | | | | | dCs; lnaTs; | |
| | | | | | | | | | dG-Sup | |
| KLF1-16 | 0.174465948 | NA | KLF1 | in | Hep3B | 30 | qRTP | UCUGC | dTs; lnaCs; | KLF1:2098L15 |
| | | | | vitro | | | CR | CCAGU | dTs; lnaGs; | |
| | | | | | | | | CAUGU | dCs; lnaCs; | |
| | | | | | | | | | dCs; lnaAs; | |
| | | | | | | | | | dGs; | |
| | | | | | | | | | lnaTs; dCs; | |
| | | | | | | | | | lnaAs; | |
| | | | | | | | | | dTs; lnaGs; | |
| | | | | | | | | | dT-Sup | |
| KLF1-17 | 3.432845374 | 0.775700795 | KLF1 | in | Hep3B | 30 | qRTP | CUGCA | dCs; lnaTs; | KLF1:2072L15 |
| | | | | vitro | | | CR | UCUGG | dGs; lnaCs; | |
| | | | | | | | | CCACA | dAs; lnaTs; | |
| | | | | | | | | | dCs; lnaTs; | |
| | | | | | | | | | dGs; | |
| | | | | | | | | | lnaGs; dCs; | |
| | | | | | | | | | lnaCs; | |
| | | | | | | | | | dAs; lnaCs; | |
| | | | | | | | | | dA-Sup | |
| KLF1-18 | 5.615800547 | 1.83320251 | KLF1 | in | Hep3B | 30 | qRTP | UGUGG | dTs; lnaGs; | KLF1:2072U15 |
| | | | | vitro | | | CR | CCAGA | dTs; lnaGs; | |
| | | | | | | | | UGCAG | dGs; lnaCs; | |
| | | | | | | | | | dCs; | |
| | | | | | | | | | lnaAs; dGs; | |
| | | | | | | | | | lnaAs; | |
| | | | | | | | | | dTs; lnaGs; | |
| | | | | | | | | | dCs; lnaAs; | |
| | | | | | | | | | dG- | |
| | | | | | | | | | Sup | |
| KLF1-19 | NA | NA | KLF1 | in | Hep3B | 30 | qRTP | AGUCA | dAs; lnaGs; | KLF1:128L15 |
| | | | | vitro | | | CR | UCCUG | dTs; lnaCs; | |
| | | | | | | | | UGUGU | dAs; lnaTs; | |
| | | | | | | | | | dCs; lnaCs; | |
| | | | | | | | | | dTs; | |
| | | | | | | | | | lnaGs; dTs; | |
| | | | | | | | | | lnaGs; | |
| | | | | | | | | | dTs; lnaGs; | |
| | | | | | | | | | dT-Sup | |
| KLF1-20 | 19.34268377 | 3.108173341 | KLF1 | in | Hep3B | 30 | qRTP | GUCAG | dGs; lnaTs; | KLF1:93L15 |
| | | | | vitro | | | CR | UGUGC | dCs; lnaAs; | |
| | | | | | | | | UGAUG | dGs; lnaTs; | |
| | | | | | | | | | dGs; | |
| | | | | | | | | | lnaTs; dGs; | |
| | | | | | | | | | lnaCs; | |
| | | | | | | | | | dTs; lnaGs; | |
| | | | | | | | | | dAs; lnaTs; | |
| | | | | | | | | | dG- | |
| | | | | | | | | | Sup | |
| KLF1-21 | 2.521718055 | 0.454555343 | KLF1 | in | Hep3B | 30 | qRTP | UCUCG | dTs; lnaCs; | KLF1:65L15 |
| | | | | vitro | | | CR | GCUGU | dTs; lnaCs; | |
| | | | | | | | | GGCCA | dGs; lnaGs; | |
| | | | | | | | | | dCs; lnaTs; | |
| | | | | | | | | | dGs; | |
| | | | | | | | | | lnaTs; dGs; | |
| | | | | | | | | | lnaGs; | |
| | | | | | | | | | dCs; lnaCs; | |
| | | | | | | | | | dA-Sup | |
| KLF1-22 | 6.685589916 | 2.592169435 | KLF1 | in | Hep3B | 30 | qRTP | AUGGC | dAs; lnaTs; | KLF1:64U15 |
| | | | | vitro | | | CR | CACAGC | dGs; lnaGs; | |
| | | | | | | | | CGUG | dCs; lnaCs; | |
| | | | | | | | | | dAs; lnaCs; | |
| | | | | | | | | | dAs; | |
| | | | | | | | | | lnaGs; dCs; | |
| | | | | | | | | | lnaCs; | |
| | | | | | | | | | dGs; lnaTs; | |
| | | | | | | | | | dG-Sup | |
| KLF1-23 | 154.2555976 | 4.348069344 | KLF1 | in | Hep3B | 30 | qRTP | CCAUC | dCs; lnaCs; | KLF1:92U15 |
| | | | | vitro | | | CR | AGCAC | dAs; lnaTs; | |
| | | | | | | | | ACUGA | dCs; lnaAs; | |
| | | | | | | | | | dGs; lnaCs; | |
| | | | | | | | | | dAs; | |
| | | | | | | | | | lnaCs; dAs; | |
| | | | | | | | | | lnaCs; | |
| | | | | | | | | | dTs; lnaGs; | |
| | | | | | | | | | dA-Sup | |
| KLF1-24 | 4.197566702 | 0.504893185 | KLF1 | in | Hep3B | 30 | qRTP | AACGC | dAs; lnaAs; | KLF1:2779L15 |
| | | | | vitro | | | CR | UGAAG | dCs; lnaGs; | |
| | | | | | | | | CUUUA | dCs; lnaTs; | |
| | | | | | | | | | dGs; lnaAs; | |
| | | | | | | | | | dAs; | |
| | | | | | | | | | lnaGs; dCs; | |
| | | | | | | | | | lnaTs; | |
| | | | | | | | | | dTs; lnaTs; | |
| | | | | | | | | | dA-Sup | |
| KLF1-25 | 17.01922554 | 1.537329042 | KLF1 | in | Hep3B | 30 | qRTP | UUUUA | dTs; lnaTs; | KLF1:2750L15 |
| | | | | vitro | | | CR | UAGGA | dTs; lnaTs; | |
| | | | | | | | | CCCAU | dAs; lnaTs; | |
| | | | | | | | | | dAs; lnaGs; | |
| | | | | | | | | | dGs; | |
| | | | | | | | | | lnaAs; dCs; | |
| | | | | | | | | | lnaCs; | |
| | | | | | | | | | dCs; lnaAs; | |
| | | | | | | | | | dT-Sup | |
| KLF1-26 | 2.251183304 | 0.327424437 | KLF1 | in | Hep3B | 30 | qRTP | AUUGA | dAs; lnaTs; | KLF1:2731L15 |
| | | | | vitro | | | CR | CAGUU | dTs; lnaGs; | |
| | | | | | | | | AAUAU | dAs; lnaCs; | |
| | | | | | | | | | dAs; | |
| | | | | | | | | | lnaGs; dTs; | |
| | | | | | | | | | lnaTs; | |
| | | | | | | | | | dAs; lnaAs; | |
| | | | | | | | | | dTs; lnaAs; | |
| | | | | | | | | | dT- | |
| | | | | | | | | | Sup | |
| KLF1-27 | 329.4774825 | 21.88316191 | KLF1 | in | Hep3B | 30 | qRTP | AUAUU | dAs; lnaTs; | KLF1:2731U15 |
| | | | | vitro | | | CR | AACUG | dAs; lnaTs; | |
| | | | | | | | | UCAAU | dTs; lnaAs; | |
| | | | | | | | | | dAs; lnaCs; | |
| | | | | | | | | | dTs; | |
| | | | | | | | | | lnaGs; dTs; | |
| | | | | | | | | | lnaCs; | |
| | | | | | | | | | dAs; lnaAs; | |
| | | | | | | | | | dT-Sup | |
| KLF1-28 | NA | NA | KLF1 | in | Hep3B | 30 | qRTP | UAUAA | dTs; lnaAs; | KLF1:2758U15 |
| | | | | vitro | | | CR | AAAUG | dTs; lnaAs; | |
| | | | | | | | | CCCCU | dAs; lnaAs; | |
| | | | | | | | | | dAs; lnaAs; | |
| | | | | | | | | | dAs; lnaAs; | |
| | | | | | | | | | dTs; | |
| | | | | | | | | | lnaGs; dCs; | |
| | | | | | | | | | lnaCs; | |
| | | | | | | | | | dCs; lnaCs; | |
| | | | | | | | | | dT-Sup | |
| KLF1-29 | 101.7787152 | 40.8924609 | KLF1 | in | Hep3B | 30 | qRTP | AUAAA | dAs; lnaTs; | KLF1:2778U15 |
| | | | | vitro | | | CR | GCUUC | dAs; lnaAs; | |
| | | | | | | | | AGCGU | dAs; lnaGs; | |
| | | | | | | | | | dCs; lnaTs; | |
| | | | | | | | | | dTs; | |
| | | | | | | | | | lnaCs; dAs; | |
| | | | | | | | | | lnaGs; | |
| | | | | | | | | | dCs; lnaGs; | |
| | | | | | | | | | dT-Sup | |
| KLF1-30 | 3.625121983 | 0.748834329 | KLF1 | in | Hep3B | 30 | qRTP | UUGGC | dTs; lnaTs; | KLF1:2792U15 |
| | | | | vitro | | | CR | CUGAA | dGs; lnaGs; | |
| | | | | | | | | UUUUU | dCs; lnaCs; | |
| | | | | | | | | | dTs; lnaGs; | |
| | | | | | | | | | dAs; | |
| | | | | | | | | | lnaAs; dTs; | |
| | | | | | | | | | lnaTs; | |
| | | | | | | | | | dTs; lnaTs; | |
| | | | | | | | | | dT-Sup | |
| mKLF1- | NA | NA | KLF1 | NA | NA | 0 | NA | GGUCG | dGs; lnaGs; | Klf1:21854L15 |
| 1 | | | | | | | | GCAUG | dTs; lnaCs; | |
| | | | | | | | | UUCUG | dGs; lnaGs; | |
| | | | | | | | | | dCs; lnaAs; | |
| | | | | | | | | | dTs; | |
| | | | | | | | | | lnaGs; dTs; | |
| | | | | | | | | | lnaTs; | |
| | | | | | | | | | dCs; lnaTs; | |
| | | | | | | | | | dG-Sup | |
| mKLF1- | NA | NA | KLF1 | NA | NA | 0 | NA | CCCCAG | dCs; lnaCs; | Klf1:19011L15 |
| 2 | | | | | | | | AGUAC | dCs; lnaCs; | |
| | | | | | | | | AUCG | dAs; lnaGs; | |
| | | | | | | | | | dAs; lnaGs; | |
| | | | | | | | | | dTs; | |
| | | | | | | | | | lnaAs; dCs; | |
| | | | | | | | | | lnaAs; | |
| | | | | | | | | | dTs; lnaCs; | |
| | | | | | | | | | dG-Sup | |
| mKLF1- | NA | NA | KLF1 | NA | NA | 0 | NA | CUGCG | dCs; lnaTs; | Klf1:16149L15 |
| 3 | | | | | | | | UGAGA | dGs; lnaCs; | |
| | | | | | | | | AGACC | dGs; lnaTs; | |
| | | | | | | | | | dGs; lnaAs; | |
| | | | | | | | | | dGs; | |
| | | | | | | | | | lnaAs; dAs; | |
| | | | | | | | | | lnaGs; | |
| | | | | | | | | | dAs; lnaCs; | |
| | | | | | | | | | dC-Sup | |
| mKLF1- | NA | NA | KLF1 | NA | NA | 0 | NA | CUCCU | dCs; lnaTs; | Klf1:27066L15 |
| 4 | | | | | | | | ACGAC | dCs; lnaCs; | |
| | | | | | | | | AACGA | dTs; lnaAs; | |
| | | | | | | | | | dCs; lnaGs; | |
| | | | | | | | | | dAs; | |
| | | | | | | | | | lnaCs; dAs; | |
| | | | | | | | | | lnaAs; | |
| | | | | | | | | | dCs; lnaGs; | |
| | | | | | | | | | dA-Sup | |
| mKLF1- | NA | NA | KLF1 | NA | NA | 0 | NA | CUCUU | dCs; lnaTs; | KLF1:1838L15 |
| 5 | | | | | | | | GGUGU | dCs; lnaTs; | |
| | | | | | | | | AGCUC | dTs; lnaGs; | |
| | | | | | | | | | dGs; | |
| | | | | | | | | | lnaTs; dGs; | |
| | | | | | | | | | lnaTs; dAs; | |
| | | | | | | | | | lnaGs; | |
| | | | | | | | | | dCs; lnaTs; | |
| | | | | | | | | | dC-Sup | |
| mKLF1- | NA | NA | KLF1 | NA | NA | 0 | NA | CAGAA | dCs; lnaAs; | Klf1:21854U15 |
| 6 | | | | | | | | CAUGC | dGs; lnaAs; | |
| | | | | | | | | CGACC | dAs; lnaCs; | |
| | | | | | | | | | dAs; lnaTs; | |
| | | | | | | | | | dGs; | |
| | | | | | | | | | lnaCs; dCs; | |
| | | | | | | | | | lnaGs; dAs; | |
| | | | | | | | | | lnaCs; | |
| | | | | | | | | | dC-Sup | |
| mKLF1- | NA | NA | KLF1 | NA | NA | 0 | NA | GAGCU | dGs; lnaAs; | KLF1:1838U15 |
| 7 | | | | | | | | ACACCA | dGs; lnaCs; | |
| | | | | | | | | AGAG | dTs; lnaAs; | |
| | | | | | | | | | dCs; lnaAs; | |
| | | | | | | | | | dCs; | |
| | | | | | | | | | lnaCs; dAs; | |
| | | | | | | | | | lnaAs; | |
| | | | | | | | | | dGs; lnaAs; | |
| | | | | | | | | | dG-Sup | |
| KLF4-01 | 4.991178118 | 0.525100377 | KLF4 | in | Hep3B | 30 | qRTP | AAGAG | dAs; lnaAs; | KLF4:512L15 |
| | | | | vitro | | | CR | AAGAA | dGs; lnaAs; | |
| | | | | | | | | ACGAA | dGs; lnaAs; | |
| | | | | | | | | | dAs; | |
| | | | | | | | | | lnaGs; dAs; | |
| | | | | | | | | | lnaAs; | |
| | | | | | | | | | dAs; lnaCs; | |
| | | | | | | | | | dGs; lnaAs; | |
| | | | | | | | | | dA- | |
| | | | | | | | | | Sup | |
| KLF4-01 | 6.081256124 | 0.975876919 | KLF4 | in | Hep3B | 30 | qRTP | AAGAG | dAs; lnaAs; | KLF4:512L15 |
| | | | | vitro | | | CR | AAGAA | dGs; lnaAs; | |
| | | | | | | | | ACGAA | dGs; lnaAs; | |
| | | | | | | | | | dAs; | |
| | | | | | | | | | lnaGs; dAs; | |
| | | | | | | | | | lnaAs; | |
| | | | | | | | | | dAs; lnaCs; | |
| | | | | | | | | | dGs; lnaAs; | |
| | | | | | | | | | dA- | |
| | | | | | | | | | Sup | |
| KLF4-02 | 2.858177648 | 0.976756081 | KLF4 | in | Hep3B | 30 | qRTP | AGAAA | dAs; lnaGs; | KLF4:506L15 |
| | | | | vitro | | | CR | CGAAG | dAs; lnaAs; | |
| | | | | | | | | CCAAA | dAs; lnaCs; | |
| | | | | | | | | | dGs; lnaAs; | |
| | | | | | | | | | dAs; | |
| | | | | | | | | | lnaGs; dCs; | |
| | | | | | | | | | lnaCs; | |
| | | | | | | | | | dAs; lnaAs; | |
| | | | | | | | | | dA-Sup | |
| KLF4-02 | 4.160040344 | 0.351892333 | KLF4 | in | Hep3B | 30 | qRTP | AGAAA | dAs; lnaGs; | KLF4:506L15 |
| | | | | vitro | | | CR | CGAAG | dAs; lnaAs; | |
| | | | | | | | | CCAAA | dAs; lnaCs; | |
| | | | | | | | | | dGs; lnaAs; | |
| | | | | | | | | | dAs; | |
| | | | | | | | | | lnaGs; dCs; | |
| | | | | | | | | | lnaCs; | |
| | | | | | | | | | dAs; lnaAs; | |
| | | | | | | | | | dA-Sup | |
| KLF4-03 | 6.753605424 | 0.632510281 | KLF4 | in | Hep3B | 30 | qRTP | AAUGU | dAs; lnaAs; | KLF4:4741U15 |
| | | | | vitro | | | CR | GUUUU | dTs; lnaGs; | |
| | | | | | | | | UCUAU | dTs; lnaGs; | |
| | | | | | | | | | dTs; lnaTs; | |
| | | | | | | | | | dTs; | |
| | | | | | | | | | lnaTs; dTs; | |
| | | | | | | | | | lnaCs; dTs; | |
| | | | | | | | | | lnaAs; | |
| | | | | | | | | | dT-Sup | |
| KLF4-03 | 4.084238297 | 0.430885831 | KLF4 | in | Hep3B | 10 | qRTP | AAUGU | dAs; lnaAs; | KLF4:4741U15 |
| | | | | vitro | | | CR | GUUUU | dTs; lnaGs; | |
| | | | | | | | | UCUAU | dTs; lnaGs; | |
| | | | | | | | | | dTs; lnaTs; | |
| | | | | | | | | | dTs; | |
| | | | | | | | | | lnaTs; dTs; | |
| | | | | | | | | | lnaCs; dTs; | |
| | | | | | | | | | lnaAs; | |
| | | | | | | | | | dT-Sup | |
| KLF4-04 | 2.205884694 | 0.619327249 | KLF4 | in | Hep3B | 30 | qRTP | UAUAG | dTs; lnaAs; | KLF4:4755U15 |
| | | | | vitro | | | CR | UUCCU | dTs; lnaAs; | |
| | | | | | | | | UGCCU | dGs; lnaTs; | |
| | | | | | | | | | dTs; | |
| | | | | | | | | | lnaCs; dCs; | |
| | | | | | | | | | lnaTs; dTs; | |
| | | | | | | | | | lnaGs; | |
| | | | | | | | | | dCs; lnaCs; | |
| | | | | | | | | | dT-Sup | |
| KLF4-04 | 3.702490073 | 0.391773815 | KLF4 | in | Hep3B | 10 | qRTP | UAUAG | dTs; lnaAs; | KLF4:4755U15 |
| | | | | vitro | | | CR | UUCCU | dTs; lnaAs; | |
| | | | | | | | | UGCCU | dGs; lnaTs; | |
| | | | | | | | | | dTs; | |
| | | | | | | | | | lnaCs; dCs; | |
| | | | | | | | | | lnaTs; dTs; | |
| | | | | | | | | | lnaGs; | |
| | | | | | | | | | dCs; lnaCs; | |
| | | | | | | | | | dT-Sup | |
| KLF4-05 | 2.073527687 | 0.554041992 | KLF4 | in | Hep3B | 30 | qRTP | AAACCA | dAs; lnaAs; | KLF4:4623L15 |
| | | | | vitro | | | CR | GGUAU | dAs; lnaCs; | |
| | | | | | | | | AUUA | dCs; lnaAs; | |
| | | | | | | | | | dGs; lnaGs; | |
| | | | | | | | | | dTs; | |
| | | | | | | | | | lnaAs; dTs; | |
| | | | | | | | | | lnaAs; dTs; | |
| | | | | | | | | | lnaTs; | |
| | | | | | | | | | dA-Sup | |
| KLF4-05 | 4.984641802 | 0.453539587 | KLF4 | in | Hep3B | 10 | qRTP | AAACCA | dAs; lnaAs; | KLF4:4623L15 |
| | | | | vitro | | | CR | GGUAU | dAs; lnaCs; | |
| | | | | | | | | AUUA | dCs; lnaAs; | |
| | | | | | | | | | dGs; lnaGs; | |
| | | | | | | | | | dTs; | |
| | | | | | | | | | lnaAs; dTs; | |
| | | | | | | | | | lnaAs; dTs; | |
| | | | | | | | | | lnaTs; | |
| | | | | | | | | | dA-Sup | |
| KLF4-06 | 1.22265182 | 0.472184841 | KLF4 | in | Hep3B | 30 | qRTP | AGGUC | dAs; lnaGs; | KLF4:-99384U15 |
| | | | | vitro | | | CR | AUAAA | dGs; lnaTs; | |
| | | | | | | | | AUGUU | dCs; lnaAs; | |
| | | | | | | | | | dTs; lnaAs; | |
| | | | | | | | | | dAs; | |
| | | | | | | | | | lnaAs; dAs; | |
| | | | | | | | | | lnaTs; | |
| | | | | | | | | | dGs; lnaTs; | |
| | | | | | | | | | dT-Sup | |
| KLF4-06 | 2.786762378 | 0.191056458 | KLF4 | in | Hep3B | 10 | qRTP | AGGUC | dAs; lnaGs; | KLF4:-99384U15 |
| | | | | vitro | | | CR | AUAAA | dGs; lnaTs; | |
| | | | | | | | | AUGUU | dCs; lnaAs; | |
| | | | | | | | | | dTs; lnaAs; | |
| | | | | | | | | | dAs; | |
| | | | | | | | | | lnaAs; dAs; | |
| | | | | | | | | | lnaTs; | |
| | | | | | | | | | dGs; lnaTs; | |
| | | | | | | | | | dT-Sup | |
| KLF4-07 | 1.367559219 | 0.195444945 | KLF4 | in | Hep3B | 30 | qRTP | AGGAA | dAs; lnaGs; | KLF4:4536U15 |
| | | | | vitro | | | CR | GCCAA | dGs; lnaAs; | |
| | | | | | | | | AGUUU | dAs; lnaGs; | |
| | | | | | | | | | dCs; lnaCs; | |
| | | | | | | | | | dAs; | |
| | | | | | | | | | lnaAs; dAs; | |
| | | | | | | | | | lnaGs; | |
| | | | | | | | | | dTs; lnaTs; | |
| | | | | | | | | | dT-Sup | |
| KLF4-07 | 2.147525114 | 0.635981966 | KLF4 | in | Hep3B | 10 | qRTP | AGGAA | dAs; lnaGs; | KLF4:4536U15 |
| | | | | vitro | | | CR | GCCAA | dGs; lnaAs; | |
| | | | | | | | | AGUUU | dAs; lnaGs; | |
| | | | | | | | | | dCs; lnaCs; | |
| | | | | | | | | | dAs; | |
| | | | | | | | | | lnaAs; dAs; | |
| | | | | | | | | | lnaGs; | |
| | | | | | | | | | dTs; lnaTs; | |
| | | | | | | | | | dT-Sup | |
| KLF4-08 | 2.535402023 | 1.02300091 | KLF4 | in | Hep3B | 30 | qRTP | UUCAA | dTs; lnaTs; | KLF4:4550U15 |
| | | | | vitro | | | CR | ACUGC | dCs; lnaAs; | |
| | | | | | | | | UGCAU | dAs; lnaAs; | |
| | | | | | | | | | dCs; lnaTs; | |
| | | | | | | | | | dGs; | |
| | | | | | | | | | lnaCs; dTs; | |
| | | | | | | | | | lnaGs; dCs; | |
| | | | | | | | | | lnaAs; | |
| | | | | | | | | | dT-Sup | |
| KLF4-08 | 3.214102069 | 1.294739353 | KLF4 | in | Hep3B | 10 | qRTP | UUCAA | dTs; lnaTs; | KLF4:4550U15 |
| | | | | vitro | | | CR | ACUGC | dCs; lnaAs; | |
| | | | | | | | | UGCAU | dAs; lnaAs; | |
| | | | | | | | | | dCs; lnaTs; | |
| | | | | | | | | | dGs; | |
| | | | | | | | | | lnaCs; dTs; | |
| | | | | | | | | | lnaGs; dCs; | |
| | | | | | | | | | lnaAs; | |
| | | | | | | | | | dT-Sup | |
| KLF4-09 | 3.972967638 | 1.76495466 | KLF4 | in | Hep3B | 30 | qRTP | UUCUC | dTs; lnaTs; | KLF4:2917L15 |
| | | | | vitro | | | CR | UCCAG | dCs; lnaTs; | |
| | | | | | | | | UGAUC | dCs; lnaTs; | |
| | | | | | | | | | dCs; lnaCs; | |
| | | | | | | | | | dAs; | |
| | | | | | | | | | lnaGs; dTs; | |
| | | | | | | | | | lnaGs; | |
| | | | | | | | | | dAs; lnaTs; | |
| | | | | | | | | | dC-Sup | |
| KLF4-09 | 4.17719722 | 1.84686236 | KLF4 | in | Hep3B | 10 | qRTP | UUCUC | dTs; lnaTs; | KLF4:2917L15 |
| | | | | vitro | | | CR | UCCAG | dCs; lnaTs; | |
| | | | | | | | | UGAUC | dCs; lnaTs; | |
| | | | | | | | | | dCs; lnaCs; | |
| | | | | | | | | | dAs; | |
| | | | | | | | | | lnaGs; dTs; | |
| | | | | | | | | | lnaGs; | |
| | | | | | | | | | dAs; lnaTs; | |
| | | | | | | | | | dC-Sup | |
| KLF4-10 | 1.124954246 | 0.347845678 | KLF4 | in | Hep3B | 30 | qRTP | CGCCG | dCs; lnaGs; | KLF4:2930L15 |
| | | | | vitro | | | CR | GUUUG | dCs; lnaCs; | |
| | | | | | | | | CUGUU | dGs; lnaGs; | |
| | | | | | | | | | dTs; lnaTs; | |
| | | | | | | | | | dTs; | |
| | | | | | | | | | lnaGs; dCs; | |
| | | | | | | | | | lnaTs; | |
| | | | | | | | | | dGs; lnaTs; | |
| | | | | | | | | | dT-Sup | |
| KLF4-10 | 1.862388318 | 0.529616329 | KLF4 | in | Hep3B | 10 | qRTP | CGCCG | dCs; lnaGs; | KLF4:2930L15 |
| | | | | vitro | | | CR | GUUUG | dCs; lnaCs; | |
| | | | | | | | | CUGUU | dGs; lnaGs; | |
| | | | | | | | | | dTs; lnaTs; | |
| | | | | | | | | | dTs; | |
| | | | | | | | | | lnaGs; dCs; | |
| | | | | | | | | | lnaTs; | |
| | | | | | | | | | dGs; lnaTs; | |
| | | | | | | | | | dT-Sup | |
| KLF4-11 | 2.644659727 | 0.981916925 | KLF4 | in | Hep3B | 30 | qRTP | AGAAA | dAs; lnaGs; | KLF4:2941L15 |
| | | | | vitro | | | CR | AGUAG | dAs; lnaAs; | |
| | | | | | | | | GCGCC | dAs; lnaAs; | |
| | | | | | | | | | dGs; lnaTs; | |
| | | | | | | | | | dAs; | |
| | | | | | | | | | lnaGs; dGs; | |
| | | | | | | | | | lnaCs; | |
| | | | | | | | | | dGs; lnaCs; | |
| | | | | | | | | | dC-Sup | |
| KLF4-11 | 2.843241064 | 1.04308117 | KLF4 | in | Hep3B | 10 | qRTP | AGAAA | dAs; lnaGs; | KLF4:2941L15 |
| | | | | vitro | | | CR | AGUAG | dAs; lnaAs; | |
| | | | | | | | | GCGCC | dAs; lnaAs; | |
| | | | | | | | | | dGs; lnaTs; | |
| | | | | | | | | | dAs; | |
| | | | | | | | | | lnaGs; dGs; | |
| | | | | | | | | | lnaCs; | |
| | | | | | | | | | dGs; lnaCs; | |
| | | | | | | | | | dC-Sup | |
| KLF4-12 | 3.367059181 | 1.36370493 | KLF4 | in | Hep3B | 30 | qRTP | CCGCG | dCs; lnaCs; | KLF4:2665L15 |
| | | | | vitro | | | CR | UAAUC | dGs; lnaCs; | |
| | | | | | | | | ACAAG | dGs; lnaTs; | |
| | | | | | | | | | dAs; lnaAs; | |
| | | | | | | | | | dTs; | |
| | | | | | | | | | lnaCs; dAs; | |
| | | | | | | | | | lnaCs; | |
| | | | | | | | | | dAs; lnaAs; | |
| | | | | | | | | | dG-Sup | |
| KLF4-12 | 3.912148032 | 1.637769442 | KLF4 | in | Hep3B | 10 | qRTP | CCGCG | dCs; lnaCs; | KLF4:2665L15 |
| | | | | vitro | | | CR | UAAUC | dGs; lnaCs; | |
| | | | | | | | | ACAAG | dGs; lnaTs; | |
| | | | | | | | | | dAs; lnaAs; | |
| | | | | | | | | | dTs; | |
| | | | | | | | | | lnaCs; dAs; | |
| | | | | | | | | | lnaCs; | |
| | | | | | | | | | dAs; lnaAs; | |
| | | | | | | | | | dG-Sup | |
| KLF4-13 | 3.20027608 | 0.342776711 | KLF4 | in | Hep3B | 30 | qRTP | UGUGU | dTs; lnaGs; | KLF4:2685L15 |
| | | | | vitro | | | CR | AGGUU | dTs; lnaGs; | |
| | | | | | | | | UUGCC | dTs; lnaAs; | |
| | | | | | | | | | dGs; lnaGs; | |
| | | | | | | | | | dTs; | |
| | | | | | | | | | lnaTs; dTs; | |
| | | | | | | | | | lnaTs; dGs; | |
| | | | | | | | | | lnaCs; | |
| | | | | | | | | | dC-Sup | |
| KLF4-13 | 3.510730982 | 0.376017423 | KLF4 | in | Hep3B | 10 | qRTP | UGUGU | dTs; lnaGs; | KLF4:2685L15 |
| | | | | vitro | | | CR | AGGUU | dTs; lnaGs; | |
| | | | | | | | | UUGCC | dTs; lnaAs; | |
| | | | | | | | | | dGs; lnaGs; | |
| | | | | | | | | | dTs; | |
| | | | | | | | | | lnaTs; dTs; | |
| | | | | | | | | | lnaTs; dGs; | |
| | | | | | | | | | lnaCs; | |
| | | | | | | | | | dC-Sup | |
| KLF4-14 | 2.694179314 | 0.3015876 | KLF4 | in | Hep3B | 30 | qRTP | AUCUG | dAs; lnaTs; | KLF4:2426L15 |
| | | | | vitro | | | CR | AUCGG | dCs; lnaTs; | |
| | | | | | | | | GGCAG | dGs; lnaAs; | |
| | | | | | | | | | dTs; lnaCs; | |
| | | | | | | | | | dGs; | |
| | | | | | | | | | lnaGs; dGs; | |
| | | | | | | | | | lnaGs; | |
| | | | | | | | | | dCs; lnaAs; | |
| | | | | | | | | | dG- | |
| | | | | | | | | | Sup | |
| KLF4-14 | 3.519138404 | 0.466106598 | KLF4 | in | Hep3B | 10 | qRTP | AUCUG | dAs; lnaTs; | KLF4:2426L15 |
| | | | | vitro | | | CR | AUCGG | dCs; lnaTs; | |
| | | | | | | | | GGCAG | dGs; lnaAs; | |
| | | | | | | | | | dTs; lnaCs; | |
| | | | | | | | | | dGs; | |
| | | | | | | | | | lnaGs; dGs; | |
| | | | | | | | | | lnaGs; | |
| | | | | | | | | | dCs; lnaAs; | |
| | | | | | | | | | dG- | |
| | | | | | | | | | Sup | |
| KLF4-15 | 4.149912731 | 1.287135192 | KLF4 | in | Hep3B | 30 | qRTP | AAGGA | dAs; lnaAs; | KLF4:2411L15 |
| | | | | vitro | | | CR | UGGGU | dGs; lnaGs; | |
| | | | | | | | | AAUUG | dAs; lnaTs; | |
| | | | | | | | | | dGs; | |
| | | | | | | | | | lnaGs; dGs; | |
| | | | | | | | | | lnaTs; | |
| | | | | | | | | | dAs; lnaAs; | |
| | | | | | | | | | dTs; lnaTs; | |
| | | | | | | | | | dG- | |
| | | | | | | | | | Sup | |
| KLF4-15 | 6.111681572 | 0.712314995 | KLF4 | in | Hep3B | 10 | qRTP | AAGGA | dAs; lnaAs; | KLF4:2411L15 |
| | | | | vitro | | | CR | UGGGU | dGs; lnaGs; | |
| | | | | | | | | AAUUG | dAs; lnaTs; | |
| | | | | | | | | | dGs; | |
| | | | | | | | | | lnaGs; dGs; | |
| | | | | | | | | | lnaTs; | |
| | | | | | | | | | dAs; lnaAs; | |
| | | | | | | | | | dTs; lnaTs; | |
| | | | | | | | | | dG- | |
| | | | | | | | | | Sup | |
| KLF4-16 | 8.991841491 | 1.465827754 | KLF4 | in | Hep3B | 30 | qRTP | GACGC | dGs; lnaAs; | KLF4:2109L15 |
| | | | | vitro | | | CR | UGAUG | dCs; lnaGs; | |
| | | | | | | | | ACCGA | dCs; lnaTs; | |
| | | | | | | | | | dGs; lnaAs; | |
| | | | | | | | | | dTs; | |
| | | | | | | | | | lnaGs; dAs; | |
| | | | | | | | | | lnaCs; | |
| | | | | | | | | | dCs; lnaGs; | |
| | | | | | | | | | dA-Sup | |
| KLF4-16 | 8.764424259 | 0.750499481 | KLF4 | in | Hep3B | 10 | qRTP | GACGC | dGs; lnaAs; | KLF4:2109L15 |
| | | | | vitro | | | CR | UGAUG | dCs; lnaGs; | |
| | | | | | | | | ACCGA | dCs; lnaTs; | |
| | | | | | | | | | dGs; lnaAs; | |
| | | | | | | | | | dTs; | |
| | | | | | | | | | lnaGs; dAs; | |
| | | | | | | | | | lnaCs; | |
| | | | | | | | | | dCs; lnaGs; | |
| | | | | | | | | | dA-Sup | |
| KLF4-17 | 2.038320649 | 0.652328439 | KLF4 | in | Hep3B | 30 | qRTP | ACGGG | dAs; lnaCs; | KLF4:2095L15 |
| | | | | vitro | | | CR | CUGCC | dGs; lnaGs; | |
| | | | | | | | | GUACU | dGs; lnaCs; | |
| | | | | | | | | | dTs; | |
| | | | | | | | | | lnaGs; dCs; | |
| | | | | | | | | | lnaCs; | |
| | | | | | | | | | dGs; lnaTs; | |
| | | | | | | | | | dAs; lnaCs; | |
| | | | | | | | | | dT- | |
| | | | | | | | | | Sup | |
| KLF4-17 | 1.697952301 | 0.07229143 | KLF4 | in | Hep3B | 10 | qRTP | ACGGG | dAs; lnaCs; | KLF4:2095L15 |
| | | | | vitro | | | CR | CUGCC | dGs; lnaGs; | |
| | | | | | | | | GUACU | dGs; lnaCs; | |
| | | | | | | | | | dTs; | |
| | | | | | | | | | lnaGs; dCs; | |
| | | | | | | | | | lnaCs; | |
| | | | | | | | | | dGs; lnaTs; | |
| | | | | | | | | | dAs; lnaCs; | |
| | | | | | | | | | dT- | |
| | | | | | | | | | Sup | |
| KLF4-18 | 15.15228678 | 1.496822283 | KLF4 | in | Hep3B | 30 | qRTP | CACGA | dCs; lnaAs; | KLF4:1959L15 |
| | | | | vitro | | | CR | AGCCG | dCs; lnaGs; | |
| | | | | | | | | CCCGA | dAs; lnaAs; | |
| | | | | | | | | | dGs; | |
| | | | | | | | | | lnaCs; dCs; | |
| | | | | | | | | | lnaGs; | |
| | | | | | | | | | dCs; lnaCs; | |
| | | | | | | | | | dCs; lnaGs; | |
| | | | | | | | | | dA- | |
| | | | | | | | | | Sup | |
| KLF4-18 | 5.551180818 | 0.163398091 | KLF4 | in | Hep3B | 10 | qRTP | CACGA | dCs; lnaAs; | KLF4:1959L15 |
| | | | | vitro | | | CR | AGCCG | dCs; lnaGs; | |
| | | | | | | | | CCCGA | dAs; lnaAs; | |
| | | | | | | | | | dGs; | |
| | | | | | | | | | lnaCs; dCs; | |
| | | | | | | | | | lnaGs; | |
| | | | | | | | | | dCs; lnaCs; | |
| | | | | | | | | | dCs; lnaGs; | |
| | | | | | | | | | dA- | |
| | | | | | | | | | Sup | |
| KLF4-19 | 1.261681293 | 0.33608011 | KLF4 | in | Hep3B | 30 | qRTP | ACGUC | dAs; lnaCs; | KLF4:1937L15 |
| | | | | vitro | | | CR | GUUGA | dGs; lnaTs; | |
| | | | | | | | | UGUCC | dCs; lnaGs; | |
| | | | | | | | | | dTs; lnaTs; | |
| | | | | | | | | | dGs; | |
| | | | | | | | | | lnaAs; dTs; | |
| | | | | | | | | | lnaGs; dTs; | |
| | | | | | | | | | lnaCs; | |
| | | | | | | | | | dC-Sup | |
| KLF4-19 | 5.210827065 | 0.107800531 | KLF4 | in | Hep3B | 10 | qRTP | ACGUC | dAs; lnaCs; | KLF4:1937L15 |
| | | | | vitro | | | CR | GUUGA | dGs; lnaTs; | |
| | | | | | | | | UGUCC | dCs; lnaGs; | |
| | | | | | | | | | dTs; lnaTs; | |
| | | | | | | | | | dGs; | |
| | | | | | | | | | lnaAs; dTs; | |
| | | | | | | | | | lnaGs; dTs; | |
| | | | | | | | | | lnaCs; | |
| | | | | | | | | | dC-Sup | |
| KLF4-20 | 0.662507967 | 0.237413143 | KLF4 | in | Hep3B | 30 | qRTP | AGAGG | dAs; lnaGs; | KLF4:1876L15 |
| | | | | vitro | | | CR | AGGCC | dAs; lnaGs; | |
| | | | | | | | | UCCGC | dGs; lnaAs; | |
| | | | | | | | | | dGs; | |
| | | | | | | | | | lnaGs; dCs; | |
| | | | | | | | | | lnaCs; | |
| | | | | | | | | | dTs; lnaCs; | |
| | | | | | | | | | dCs; lnaGs; | |
| | | | | | | | | | dC- | |
| | | | | | | | | | Sup | |
| KLF4-20 | 1.378170284 | 0.126282624 | KLF4 | in | Hep3B | 10 | qRTP | AGAGG | dAs; lnaGs; | KLF4:1876L15 |
| | | | | vitro | | | CR | AGGCC | dAs; lnaGs; | |
| | | | | | | | | UCCGC | dGs; lnaAs; | |
| | | | | | | | | | dGs; | |
| | | | | | | | | | lnaGs; dCs; | |
| | | | | | | | | | lnaCs; | |
| | | | | | | | | | dTs; lnaCs; | |
| | | | | | | | | | dCs; lnaGs; | |
| | | | | | | | | | dC- | |
| | | | | | | | | | Sup | |
| KLF4-21 | 1.672496391 | 0.454581555 | KLF4 | in | Hep3B | 30 | qRTP | UCCGC | dTs; lnaCs; | KLF4:1866L15 |
| | | | | vitro | | | CR | CCGUG | dCs; lnaGs; | |
| | | | | | | | | CCGCC | dCs; lnaCs; | |
| | | | | | | | | | dCs; lnaGs; | |
| | | | | | | | | | dTs; | |
| | | | | | | | | | lnaGs; dCs; | |
| | | | | | | | | | lnaCs; | |
| | | | | | | | | | dGs; lnaCs; | |
| | | | | | | | | | dC-Sup | |
| KLF4-21 | 2.639735538 | 0.196972543 | KLF4 | in | Hep3B | 10 | qRTP | UCCGC | dTs; lnaCs; | KLF4:1866L15 |
| | | | | vitro | | | CR | CCGUG | dCs; lnaGs; | |
| | | | | | | | | CCGCC | dCs; lnaCs; | |
| | | | | | | | | | dCs; lnaGs; | |
| | | | | | | | | | dTs; | |
| | | | | | | | | | lnaGs; dCs; | |
| | | | | | | | | | lnaCs; | |
| | | | | | | | | | dGs; lnaCs; | |
| | | | | | | | | | dC-Sup | |
| KLF4-22 | 1.020693843 | 0.123463867 | KLF4 | in | Hep3B | 30 | qRTP | UGCCG | dTs; lnaGs; | KLF4:1858L15 |
| | | | | vitro | | | CR | CCCGG | dCs; lnaCs; | |
| | | | | | | | | CGCCA | dGs; lnaCs; | |
| | | | | | | | | | dCs; lnaCs; | |
| | | | | | | | | | dGs; | |
| | | | | | | | | | lnaGs; dCs; | |
| | | | | | | | | | lnaGs; | |
| | | | | | | | | | dCs; lnaCs; | |
| | | | | | | | | | dA-Sup | |
| KLF4-22 | 1.391268977 | 0.1346827 | KLF4 | in | Hep3B | 10 | qRTP | UGCCG | dTs; lnaGs; | KLF4:1858L15 |
| | | | | vitro | | | CR | CCCGG | dCs; lnaCs; | |
| | | | | | | | | CGCCA | dGs; lnaCs; | |
| | | | | | | | | | dCs; lnaCs; | |
| | | | | | | | | | dGs; | |
| | | | | | | | | | lnaGs; dCs; | |
| | | | | | | | | | lnaGs; | |
| | | | | | | | | | dCs; lnaCs; | |
| | | | | | | | | | dA-Sup | |
| KLF4-23 | 2.194347841 | 0.26432352 | KLF4 | in | Hep3B | 30 | qRTP | AAGAG | dAs; lnaAs; | KLF4:1756L15 |
| | | | | vitro | | | CR | GAGGC | dGs; lnaAs; | |
| | | | | | | | | UGACG | dGs; lnaGs; | |
| | | | | | | | | | dAs; | |
| | | | | | | | | | lnaGs; dGs; | |
| | | | | | | | | | lnaCs; | |
| | | | | | | | | | dTs; lnaGs; | |
| | | | | | | | | | dAs; lnaCs; | |
| | | | | | | | | | dG- | |
| | | | | | | | | | Sup | |
| KLF4-23 | 2.324111471 | 0.252252279 | KLF4 | in | Hep3B | 10 | qRTP | AAGAG | dAs; lnaAs; | KLF4:1756L15 |
| | | | | vitro | | | CR | GAGGC | dGs; lnaAs; | |
| | | | | | | | | UGACG | dGs; lnaGs; | |
| | | | | | | | | | dAs; | |
| | | | | | | | | | lnaGs; dGs; | |
| | | | | | | | | | lnaCs; | |
| | | | | | | | | | dTs; lnaGs; | |
| | | | | | | | | | dAs; lnaCs; | |
| | | | | | | | | | dG- | |
| | | | | | | | | | Sup | |
| KLF4-24 | 4.131114701 | 0.144074789 | KLF4 | in | Hep3B | 30 | qRTP | ACGAG | dAs; lnaCs; | KLF4:1738L15 |
| | | | | vitro | | | CR | GACAC | dGs; lnaAs; | |
| | | | | | | | | GGUGG | dGs; lnaGs; | |
| | | | | | | | | | dAs; | |
| | | | | | | | | | lnaCs; dAs; | |
| | | | | | | | | | lnaCs; | |
| | | | | | | | | | dGs; lnaGs; | |
| | | | | | | | | | dTs; lnaGs; | |
| | | | | | | | | | dG- | |
| | | | | | | | | | Sup | |
| KLF4-24 | 1.541614504 | 0.037635211 | KLF4 | in | Hep3B | 10 | qRTP | ACGAG | dAs; lnaCs; | KLF4:1738L15 |
| | | | | vitro | | | CR | GACAC | dGs; lnaAs; | |
| | | | | | | | | GGUGG | dGs; lnaGs; | |
| | | | | | | | | | dAs; | |
| | | | | | | | | | lnaCs; dAs; | |
| | | | | | | | | | lnaCs; | |
| | | | | | | | | | dGs; lnaGs; | |
| | | | | | | | | | dTs; lnaGs; | |
| | | | | | | | | | dG- | |
| | | | | | | | | | Sup | |
| KLF4-25 | 2.199326619 | 0.367281498 | KLF4 | in | Hep3B | 30 | qRTP | ACUCA | dAs; lnaCs; | KLF4:-360L15 |
| | | | | vitro | | | CR | CCGCCA | dTs; lnaCs; | |
| | | | | | | | | UUGU | dAs; lnaCs; | |
| | | | | | | | | | dCs; lnaGs; | |
| | | | | | | | | | dCs; | |
| | | | | | | | | | lnaCs; dAs; | |
| | | | | | | | | | lnaTs; | |
| | | | | | | | | | dTs; lnaGs; | |
| | | | | | | | | | dT-Sup | |
| KLF4-25 | 3.685279598 | 0.153873942 | KLF4 | in | Hep3B | 10 | qRTP | ACUCA | dAs; lnaCs; | KLF4:-360L15 |
| | | | | vitro | | | CR | CCGCCA | dTs; lnaCs; | |
| | | | | | | | | UUGU | dAs; lnaCs; | |
| | | | | | | | | | dCs; lnaGs; | |
| | | | | | | | | | dCs; | |
| | | | | | | | | | lnaCs; dAs; | |
| | | | | | | | | | lnaTs; | |
| | | | | | | | | | dTs; lnaGs; | |
| | | | | | | | | | dT-Sup | |
| KLF4-26 | 4.02225924 | 0.252588431 | KLF4 | in | Hep3B | 30 | qRTP | AAGCCC | dAs; lnaAs; | KLF4:-391L15 |
| | | | | vitro | | | CR | GCGAA | dGs; lnaCs; | |
| | | | | | | | | GACU | dCs; lnaCs; | |
| | | | | | | | | | dGs; lnaCs; | |
| | | | | | | | | | dGs; | |
| | | | | | | | | | lnaAs; dAs; | |
| | | | | | | | | | lnaGs; | |
| | | | | | | | | | dAs; lnaCs; | |
| | | | | | | | | | dT-Sup | |
| KLF4-26 | 4.190482762 | 0.361779058 | KLF4 | in | Hep3B | 10 | qRTP | AAGCCC | dAs; lnaAs; | KLF4:-391L15 |
| | | | | vitro | | | CR | GCGAA | dGs; lnaCs; | |
| | | | | | | | | GACU | dCs; lnaCs; | |
| | | | | | | | | | dGs; lnaCs; | |
| | | | | | | | | | dGs; | |
| | | | | | | | | | lnaAs; dAs; | |
| | | | | | | | | | lnaGs; | |
| | | | | | | | | | dAs; lnaCs; | |
| | | | | | | | | | dT-Sup | |
| KLF4-27 | 5.181353774 | 0.868040064 | KLF4 | in | Hep3B | 30 | qRTP | UCCCU | dTs; lnaCs; | KLF4:-7686U15 |
| | | | | vitro | | | CR | GGGUC | dCs; lnaCs; | |
| | | | | | | | | GAAGC | dTs; lnaGs; | |
| | | | | | | | | | dGs; | |
| | | | | | | | | | lnaGs; dTs; | |
| | | | | | | | | | lnaCs; dGs; | |
| | | | | | | | | | lnaAs; | |
| | | | | | | | | | dAs; lnaGs; | |
| | | | | | | | | | dC-Sup | |
| KLF4-27 | 4.180458462 | 0.328719976 | KLF4 | in | Hep3B | 10 | qRTP | UCCCU | dTs; lnaCs; | KLF4:-7686U15 |
| | | | | vitro | | | CR | GGGUC | dCs; lnaCs; | |
| | | | | | | | | GAAGC | dTs; lnaGs; | |
| | | | | | | | | | dGs; | |
| | | | | | | | | | lnaGs; dTs; | |
| | | | | | | | | | lnaCs; dGs; | |
| | | | | | | | | | lnaAs; | |
| | | | | | | | | | dAs; lnaGs; | |
| | | | | | | | | | dC-Sup | |
| KLF4-28 | 2.911170886 | 0.53902997 | KLF4 | in | Hep3B | 30 | qRTP | ACGCG | dAs; lnaCs; | KLF4:-422U15 |
| | | | | vitro | | | CR | UGACC | dGs; lnaCs; | |
| | | | | | | | | GUGCC | dGs; lnaTs; | |
| | | | | | | | | | dGs; lnaAs; | |
| | | | | | | | | | dCs; | |
| | | | | | | | | | lnaCs; dGs; | |
| | | | | | | | | | lnaTs; | |
| | | | | | | | | | dGs; lnaCs; | |
| | | | | | | | | | dC-Sup | |
| KLF4-28 | 2.594509717 | 0.114707006 | KLF4 | in | Hep3B | 10 | qRTP | ACGCG | dAs; lnaCs; | KLF4:-422U15 |
| | | | | vitro | | | CR | UGACC | dGs; lnaCs; | |
| | | | | | | | | GUGCC | dGs; lnaTs; | |
| | | | | | | | | | dGs; lnaAs; | |
| | | | | | | | | | dCs; | |
| | | | | | | | | | lnaCs; dGs; | |
| | | | | | | | | | lnaTs; | |
| | | | | | | | | | dGs; lnaCs; | |
| | | | | | | | | | dC-Sup | |
| KLF4-29 | NA | NA | KLF4 | NA | NA | 0 | NA | CACCAG | dCs; lnaAs; | KLF4:-395U15 |
| | | | | | | | | UCUUC | dCs; lnaCs; | |
| | | | | | | | | GCGG | dAs; lnaGs; | |
| | | | | | | | | | dTs; lnaCs; | |
| | | | | | | | | | dTs; | |
| | | | | | | | | | lnaTs; dCs; | |
| | | | | | | | | | lnaGs; dCs; | |
| | | | | | | | | | lnaGs; | |
| | | | | | | | | | dG-Sup | |
| KLF4-30 | 3.638972966 | 0.477619169 | KLF4 | in | Hep3B | 30 | qRTP | ACAAU | dAs; lnaCs; | KLF4:-360U15 |
| | | | | vitro | | | CR | GGCGG | dAs; lnaAs; | |
| | | | | | | | | UGAGU | dTs; lnaGs; | |
| | | | | | | | | | dGs; | |
| | | | | | | | | | lnaCs; dGs; | |
| | | | | | | | | | lnaGs; dTs; | |
| | | | | | | | | | lnaGs; | |
| | | | | | | | | | dAs; lnaGs; | |
| | | | | | | | | | dT-Sup | |
| KLF4-30 | 5.241183054 | 0.359164074 | KLF4 | in | Hep3B | 10 | qRTP | ACAAU | dAs; lnaCs; | KLF4:-360U15 |
| | | | | vitro | | | CR | GGCGG | dAs; lnaAs; | |
| | | | | | | | | UGAGU | dTs; lnaGs; | |
| | | | | | | | | | dGs; | |
| | | | | | | | | | lnaCs; dGs; | |
| | | | | | | | | | lnaGs; dTs; | |
| | | | | | | | | | lnaGs; | |
| | | | | | | | | | dAs; lnaGs; | |
| | | | | | | | | | dT-Sup | |
| NKX2-1- | NA | NA | NKX2-1 | NA | NA | 0 | NA | UUCCU | dTs; lnaTs; | NKX2- |
| 1 | | | | | | | | CCUCU | dCs; lnaCs; | 1:304U15 |
| | | | | | | | | UCCUU | dTs; lnaCs; | |
| | | | | | | | | | dCs; lnaTs; | |
| | | | | | | | | | dCs; | |
| | | | | | | | | | lnaTs; dTs; | |
| | | | | | | | | | lnaCs; dCs; | |
| | | | | | | | | | lnaTs; | |
| | | | | | | | | | dTs-Sup | |
| NKX2-1- | NA | NA | NKX2-1 | NA | NA | 0 | NA | UUCCU | lnaTs; lnaTs; | NKX2- |
| 2 | | | | | | | | CCU | lnaCs; | 1:844U8 |
| | | | | | | | | | lnaCs; lnaTs; | |
| | | | | | | | | | lnaCs; | |
| | | | | | | | | | lnaCs; lnaTs- | |
| | | | | | | | | | Sup | |
| NKX2-1- | NA | NA | NKX2-1 | NA | NA | 0 | NA | AGCCG | dAs; lnaGs; | NKX2- |
| 3 | | | | | | | | CCGCC | dCs; lnaCs; | 1:327U15 |
| | | | | | | | | GAAUC | dGs; lnaCs; | |
| | | | | | | | | | dCs; lnaGs; | |
| | | | | | | | | | dCs; | |
| | | | | | | | | | lnaCs; dGs; | |
| | | | | | | | | | lnaAs; | |
| | | | | | | | | | dAs; lnaTs; | |
| | | | | | | | | | dCs- | |
| | | | | | | | | | Sup | |
| NKX2-1- | NA | NA | NKX2-1 | NA | NA | 0 | NA | AGCCG | lnaAs; lnaGs; | NKX2- |
| 4 | | | | | | | | CCGCC | lnaCs; | 1:327U15 |
| | | | | | | | | GAAUC | dCs; dGs; | |
| | | | | | | | | | dCs; dCs; | |
| | | | | | | | | | dGs; dCs; | |
| | | | | | | | | | dCs; dGs; | |
| | | | | | | | | | dAs; lnaAs; | |
| | | | | | | | | | lnaTs; lnaCs- | |
| | | | | | | | | | Sup | |
| NKX2-1- | NA | NA | NKX2-1 | NA | NA | 0 | NA | CCAAA | dCs; lnaCs; | NKX2- |
| 5 | | | | | | | | GCACAC | dAs; lnaAs; | 1:354U15 |
| | | | | | | | | GACU | dAs; lnaGs; | |
| | | | | | | | | | dCs; lnaAs; | |
| | | | | | | | | | dCs; | |
| | | | | | | | | | lnaAs; dCs; | |
| | | | | | | | | | lnaGs; | |
| | | | | | | | | | dAs; lnaCs; | |
| | | | | | | | | | dTs- | |
| | | | | | | | | | Sup | |
| NKX2-1- | NA | NA | NKX2-1 | NA | NA | 0 | NA | AAGCA | lnaAs; lnaAs; | NKX2- |
| 6 | | | | | | | | CACGAC | lnaGs; | 1:357U15 |
| | | | | | | | | UCCG | dCs; dAs; | |
| | | | | | | | | | dCs; dAs; | |
| | | | | | | | | | dCs; dGs; | |
| | | | | | | | | | dAs; dCs; | |
| | | | | | | | | | dTs; lnaCs; | |
| | | | | | | | | | lnaCs; lnaGs- | |
| | | | | | | | | | Sup | |
| NKX2-1- | NA | NA | NKX2-1 | NA | NA | 0 | NA | AGUGU | dAs; lnaGs; | NKX2- |
| 7 | | | | | | | | CUGAC | dTs; lnaGs; | 1:377U15 |
| | | | | | | | | AUCUU | dTs; lnaCs; | |
| | | | | | | | | | dTs; lnaGs; | |
| | | | | | | | | | dAs; | |
| | | | | | | | | | lnaCs; dAs; | |
| | | | | | | | | | lnaTs; | |
| | | | | | | | | | dCs; lnaTs; | |
| | | | | | | | | | dTs- | |
| | | | | | | | | | Sup | |
| NKX2-1- | NA | NA | NKX2-1 | NA | NA | 0 | NA | UCUGC | dTs; lnaCs; | NKX2-1:-45U15 |
| 8 | | | | | | | | CUCUC | dTs; lnaGs; | |
| | | | | | | | | UCUCU | dCs; lnaCs; | |
| | | | | | | | | | dTs; lnaCs; | |
| | | | | | | | | | dTs; | |
| | | | | | | | | | lnaCs; dTs; | |
| | | | | | | | | | lnaCs; dTs; | |
| | | | | | | | | | lnaCs; | |
| | | | | | | | | | dTs-Sup | |
| NKX2-1- | NA | NA | NKX2-1 | NA | NA | 0 | NA | UCUCU | lnaTs; lnaCs; | NKX2- |
| 9 | | | | | | | | CUU | lnaTs; | 1:496U8 |
| | | | | | | | | | lnaCs; lnaTs; | |
| | | | | | | | | | lnaCs; | |
| | | | | | | | | | lnaTs; lnaTs- | |
| | | | | | | | | | Sup | |
| NKX2-1- | NA | NA | NKX2-1 | NA | NA | 0 | NA | UAAAA | dTs; lnaAs; | NKX2-1:-16U15 |
| 10 | | | | | | | | AUCCU | dAs; lnaAs; | |
| | | | | | | | | GACAA | dAs; lnaAs; | |
| | | | | | | | | | dTs; lnaCs; | |
| | | | | | | | | | dCs; | |
| | | | | | | | | | lnaTs; dGs; | |
| | | | | | | | | | lnaAs; | |
| | | | | | | | | | dCs; lnaAs; | |
| | | | | | | | | | dAs- | |
| | | | | | | | | | Sup | |
| NKX2-1- | NA | NA | NKX2-1 | NA | NA | 0 | NA | UUAAA | lnaTs; lnaTs; | NKX2- |
| 11 | | | | | | | | GGU | lnaAs; | 1:533U8 |
| | | | | | | | | | lnaAs; lnaAs; | |
| | | | | | | | | | lnaGs; | |
| | | | | | | | | | lnaGs; lnaTs- | |
| | | | | | | | | | Sup | |
| NKX2-1- | NA | NA | NKX2-1 | NA | NA | 0 | NA | UUAAA | lnaTs; lnaTs; | NKX2- |
| 12 | | | | | | | | GGUGU | lnaAs; | 1:6U15 |
| | | | | | | | | UUACC | dAs; dAs; | |
| | | | | | | | | | dGs; dGs; | |
| | | | | | | | | | dTs; dGs; | |
| | | | | | | | | | dTs; dTs; | |
| | | | | | | | | | dTs; lnaAs; | |
| | | | | | | | | | lnaCs; lnaCs- | |
| | | | | | | | | | Sup | |
| NKX2-1- | NA | NA | NKX2-1 | NA | NA | 0 | NA | UGUAA | dTs; lnaGs; | NKX2- |
| 13 | | | | | | | | GCUAA | dTs; lnaAs; | 1:33U15 |
| | | | | | | | | UUAUC | dAs; lnaGs; | |
| | | | | | | | | | dCs; lnaTs; | |
| | | | | | | | | | dAs; | |
| | | | | | | | | | lnaAs; dTs; | |
| | | | | | | | | | lnaTs; dAs; | |
| | | | | | | | | | lnaTs; | |
| | | | | | | | | | dCs-Sup | |
| NKX2-1- | NA | NA | NKX2-1 | NA | NA | 0 | NA | CGCAG | dCs; lnaGs; | NKX2-1:-1606U15 |
| 14 | | | | | | | | AGGAG | dCs; lnaAs; | |
| | | | | | | | | ACUAA | dGs; lnaAs; | |
| | | | | | | | | | dGs; | |
| | | | | | | | | | lnaGs; dAs; | |
| | | | | | | | | | lnaGs; | |
| | | | | | | | | | dAs; lnaCs; | |
| | | | | | | | | | dTs; lnaAs; | |
| | | | | | | | | | dAs- | |
| | | | | | | | | | Sup | |
| NKX2-1- | NA | NA | NKX2-1 | NA | NA | 0 | NA | UAAAA | dTs; lnaAs; | NKX2-1:-1594U15 |
| 15 | | | | | | | | CAGCU | dAs; lnaAs; | |
| | | | | | | | | AAGGA | dAs; lnaCs; | |
| | | | | | | | | | dAs; lnaGs; | |
| | | | | | | | | | dCs; | |
| | | | | | | | | | lnaTs; dAs; | |
| | | | | | | | | | lnaAs; dGs; | |
| | | | | | | | | | lnaGs; | |
| | | | | | | | | | dAs-Sup | |
| NKX2-1- | NA | NA | NKX2-1 | NA | NA | 0 | NA | AACAA | lnaAs; lnaAs; | NKX2-1:-1571U15 |
| 16 | | | | | | | | AAACA | lnaCs; | |
| | | | | | | | | AUGAU | dAs; dAs; | |
| | | | | | | | | | dAs; dAs; | |
| | | | | | | | | | dAs; dCs; | |
| | | | | | | | | | dAs; dAs; | |
| | | | | | | | | | dTs; lnaGs; | |
| | | | | | | | | | lnaAs; lnaTs- | |
| | | | | | | | | | Sup | |
| NKX2-1- | NA | NA | NKX2-1 | NA | NA | 0 | NA | ACCGG | dAs; lnaCs; | NKX2- |
| 17 | | | | | | | | CACCGC | dCs; lnaGs; | 1:2076L15 |
| | | | | | | | | CACG | dGs; lnaCs; | |
| | | | | | | | | | dAs; | |
| | | | | | | | | | lnaCs; dCs; | |
| | | | | | | | | | lnaGs; dCs; | |
| | | | | | | | | | lnaCs; | |
| | | | | | | | | | dAs; lnaCs; | |
| | | | | | | | | | dGs- | |
| | | | | | | | | | Sup | |
| NKX2-1- | NA | NA | NKX2-1 | NA | NA | 0 | NA | GCUGA | dGs; lnaCs; | NKX2- |
| 18 | | | | | | | | GCCUG | dTs; lnaGs; | 1:2045L15 |
| | | | | | | | | UUGCU | dAs; lnaGs; | |
| | | | | | | | | | dCs; | |
| | | | | | | | | | lnaCs; dTs; | |
| | | | | | | | | | lnaGs; dTs; | |
| | | | | | | | | | lnaTs; | |
| | | | | | | | | | dGs; lnaCs; | |
| | | | | | | | | | dTs- | |
| | | | | | | | | | Sup | |
| NKX2-1- | NA | NA | NKX2-1 | NA | NA | 0 | NA | CCGCC | dCs; lnaCs; | NKX2- |
| 19 | | | | | | | | GCCGC | dGs; lnaCs; | 1:2001L15 |
| | | | | | | | | CGCUG | dCs; lnaGs; | |
| | | | | | | | | | dCs; lnaCs; | |
| | | | | | | | | | dGs; | |
| | | | | | | | | | lnaCs; dCs; | |
| | | | | | | | | | lnaGs; dCs; | |
| | | | | | | | | | lnaTs; | |
| | | | | | | | | | dGs-Sup | |
| NKX2-1- | NA | NA | NKX2-1 | NA | NA | 0 | NA | UGUCC | dTs; lnaGs; | NKX2- |
| 20 | | | | | | | | UGCUG | dTs; lnaCs; | 1:1988L15 |
| | | | | | | | | CAGUU | dCs; lnaTs; | |
| | | | | | | | | | dGs; lnaCs; | |
| | | | | | | | | | dTs; | |
| | | | | | | | | | lnaGs; dCs; | |
| | | | | | | | | | lnaAs; | |
| | | | | | | | | | dGs; lnaTs; | |
| | | | | | | | | | dTs- | |
| | | | | | | | | | Sup | |
| NKX2-1- | NA | NA | NKX2-1 | NA | NA | 0 | NA | UCUGC | dTs; lnaCs; | NKX2-1:-545L15 |
| 21 | | | | | | | | CUCUC | dTs; lnaGs; | |
| | | | | | | | | UUCUG | dCs; lnaCs; | |
| | | | | | | | | | dTs; lnaCs; | |
| | | | | | | | | | dTs; | |
| | | | | | | | | | lnaCs; dTs; | |
| | | | | | | | | | lnaTs; dCs; | |
| | | | | | | | | | lnaTs; | |
| | | | | | | | | | dGs-Sup | |
| NKX2-1- | NA | NA | NKX2-1 | NA | NA | 0 | NA | CGUCA | dCs; lnaGs; | NKX2-1:-564L15 |
| 22 | | | | | | | | GAGGG | dTs; lnaCs; | |
| | | | | | | | | ACACC | dAs; lnaGs; | |
| | | | | | | | | | dAs; lnaGs; | |
| | | | | | | | | | dGs; | |
| | | | | | | | | | lnaGs; dAs; | |
| | | | | | | | | | lnaCs; | |
| | | | | | | | | | dAs; lnaCs; | |
| | | | | | | | | | dCs- | |
| | | | | | | | | | Sup | |
| NKX2-1- | NA | NA | NKX2-1 | NA | NA | 0 | NA | ACCGG | dAs; lnaCs; | NKX2-1:-604L15 |
| 23 | | | | | | | | AGAGA | dCs; lnaGs; | |
| | | | | | | | | AUCCG | dGs; lnaAs; | |
| | | | | | | | | | dGs; | |
| | | | | | | | | | lnaAs; dGs; | |
| | | | | | | | | | lnaAs; | |
| | | | | | | | | | dAs; lnaTs; | |
| | | | | | | | | | dCs; lnaCs; | |
| | | | | | | | | | dGs- | |
| | | | | | | | | | Sup | |
| NKX2-1- | NA | NA | NKX2-1 | NA | NA | 0 | NA | AUUAG | dAs; lnaTs; | NKX2- |
| 24 | | | | | | | | AAGCU | dTs; lnaAs; | 1:3249L15 |
| | | | | | | | | UCUUA | dGs; lnaAs; | |
| | | | | | | | | | dAs; | |
| | | | | | | | | | lnaGs; dCs; | |
| | | | | | | | | | lnaTs; | |
| | | | | | | | | | dTs; lnaCs; | |
| | | | | | | | | | dTs; lnaTs; | |
| | | | | | | | | | dAs- | |
| | | | | | | | | | Sup | |
| NKX2-1- | NA | NA | NKX2-1 | NA | NA | 0 | NA | UAAGC | dTs; lnaAs; | NKX2- |
| 25 | | | | | | | | CAAAU | dAs; lnaGs; | 1:3223L15 |
| | | | | | | | | AUCUA | dCs; lnaCs; | |
| | | | | | | | | | dAs; lnaAs; | |
| | | | | | | | | | dAs; | |
| | | | | | | | | | lnaTs; dAs; | |
| | | | | | | | | | lnaTs; dCs; | |
| | | | | | | | | | lnaTs; | |
| | | | | | | | | | dAs-Sup | |
| NKX2-1- | NA | NA | NKX2-1 | NA | NA | 0 | NA | AACAG | dAs; lnaAs; | NKX2- |
| 26 | | | | | | | | AAAAA | dCs; lnaAs; | 1:3198L15 |
| | | | | | | | | GACUG | dGs; lnaAs; | |
| | | | | | | | | | dAs; | |
| | | | | | | | | | lnaAs; dAs; | |
| | | | | | | | | | lnaAs; | |
| | | | | | | | | | dGs; lnaAs; | |
| | | | | | | | | | dCs; lnaTs; | |
| | | | | | | | | | dGs- | |
| | | | | | | | | | Sup | |
| NKX2-1- | NA | NA | NKX2-1 | NA | NA | 0 | NA | UACCA | dTs; lnaAs; | NKX2- |
| 27 | | | | | | | | AACUG | dCs; lnaCs; | 1:3173L15 |
| | | | | | | | | CCAAA | dAs; lnaAs; | |
| | | | | | | | | | dAs; lnaCs; | |
| | | | | | | | | | dTs; | |
| | | | | | | | | | lnaGs; dCs; | |
| | | | | | | | | | lnaCs; | |
| | | | | | | | | | dAs; lnaAs; | |
| | | | | | | | | | dAs- | |
| | | | | | | | | | Sup | |
| NKX2-1- | NA | NA | NKX2-1 | NA | NA | 0 | NA | UUGAC | dTs; lnaTs; | NKX2- |
| 28 | | | | | | | | AGCGU | dGs; lnaAs; | 1:3040L15 |
| | | | | | | | | UUUAC | dCs; lnaAs; | |
| | | | | | | | | | dGs; lnaCs; | |
| | | | | | | | | | dGs; | |
| | | | | | | | | | lnaTs; dTs; | |
| | | | | | | | | | lnaTs; dTs; | |
| | | | | | | | | | lnaAs; | |
| | | | | | | | | | dCs-Sup | |
| NKX2-1- | NA | NA | NKX2-1 | NA | NA | 0 | NA | UACAA | dTs; lnaAs; | NKX2- |
| 29 | | | | | | | | GUUCA | dCs; lnaAs; | 1:3022L15 |
| | | | | | | | | CAUUA | dAs; lnaGs; | |
| | | | | | | | | | dTs; lnaTs; | |
| | | | | | | | | | dCs; | |
| | | | | | | | | | lnaAs; dCs; | |
| | | | | | | | | | lnaAs; | |
| | | | | | | | | | dTs; lnaTs; | |
| | | | | | | | | | dAs- | |
| | | | | | | | | | Sup | |
| NKX2-1- | NA | NA | NKX2-1 | NA | NA | 0 | NA | CAAAC | dCs; lnaAs; | NKX2- |
| 30 | | | | | | | | UAUUU | dAs; lnaAs; | 1:3005L15 |
| | | | | | | | | UCGCG | dCs; lnaTs; | |
| | | | | | | | | | dAs; lnaTs; | |
| | | | | | | | | | dTs; | |
| | | | | | | | | | lnaTs; dTs; | |
| | | | | | | | | | lnaCs; dGs; | |
| | | | | | | | | | lnaCs; | |
| | | | | | | | | | dGs-Sup | |
| RPS14- | 0.97943682 | 0.074131958 | RPS14 | in | Hep3B | 30 | qRTP | UUCUC | dTs; lnaTs; | RPS14:93266U15 |
| 1 | | | | vitro | | | CR | UUGGA | dCs; lnaTs; | |
| | | | | | | | | CUUAA | dCs; lnaTs; | |
| | | | | | | | | | dTs; lnaGs; | |
| | | | | | | | | | dGs; | |
| | | | | | | | | | lnaAs; dCs; | |
| | | | | | | | | | lnaTs; | |
| | | | | | | | | | dTs; lnaAs; | |
| | | | | | | | | | dA-Sup | |
| RPS14- | 0.918387884 | 0.037521592 | RPS14 | in | Hep3B | 10 | qRTP | UUCUC | dTs; lnaTs; | RPS14:93266U15 |
| 1 | | | | vitro | | | CR | UUGGA | dCs; lnaTs; | |
| | | | | | | | | CUUAA | dCs; lnaTs; | |
| | | | | | | | | | dTs; lnaGs; | |
| | | | | | | | | | dGs; | |
| | | | | | | | | | lnaAs; dCs; | |
| | | | | | | | | | lnaTs; | |
| | | | | | | | | | dTs; lnaAs; | |
| | | | | | | | | | dA-Sup | |
| RPS14- | 1.066259079 | 0.119579832 | RPS14 | in | Hep3B | 30 | qRTP | ACUGU | dAs; lnaCs; | RPS14:36228U15 |
| 2 | | | | vitro | | | CR | UCCCA | dTs; lnaGs; | |
| | | | | | | | | UACAU | dTs; lnaTs; | |
| | | | | | | | | | dCs; lnaCs; | |
| | | | | | | | | | dCs; | |
| | | | | | | | | | lnaAs; dTs; | |
| | | | | | | | | | lnaAs; dCs; | |
| | | | | | | | | | lnaAs; | |
| | | | | | | | | | dT-Sup | |
| RPS14- | 1.214837911 | 0.107351023 | RPS14 | in | Hep3B | 10 | qRTP | ACUGU | dAs; lnaCs; | RPS14:36228U15 |
| 2 | | | | vitro | | | CR | UCCCA | dTs; lnaGs; | |
| | | | | | | | | UACAU | dTs; lnaTs; | |
| | | | | | | | | | dCs; lnaCs; | |
| | | | | | | | | | dCs; | |
| | | | | | | | | | lnaAs; dTs; | |
| | | | | | | | | | lnaAs; dCs; | |
| | | | | | | | | | lnaAs; | |
| | | | | | | | | | dT-Sup | |
| RPS14- | 1.425427287 | 0.127980113 | RPS14 | in | Hep3B | 30 | qRTP | AAAUA | dAs; lnaAs; | RPS14:-39238L15 |
| 3 | | | | vitro | | | CR | UCUGG | dAs; lnaTs; | |
| | | | | | | | | ACUGU | dAs; lnaTs; | |
| | | | | | | | | | dCs; lnaTs; | |
| | | | | | | | | | dGs; | |
| | | | | | | | | | lnaGs; dAs; | |
| | | | | | | | | | lnaCs; | |
| | | | | | | | | | dTs; lnaGs; | |
| | | | | | | | | | dT-Sup | |
| RPS14- | 1.448108306 | 0.067476418 | RPS14 | in | Hep3B | 10 | qRTP | AAAUA | dAs; lnaAs; | RPS14:-39238L15 |
| 3 | | | | vitro | | | CR | UCUGG | dAs; lnaTs; | |
| | | | | | | | | ACUGU | dAs; lnaTs; | |
| | | | | | | | | | dCs; lnaTs; | |
| | | | | | | | | | dGs; | |
| | | | | | | | | | lnaGs; dAs; | |
| | | | | | | | | | lnaCs; | |
| | | | | | | | | | dTs; lnaGs; | |
| | | | | | | | | | dT-Sup | |
| RPS14- | 1.355560049 | 0.042105337 | RPS14 | in | Hep3B | 30 | qRTP | ACUGU | dAs; lnaCs; | RPS14:-39248L15 |
| 4 | | | | vitro | | | CR | UUGGA | dTs; lnaGs; | |
| | | | | | | | | GGACU | dTs; lnaTs; | |
| | | | | | | | | | dTs; lnaGs; | |
| | | | | | | | | | dGs; | |
| | | | | | | | | | lnaAs; dGs; | |
| | | | | | | | | | lnaGs; | |
| | | | | | | | | | dAs; lnaCs; | |
| | | | | | | | | | dT- | |
| | | | | | | | | | Sup | |
| RPS14- | 1.281875446 | 0.077969705 | RPS14 | in | Hep3B | 10 | qRTP | ACUGU | dAs; lnaCs; | RPS14:-39248L15 |
| 4 | | | | vitro | | | CR | UUGGA | dTs; lnaGs; | |
| | | | | | | | | GGACU | dTs; lnaTs; | |
| | | | | | | | | | dTs; lnaGs; | |
| | | | | | | | | | dGs; | |
| | | | | | | | | | lnaAs; dGs; | |
| | | | | | | | | | lnaGs; | |
| | | | | | | | | | dAs; lnaCs; | |
| | | | | | | | | | dT- | |
| | | | | | | | | | Sup | |
| RPS14- | 1.405415164 | 0.103180028 | RPS14 | in | Hep3B | 30 | qRTP | UUGGA | dTs; lnaTs; | RPS14:-39262L15 |
| 5 | | | | vitro | | | CR | CAUUC | dGs; lnaGs; | |
| | | | | | | | | UUUAC | dAs; lnaCs; | |
| | | | | | | | | | dAs; | |
| | | | | | | | | | lnaTs; dTs; | |
| | | | | | | | | | lnaCs; dTs; | |
| | | | | | | | | | lnaTs; | |
| | | | | | | | | | dTs; lnaAs; | |
| | | | | | | | | | dC-Sup | |
| RPS14- | 1.49587328 | 0.070130404 | RPS14 | in | Hep3B | 10 | qRTP | UUGGA | dTs; lnaTs; | RPS14:-39262L15 |
| 5 | | | | vitro | | | CR | CAUUC | dGs; lnaGs; | |
| | | | | | | | | UUUAC | dAs; lnaCs; | |
| | | | | | | | | | dAs; | |
| | | | | | | | | | lnaTs; dTs; | |
| | | | | | | | | | lnaCs; dTs; | |
| | | | | | | | | | lnaTs; | |
| | | | | | | | | | dTs; lnaAs; | |
| | | | | | | | | | dC-Sup | |
| RPS14- | 1.282188181 | 0.101878422 | RPS14 | in | Hep3B | 30 | qRTP | UUACU | dTs; lnaTs; | RPS14:-39273L15 |
| 6 | | | | vitro | | | CR | UGAAA | dAs; lnaCs; | |
| | | | | | | | | UGGAA | dTs; lnaTs; | |
| | | | | | | | | | dGs; lnaAs; | |
| | | | | | | | | | dAs; | |
| | | | | | | | | | lnaAs; dTs; | |
| | | | | | | | | | lnaGs; dGs; | |
| | | | | | | | | | lnaAs; | |
| | | | | | | | | | dA-Sup | |
| RPS14- | 1.336820998 | 0.095990468 | RPS14 | in | Hep3B | 10 | qRTP | UUACU | dTs; lnaTs; | RPS14:-39273L15 |
| 6 | | | | vitro | | | CR | UGAAA | dAs; lnaCs; | |
| | | | | | | | | UGGAA | dTs; lnaTs; | |
| | | | | | | | | | dGs; lnaAs; | |
| | | | | | | | | | dAs; | |
| | | | | | | | | | lnaAs; dTs; | |
| | | | | | | | | | lnaGs; dGs; | |
| | | | | | | | | | lnaAs; | |
| | | | | | | | | | dA-Sup | |
| RPS14- | 1.192529151 | 0.090407065 | RPS14 | in | Hep3B | 30 | qRTP | UUGGC | dTs; lnaTs; | RPS14:-39137L15 |
| 7 | | | | vitro | | | CR | CGCCC | dGs; lnaGs; | |
| | | | | | | | | UUCCA | dCs; lnaCs; | |
| | | | | | | | | | dGs; lnaCs; | |
| | | | | | | | | | dCs; | |
| | | | | | | | | | lnaCs; dTs; | |
| | | | | | | | | | lnaTs; dCs; | |
| | | | | | | | | | lnaCs; | |
| | | | | | | | | | dA-Sup | |
| RPS14- | 1.165175644 | 0.07720115 | RPS14 | in | Hep3B | 10 | qRTP | UUGGC | dTs; lnaTs; | RPS14:-39137L15 |
| 7 | | | | vitro | | | CR | CGCCC | dGs; lnaGs; | |
| | | | | | | | | UUCCA | dCs; lnaCs; | |
| | | | | | | | | | dGs; lnaCs; | |
| | | | | | | | | | dCs; | |
| | | | | | | | | | lnaCs; dTs; | |
| | | | | | | | | | lnaTs; dCs; | |
| | | | | | | | | | lnaCs; | |
| | | | | | | | | | dA-Sup | |
| RPS14- | 1.129916644 | 0.243291039 | RPS14 | in | Hep3B | 30 | qRTP | CAUGC | dCs; lnaAs; | RPS14:-39150L15 |
| 8 | | | | vitro | | | CR | UUUGG | dTs; lnaGs; | |
| | | | | | | | | GACCA | dCs; lnaTs; | |
| | | | | | | | | | dTs; lnaTs; | |
| | | | | | | | | | dGs; | |
| | | | | | | | | | lnaGs; dGs; | |
| | | | | | | | | | lnaAs; | |
| | | | | | | | | | dCs; lnaCs; | |
| | | | | | | | | | dA-Sup | |
| RPS14- | 1.124387196 | 0.241300175 | RPS14 | in | Hep3B | 10 | qRTP | CAUGC | dCs; lnaAs; | RPS14:-39150L15 |
| 8 | | | | vitro | | | CR | UUUGG | dTs; lnaGs; | |
| | | | | | | | | GACCA | dCs; lnaTs; | |
| | | | | | | | | | dTs; lnaTs; | |
| | | | | | | | | | dGs; | |
| | | | | | | | | | lnaGs; dGs; | |
| | | | | | | | | | lnaAs; | |
| | | | | | | | | | dCs; lnaCs; | |
| | | | | | | | | | dA-Sup | |
| RPS14- | 1.172082145 | 0.312620627 | RPS14 | in | Hep3B | 30 | qRTP | GACCA | dGs; lnaAs; | RPS14:-39160L15 |
| 9 | | | | vitro | | | CR | AAGCC | dCs; lnaCs; | |
| | | | | | | | | AGGCC | dAs; lnaAs; | |
| | | | | | | | | | dAs; lnaGs; | |
| | | | | | | | | | dCs; | |
| | | | | | | | | | lnaCs; dAs; | |
| | | | | | | | | | lnaGs; | |
| | | | | | | | | | dGs; lnaCs; | |
| | | | | | | | | | dC-Sup | |
| RPS14- | 1.312546123 | 0.011513554 | RPS14 | in | Hep3B | 10 | qRTP | GACCA | dGs; lnaAs; | RPS14:-39160L15 |
| 9 | | | | vitro | | | CR | AAGCC | dCs; lnaCs; | |
| | | | | | | | | AGGCC | dAs; lnaAs; | |
| | | | | | | | | | dAs; lnaGs; | |
| | | | | | | | | | dCs; | |
| | | | | | | | | | lnaCs; dAs; | |
| | | | | | | | | | lnaGs; | |
| | | | | | | | | | dGs; lnaCs; | |
| | | | | | | | | | dC-Sup | |
| RPS14- | 1.304884264 | 0.240483956 | RPS14 | in | Hep3B | 30 | qRTP | CUCUU | dCs; lnaTs; | RPS14:155L15 |
| 10 | | | | vitro | | | CR | GCCCG | dCs; lnaTs; | |
| | | | | | | | | GCACC | dTs; lnaGs; | |
| | | | | | | | | | dCs; lnaCs; | |
| | | | | | | | | | dCs; | |
| | | | | | | | | | lnaGs; dGs; | |
| | | | | | | | | | lnaCs; | |
| | | | | | | | | | dAs; lnaCs; | |
| | | | | | | | | | dC-Sup | |
| RPS14- | 1.224737911 | 0.200380127 | RPS14 | in | Hep3B | 10 | qRTP | CUCUU | dCs; lnaTs; | RPS14:155L15 |
| 10 | | | | vitro | | | CR | GCCCG | dCs; lnaTs; | |
| | | | | | | | | GCACC | dTs; lnaGs; | |
| | | | | | | | | | dCs; lnaCs; | |
| | | | | | | | | | dCs; | |
| | | | | | | | | | lnaGs; dGs; | |
| | | | | | | | | | lnaCs; | |
| | | | | | | | | | dAs; lnaCs; | |
| | | | | | | | | | dC-Sup | |
| RPS14- | 1.15989256 | 0.151689374 | RPS14 | in | Hep3B | 30 | qRTP | AAAGA | dAs; lnaAs; | RPS14:123L15 |
| 11 | | | | vitro | | | CR | CCCCCG | dAs; lnaGs; | |
| | | | | | | | | UCUC | dAs; lnaCs; | |
| | | | | | | | | | dCs; | |
| | | | | | | | | | lnaCs; dCs; | |
| | | | | | | | | | lnaCs; dGs; | |
| | | | | | | | | | lnaTs; | |
| | | | | | | | | | dCs; lnaTs; | |
| | | | | | | | | | dC-Sup | |
| RPS14- | 1.036256132 | 0.123505968 | RPS14 | in | Hep3B | 10 | qRTP | AAAGA | dAs; lnaAs; | RPS14:123L15 |
| 11 | | | | vitro | | | CR | CCCCCG | dAs; lnaGs; | |
| | | | | | | | | UCUC | dAs; lnaCs; | |
| | | | | | | | | | dCs; | |
| | | | | | | | | | lnaCs; dCs; | |
| | | | | | | | | | lnaCs; dGs; | |
| | | | | | | | | | lnaTs; | |
| | | | | | | | | | dCs; lnaTs; | |
| | | | | | | | | | dC-Sup | |
| RPS14- | 1.007267864 | 0.178206051 | RPS14 | in | Hep3B | 30 | qRTP | ACAGG | dAs; lnaCs; | RPS14:94L15 |
| 12 | | | | vitro | | | CR | GUCCC | dAs; lnaGs; | |
| | | | | | | | | CUCGC | dGs; lnaGs; | |
| | | | | | | | | | dTs; | |
| | | | | | | | | | lnaCs; dCs; | |
| | | | | | | | | | lnaCs; dCs; | |
| | | | | | | | | | lnaTs; | |
| | | | | | | | | | dCs; lnaGs; | |
| | | | | | | | | | dC-Sup | |
| RPS14- | 1.027770695 | 0.196075211 | RPS14 | in | Hep3B | 10 | qRTP | ACAGG | dAs; lnaCs; | RPS14:94L15 |
| 12 | | | | vitro | | | CR | GUCCC | dAs; lnaGs; | |
| | | | | | | | | CUCGC | dGs; lnaGs; | |
| | | | | | | | | | dTs; | |
| | | | | | | | | | lnaCs; dCs; | |
| | | | | | | | | | lnaCs; dCs; | |
| | | | | | | | | | lnaTs; | |
| | | | | | | | | | dCs; lnaGs; | |
| | | | | | | | | | dC-Sup | |
| RPS14- | 1.054317299 | 0.037265786 | RPS14 | in | Hep3B | 30 | qRTP | GGCAU | dGs; lnaGs; | RPS14:83U15 |
| 13 | | | | vitro | | | CR | CCUGC | dCs; lnaAs; | |
| | | | | | | | | GGCGA | dTs; lnaCs; | |
| | | | | | | | | | dCs; lnaTs; | |
| | | | | | | | | | dGs; | |
| | | | | | | | | | lnaCs; dGs; | |
| | | | | | | | | | lnaGs; | |
| | | | | | | | | | dCs; lnaGs; | |
| | | | | | | | | | dA- | |
| | | | | | | | | | Sup | |
| RPS14- | 1.272208798 | 0.024792257 | RPS14 | in | Hep3B | 10 | qRTP | GGCAU | dGs; lnaGs; | RPS14:83U15 |
| 13 | | | | vitro | | | CR | CCUGC | dCs; lnaAs; | |
| | | | | | | | | GGCGA | dTs; lnaCs; | |
| | | | | | | | | | dCs; lnaTs; | |
| | | | | | | | | | dGs; | |
| | | | | | | | | | lnaCs; dGs; | |
| | | | | | | | | | lnaGs; | |
| | | | | | | | | | dCs; lnaGs; | |
| | | | | | | | | | dA- | |
| | | | | | | | | | Sup | |
| RPS14- | 1.213474592 | 0.055604443 | RPS14 | in | Hep3B | 30 | qRTP | UUCCG | dTs; lnaTs; | RPS14:136U15 |
| 14 | | | | vitro | | | CR | UGGGA | dCs; lnaCs; | |
| | | | | | | | | ACCGA | dGs; lnaTs; | |
| | | | | | | | | | dGs; lnaGs; | |
| | | | | | | | | | dGs; | |
| | | | | | | | | | lnaAs; dAs; | |
| | | | | | | | | | lnaCs; | |
| | | | | | | | | | dCs; lnaGs; | |
| | | | | | | | | | dA-Sup | |
| RPS14- | 1.238088818 | 0.049326338 | RPS14 | in | Hep3B | 10 | qRTP | UUCCG | dTs; lnaTs; | RPS14:136U15 |
| 14 | | | | vitro | | | CR | UGGGA | dCs; lnaCs; | |
| | | | | | | | | ACCGA | dGs; lnaTs; | |
| | | | | | | | | | dGs; lnaGs; | |
| | | | | | | | | | dGs; | |
| | | | | | | | | | lnaAs; dAs; | |
| | | | | | | | | | lnaCs; | |
| | | | | | | | | | dCs; lnaGs; | |
| | | | | | | | | | dA-Sup | |
| RPS14- | 1.320843386 | 0.081098322 | RPS14 | in | Hep3B | 30 | qRTP | GUGCC | dGs; lnaTs; | RPS14:156U15 |
| 15 | | | | vitro | | | CR | GGGCA | dGs; lnaCs; | |
| | | | | | | | | AGAGA | dCs; lnaGs; | |
| | | | | | | | | | dGs; | |
| | | | | | | | | | lnaGs; dCs; | |
| | | | | | | | | | lnaAs; dAs; | |
| | | | | | | | | | lnaGs; | |
| | | | | | | | | | dAs; lnaGs; | |
| | | | | | | | | | dA-Sup | |
| RPS14- | 1.040255793 | 0.029585998 | RPS14 | in | Hep3B | 10 | qRTP | GUGCC | dGs; lnaTs; | RPS14:156U15 |
| 15 | | | | vitro | | | CR | GGGCA | dGs; lnaCs; | |
| | | | | | | | | AGAGA | dCs; lnaGs; | |
| | | | | | | | | | dGs; | |
| | | | | | | | | | lnaGs; dCs; | |
| | | | | | | | | | lnaAs; dAs; | |
| | | | | | | | | | lnaGs; | |
| | | | | | | | | | dAs; lnaGs; | |
| | | | | | | | | | dA-Sup | |
| RPS14- | 1.069060712 | 0.098411184 | RPS14 | in | Hep3B | 30 | qRTP | AGAGU | dAs; lnaGs; | RPS14:516L15 |
| 16 | | | | vitro | | | CR | UUUCC | dAs; lnaGs; | |
| | | | | | | | | CUGCU | dTs; lnaTs; | |
| | | | | | | | | | dTs; lnaTs; | |
| | | | | | | | | | dCs; | |
| | | | | | | | | | lnaCs; dCs; | |
| | | | | | | | | | lnaTs; dGs; | |
| | | | | | | | | | lnaCs; | |
| | | | | | | | | | dT-Sup | |
| RPS14- | 1.678674573 | 0.075590468 | RPS14 | in | Hep3B | 10 | qRTP | AGAGU | dAs; lnaGs; | RPS14:516L15 |
| 16 | | | | vitro | | | CR | UUUCC | dAs; lnaGs; | |
| | | | | | | | | CUGCU | dTs; lnaTs; | |
| | | | | | | | | | dTs; lnaTs; | |
| | | | | | | | | | dCs; | |
| | | | | | | | | | lnaCs; dCs; | |
| | | | | | | | | | lnaTs; dGs; | |
| | | | | | | | | | lnaCs; | |
| | | | | | | | | | dT-Sup | |
| RPS14- | 1.720909548 | 0.026761595 | RPS14 | in | Hep3B | 30 | qRTP | AUGAU | dAs; lnaTs; | RPS14:489L15 |
| 17 | | | | vitro | | | CR | CACUA | dGs; lnaAs; | |
| | | | | | | | | CAAAC | dTs; lnaCs; | |
| | | | | | | | | | dAs; lnaCs; | |
| | | | | | | | | | dTs; | |
| | | | | | | | | | lnaAs; dCs; | |
| | | | | | | | | | lnaAs; | |
| | | | | | | | | | dAs; lnaAs; | |
| | | | | | | | | | dC-Sup | |
| RPS14- | 1.279642408 | 0.026758104 | RPS14 | in | Hep3B | 10 | qRTP | AUGAU | dAs; lnaTs; | RPS14:489L15 |
| 17 | | | | vitro | | | CR | CACUA | dGs; lnaAs; | |
| | | | | | | | | CAAAC | dTs; lnaCs; | |
| | | | | | | | | | dAs; lnaCs; | |
| | | | | | | | | | dTs; | |
| | | | | | | | | | lnaAs; dCs; | |
| | | | | | | | | | lnaAs; | |
| | | | | | | | | | dAs; lnaAs; | |
| | | | | | | | | | dC-Sup | |
| RPS14- | 1.289997823 | 0.123255182 | RPS14 | in | Hep3B | 30 | qRTP | AUGGG | dAs; lnaTs; | RPS14:472L15 |
| 18 | | | | vitro | | | CR | AUCGG | dGs; lnaGs; | |
| | | | | | | | | UGCUA | dGs; lnaAs; | |
| | | | | | | | | | dTs; | |
| | | | | | | | | | lnaCs; dGs; | |
| | | | | | | | | | lnaGs; | |
| | | | | | | | | | dTs; lnaGs; | |
| | | | | | | | | | dCs; lnaTs; | |
| | | | | | | | | | dA- | |
| | | | | | | | | | Sup | |
| RPS14- | 1.075061904 | 0.027970785 | RPS14 | in | Hep3B | 10 | qRTP | AUGGG | dAs; lnaTs; | RPS14:472L15 |
| 18 | | | | vitro | | | CR | AUCGG | dGs; lnaGs; | |
| | | | | | | | | UGCUA | dGs; lnaAs; | |
| | | | | | | | | | dTs; | |
| | | | | | | | | | lnaCs; dGs; | |
| | | | | | | | | | lnaGs; | |
| | | | | | | | | | dTs; lnaGs; | |
| | | | | | | | | | dCs; lnaTs; | |
| | | | | | | | | | dA- | |
| | | | | | | | | | Sup | |
| RPS14- | 1.08073917 | 0.047548234 | RPS14 | in | Hep3B | 30 | qRTP | AUUCC | dAs; lnaTs; | RPS14:452L15 |
| 19 | | | | vitro | | | CR | UAUUU | dTs; lnaCs; | |
| | | | | | | | | UGCAA | dCs; lnaTs; | |
| | | | | | | | | | dAs; lnaTs; | |
| | | | | | | | | | dTs; | |
| | | | | | | | | | lnaTs; dTs; | |
| | | | | | | | | | lnaGs; dCs; | |
| | | | | | | | | | lnaAs; | |
| | | | | | | | | | dA-Sup | |
| RPS14- | 1.452175088 | 0.102224151 | RPS14 | in | Hep3B | 10 | qRTP | AUUCC | dAs; lnaTs; | RPS14:452L15 |
| 19 | | | | vitro | | | CR | UAUUU | dTs; lnaCs; | |
| | | | | | | | | UGCAA | dCs; lnaTs; | |
| | | | | | | | | | dAs; lnaTs; | |
| | | | | | | | | | dTs; | |
| | | | | | | | | | lnaTs; dTs; | |
| | | | | | | | | | lnaGs; dCs; | |
| | | | | | | | | | lnaAs; | |
| | | | | | | | | | dA-Sup | |
| RPS14- | 1.380850992 | 0.055989063 | RPS14 | in | Hep3B | 30 | qRTP | UGCAA | dTs; lnaGs; | RPS14:442L15 |
| 20 | | | | vitro | | | CR | ACGAG | dCs; lnaAs; | |
| | | | | | | | | GAAAC | dAs; lnaAs; | |
| | | | | | | | | | dCs; lnaGs; | |
| | | | | | | | | | dAs; | |
| | | | | | | | | | lnaGs; dGs; | |
| | | | | | | | | | lnaAs; | |
| | | | | | | | | | dAs; lnaAs; | |
| | | | | | | | | | dC-Sup | |
| RPS14- | 1.544811457 | 0.078791963 | RPS14 | in | Hep3B | 10 | qRTP | UGCAA | dTs; lnaGs; | RPS14:442L15 |
| 20 | | | | vitro | | | CR | ACGAG | dCs; lnaAs; | |
| | | | | | | | | GAAAC | dAs; lnaAs; | |
| | | | | | | | | | dCs; lnaGs; | |
| | | | | | | | | | dAs; | |
| | | | | | | | | | lnaGs; dGs; | |
| | | | | | | | | | lnaAs; | |
| | | | | | | | | | dAs; lnaAs; | |
| | | | | | | | | | dC-Sup | |
| RPS14- | 1.677863498 | 0.131525675 | RPS14 | in | Hep3B | 30 | qRTP | GCGGA | dGs; lnaCs; | RPS14:3879L15 |
| 21 | | | | vitro | | | CR | CUGCU | dGs; lnaGs; | |
| | | | | | | | | UCAGC | dAs; lnaCs; | |
| | | | | | | | | | dTs; | |
| | | | | | | | | | lnaGs; dCs; | |
| | | | | | | | | | lnaTs; | |
| | | | | | | | | | dTs; lnaCs; | |
| | | | | | | | | | dAs; lnaGs; | |
| | | | | | | | | | dC- | |
| | | | | | | | | | Sup | |
| RPS14- | 1.675166268 | 0.06594263 | RPS14 | in | Hep3B | 10 | qRTP | GCGGA | dGs; lnaCs; | RPS14:3879L15 |
| 21 | | | | vitro | | | CR | CUGCU | dGs; lnaGs; | |
| | | | | | | | | UCAGC | dAs; lnaCs; | |
| | | | | | | | | | dTs; | |
| | | | | | | | | | lnaGs; dCs; | |
| | | | | | | | | | lnaTs; | |
| | | | | | | | | | dTs; lnaCs; | |
| | | | | | | | | | dAs; lnaGs; | |
| | | | | | | | | | dC- | |
| | | | | | | | | | Sup | |
| RPS14- | 1.503158244 | 0.065724703 | RPS14 | in | Hep3B | 30 | qRTP | AGUUC | dAs; lnaGs; | RPS14:15342U15 |
| 22 | | | | vitro | | | CR | AAGAC | dTs; lnaTs; | |
| | | | | | | | | CAGCC | dCs; lnaAs; | |
| | | | | | | | | | dAs; lnaGs; | |
| | | | | | | | | | dAs; | |
| | | | | | | | | | lnaCs; dCs; | |
| | | | | | | | | | lnaAs; | |
| | | | | | | | | | dGs; lnaCs; | |
| | | | | | | | | | dC-Sup | |
| RPS14- | 1.537106869 | 0.182337033 | RPS14 | in | Hep3B | 10 | qRTP | AGUUC | dAs; lnaGs; | RPS14:15342U15 |
| 22 | | | | vitro | | | CR | AAGAC | dTs; lnaTs; | |
| | | | | | | | | CAGCC | dCs; lnaAs; | |
| | | | | | | | | | dAs; lnaGs; | |
| | | | | | | | | | dAs; | |
| | | | | | | | | | lnaCs; dCs; | |
| | | | | | | | | | lnaAs; | |
| | | | | | | | | | dGs; lnaCs; | |
| | | | | | | | | | dC-Sup | |
| RPS14- | 1.433303101 | 0.084139067 | RPS14 | in | Hep3B | 30 | qRTP | ACACAA | dAs; lnaCs; | RPS14:3809L15 |
| 23 | | | | vitro | | | CR | UUUAG | dAs; lnaCs; | |
| | | | | | | | | CCAG | dAs; lnaAs; | |
| | | | | | | | | | dTs; lnaTs; | |
| | | | | | | | | | dTs; | |
| | | | | | | | | | lnaAs; dGs; | |
| | | | | | | | | | lnaCs; | |
| | | | | | | | | | dCs; lnaAs; | |
| | | | | | | | | | dG-Sup | |
| RPS14- | 1.381859238 | 0.032923577 | RPS14 | in | Hep3B | 10 | qRTP | ACACAA | dAs; lnaCs; | RPS14:3809L15 |
| 23 | | | | vitro | | | CR | UUUAG | dAs; lnaCs; | |
| | | | | | | | | CCAG | dAs; lnaAs; | |
| | | | | | | | | | dTs; lnaTs; | |
| | | | | | | | | | dTs; | |
| | | | | | | | | | lnaAs; dGs; | |
| | | | | | | | | | lnaCs; | |
| | | | | | | | | | dCs; lnaAs; | |
| | | | | | | | | | dG-Sup | |
| RPS14- | 1.264976324 | 0.042167947 | RPS14 | in | Hep3B | 30 | qRTP | UUUCU | dTs; lnaTs; | RPS14:3999L15 |
| 24 | | | | vitro | | | CR | AAGAU | dTs; lnaCs; | |
| | | | | | | | | CCCAA | dTs; lnaAs; | |
| | | | | | | | | | dAs; lnaGs; | |
| | | | | | | | | | dAs; | |
| | | | | | | | | | lnaTs; dCs; | |
| | | | | | | | | | lnaCs; | |
| | | | | | | | | | dCs; lnaAs; | |
| | | | | | | | | | dA-Sup | |
| RPS14- | 1.290790627 | 0.030646961 | RPS14 | in | Hep3B | 10 | qRTP | UUUCU | dTs; lnaTs; | RPS14:3999L15 |
| 24 | | | | vitro | | | CR | AAGAU | dTs; lnaCs; | |
| | | | | | | | | CCCAA | dTs; lnaAs; | |
| | | | | | | | | | dAs; lnaGs; | |
| | | | | | | | | | dAs; | |
| | | | | | | | | | lnaTs; dCs; | |
| | | | | | | | | | lnaCs; | |
| | | | | | | | | | dCs; lnaAs; | |
| | | | | | | | | | dA-Sup | |
| RPS14- | 1.444774916 | 0.006074222 | RPS14 | in | Hep3B | 30 | qRTP | AACUU | dAs; lnaAs; | RPS14:3959L15 |
| 25 | | | | vitro | | | CR | UCUGU | dCs; lnaTs; | |
| | | | | | | | | AAAGA | dTs; lnaTs; | |
| | | | | | | | | | dCs; lnaTs; | |
| | | | | | | | | | dGs; | |
| | | | | | | | | | lnaTs; dAs; | |
| | | | | | | | | | lnaAs; dAs; | |
| | | | | | | | | | lnaGs; | |
| | | | | | | | | | dA-Sup | |
| RPS14- | 1.266383437 | 0.049474731 | RPS14 | in | Hep3B | 10 | qRTP | AACUU | dAs; lnaAs; | RPS14:3959L15 |
| 25 | | | | vitro | | | CR | UCUGU | dCs; lnaTs; | |
| | | | | | | | | AAAGA | dTs; lnaTs; | |
| | | | | | | | | | dCs; lnaTs; | |
| | | | | | | | | | dGs; | |
| | | | | | | | | | lnaTs; dAs; | |
| | | | | | | | | | lnaAs; dAs; | |
| | | | | | | | | | lnaGs; | |
| | | | | | | | | | dA-Sup | |
| RPS14- | 1.90548649 | 0.14732026 | RPS14 | in | Hep3B | 30 | qRTP | ACAGU | dAs; lnaCs; | RPS14:3927L15 |
| 26 | | | | vitro | | | CR | GGUUC | dAs; lnaGs; | |
| | | | | | | | | ACACC | dTs; lnaGs; | |
| | | | | | | | | | dGs; | |
| | | | | | | | | | lnaTs; dTs; | |
| | | | | | | | | | lnaCs; dAs; | |
| | | | | | | | | | lnaCs; | |
| | | | | | | | | | dAs; lnaCs; | |
| | | | | | | | | | dC-Sup | |
| RPS14- | 1.630149894 | 0.063785989 | RPS14 | in | Hep3B | 10 | qRTP | ACAGU | dAs; lnaCs; | RPS14:3927L15 |
| 26 | | | | vitro | | | CR | GGUUC | dAs; lnaGs; | |
| | | | | | | | | ACACC | dTs; lnaGs; | |
| | | | | | | | | | dGs; | |
| | | | | | | | | | lnaTs; dTs; | |
| | | | | | | | | | lnaCs; dAs; | |
| | | | | | | | | | lnaCs; | |
| | | | | | | | | | dAs; lnaCs; | |
| | | | | | | | | | dC-Sup | |
| RPS14- | 0.966931605 | 0.074880909 | RPS14 | in | Hep3B | 30 | qRTP | UUCAC | dTs; lnaTs; | RPS14:3920L15 |
| 27 | | | | vitro | | | CR | ACCCA | dCs; lnaAs; | |
| | | | | | | | | UAAUC | dCs; lnaAs; | |
| | | | | | | | | | dCs; lnaCs; | |
| | | | | | | | | | dCs; | |
| | | | | | | | | | lnaAs; dTs; | |
| | | | | | | | | | lnaAs; dAs; | |
| | | | | | | | | | lnaTs; | |
| | | | | | | | | | dC-Sup | |
| RPS14- | 1.058319597 | 0.032166876 | RPS14 | in | Hep3B | 10 | qRTP | UUCAC | dTs; lnaTs; | RPS14:3920L15 |
| 27 | | | | vitro | | | CR | ACCCA | dCs; lnaAs; | |
| | | | | | | | | UAAUC | dCs; lnaAs; | |
| | | | | | | | | | dCs; lnaCs; | |
| | | | | | | | | | dCs; | |
| | | | | | | | | | lnaAs; dTs; | |
| | | | | | | | | | lnaAs; dAs; | |
| | | | | | | | | | lnaTs; | |
| | | | | | | | | | dC-Sup | |
| RPS14- | 1.268913896 | 0.022326185 | RPS14 | in | Hep3B | 30 | qRTP | UGGUC | dTs; lnaGs; | RPS14:6832L15 |
| 28 | | | | vitro | | | CR | UCAAA | dGs; lnaTs; | |
| | | | | | | | | CUCCU | dCs; lnaTs; | |
| | | | | | | | | | dCs; lnaAs; | |
| | | | | | | | | | dAs; | |
| | | | | | | | | | lnaAs; dCs; | |
| | | | | | | | | | lnaTs; | |
| | | | | | | | | | dCs; lnaCs; | |
| | | | | | | | | | dT-Sup | |
| RPS14- | 1.281650687 | 0.077980723 | RPS14 | in | Hep3B | 10 | qRTP | UGGUC | dTs; lnaGs; | RPS14:6832L15 |
| 28 | | | | vitro | | | CR | UCAAA | dGs; lnaTs; | |
| | | | | | | | | CUCCU | dCs; lnaTs; | |
| | | | | | | | | | dCs; lnaAs; | |
| | | | | | | | | | dAs; | |
| | | | | | | | | | lnaAs; dCs; | |
| | | | | | | | | | lnaTs; | |
| | | | | | | | | | dCs; lnaCS; | |
| | | | | | | | | | dT-Sup | |
| RPS14- | 1.174837091 | 0.072923456 | RPS14 | in | Hep3B | 30 | qRTP | AAUCC | dAs; lnaAs; | RPS14:6811L15 |
| 29 | | | | vitro | | | CR | GUCCU | dTs; lnaCs; | |
| | | | | | | | | CCUGU | dCs; lnaGs; | |
| | | | | | | | | | dTs; lnaCs; | |
| | | | | | | | | | dCs; | |
| | | | | | | | | | lnaTs; dCs; | |
| | | | | | | | | | lnaCs; dTs; | |
| | | | | | | | | | lnaGs; | |
| | | | | | | | | | dT-Sup | |
| RPS14- | 1.217103814 | 0.032281771 | RPS14 | in | Hep3B | 10 | qRTP | AAUCC | dAs; lnaAs; | RPS14:6811L15 |
| 29 | | | | vitro | | | CR | GUCCU | dTs; lnaCs; | |
| | | | | | | | | CCUGU | dCs; lnaGs; | |
| | | | | | | | | | dTs; lnaCs; | |
| | | | | | | | | | dCs; | |
| | | | | | | | | | lnaTs; dCs; | |
| | | | | | | | | | lnaCs; dTs; | |
| | | | | | | | | | lnaGs; | |
| | | | | | | | | | dT-Sup | |
| RPS14- | 1.149948141 | 0.026306246 | RPS14 | in | Hep3B | 30 | qRTP | AGUGU | dAs; lnaGs; | RPS14:6783L15 |
| 30 | | | | vitro | | | CR | UGGGA | dTs; lnaGs; | |
| | | | | | | | | UUAUA | dTs; lnaTs; | |
| | | | | | | | | | dGs; lnaGs; | |
| | | | | | | | | | dGs; | |
| | | | | | | | | | lnaAs; dTs; | |
| | | | | | | | | | lnaTs; | |
| | | | | | | | | | dAs; lnaTs; | |
| | | | | | | | | | dA-Sup | |
| RPS14- | 1.233912414 | 0.084196709 | RPS14 | in | Hep3B | 10 | qRTP | AGUGU | dAs; lnaGs; | RPS14:6783L15 |
| 30 | | | | vitro | | | CR | UGGGA | dTs; lnaGs; | |
| | | | | | | | | UUAUA | dTs; lnaTs; | |
| | | | | | | | | | dGs; lnaGs; | |
| | | | | | | | | | dGs; | |
| | | | | | | | | | lnaAs; dTs; | |
| | | | | | | | | | lnaTs; | |
| | | | | | | | | | dAs; lnaTs; | |
| | | | | | | | | | dA-Sup | |
| RPS19- | 1.36707585 | 0.113687646 | RPS19 | in | Hep3B | 30 | qRTP | UCUUG | dTs; lnaCs; | RPS19:803U15 |
| 1 | | | | vitro | | | CR | GCAGU | dTs; lnaTs; | |
| | | | | | | | | CGUCU | dGs; lnaGs; | |
| | | | | | | | | | dCs; lnaAs; | |
| | | | | | | | | | dGs; | |
| | | | | | | | | | lnaTs; dCs; | |
| | | | | | | | | | lnaGs; | |
| | | | | | | | | | dTs; lnaCs; | |
| | | | | | | | | | dT-Sup | |
| RPS19- | 1.207195908 | 0.113981622 | RPS19 | in | Hep3B | 10 | qRTP | UCUUG | dTs; lnaCs; | RPS19:803U15 |
| 1 | | | | vitro | | | CR | GCAGU | dTs; lnaTs; | |
| | | | | | | | | CGUCU | dGs; lnaGs; | |
| | | | | | | | | | dCs; lnaAs; | |
| | | | | | | | | | dGs; | |
| | | | | | | | | | lnaTs; dCs; | |
| | | | | | | | | | lnaGs; | |
| | | | | | | | | | dTs; lnaCs; | |
| | | | | | | | | | dT-Sup | |
| RPS19- | 1.134988063 | 0.046582379 | RPS19 | in | Hep3B | 30 | qRTP | UUUCU | dTs; lnaTs; | RPS19:846U15 |
| 2 | | | | vitro | | | CR | CCCUCA | dTs; lnaCs; | |
| | | | | | | | | GAUG | dTs; lnaCs; | |
| | | | | | | | | | dCs; lnaCs; | |
| | | | | | | | | | dTs; | |
| | | | | | | | | | lnaCs; dAs; | |
| | | | | | | | | | lnaGs; | |
| | | | | | | | | | dAs; lnaTs; | |
| | | | | | | | | | dG-Sup | |
| RPS19- | 1.043544766 | 0.048729173 | RPS19 | in | Hep3B | 10 | qRTP | UUUCU | dTs; lnaTs; | RPS19:846U15 |
| 2 | | | | vitro | | | CR | CCCUCA | dTs; lnaCs; | |
| | | | | | | | | GAUG | dTs; lnaCs; | |
| | | | | | | | | | dCs; lnaCs; | |
| | | | | | | | | | dTs; | |
| | | | | | | | | | lnaCs; dAs; | |
| | | | | | | | | | lnaGs; | |
| | | | | | | | | | dAs; lnaTs; | |
| | | | | | | | | | dG-Sup | |
| RPS19- | 1.437698779 | 0.102460016 | RPS19 | in | Hep3B | 30 | qRTP | UUACU | dTs; lnaTs; | RPS19:868U15 |
| 3 | | | | vitro | | | CR | GUAAA | dAs; lnaCs; | |
| | | | | | | | | AGACG | dTs; lnaGs; | |
| | | | | | | | | | dTs; lnaAs; | |
| | | | | | | | | | dAs; | |
| | | | | | | | | | lnaAs; dAs; | |
| | | | | | | | | | lnaGs; | |
| | | | | | | | | | dAs; lnaCs; | |
| | | | | | | | | | dG-Sup | |
| RPS19- | 1.109193996 | 0.202344205 | RPS19 | in | Hep3B | 10 | qRTP | UUACU | dTs; lnaTs; | RPS19:868U15 |
| 3 | | | | vitro | | | CR | GUAAA | dAs; lnaCs; | |
| | | | | | | | | AGACG | dTs; lnaGs; | |
| | | | | | | | | | dTs; lnaAs; | |
| | | | | | | | | | dAs; | |
| | | | | | | | | | lnaAs; dAs; | |
| | | | | | | | | | lnaGs; | |
| | | | | | | | | | dAs; lnaCs; | |
| | | | | | | | | | dG-Sup | |
| RPS19- | 1.171724657 | 0.067785688 | RPS19 | in | Hep3B | 30 | qRTP | AUCCA | dAs; lnaTs; | RPS19:4644U15 |
| 4 | | | | vitro | | | CR | GAGGG | dCs; lnaCs; | |
| | | | | | | | | ACCCU | dAs; lnaGs; | |
| | | | | | | | | | dAs; lnaGs; | |
| | | | | | | | | | dGs; | |
| | | | | | | | | | lnaGs; dAs; | |
| | | | | | | | | | lnaCs; | |
| | | | | | | | | | dCs; lnaCs; | |
| | | | | | | | | | dT-Sup | |
| RPS19- | 1.023702767 | 0.020025731 | RPS19 | in | Hep3B | 10 | qRTP | AUCCA | dAs; lnaTs; | RPS19:4644U15 |
| 4 | | | | vitro | | | CR | GAGGG | dCs; lnaCs; | |
| | | | | | | | | ACCCU | dAs; lnaGs; | |
| | | | | | | | | | dAs; lnaGs; | |
| | | | | | | | | | dGs; | |
| | | | | | | | | | lnaGs; dAs; | |
| | | | | | | | | | lnaCs; dCs; | |
| | | | | | | | | | lnaCs; | |
| | | | | | | | | | dT-Sup | |
| RPS19- | 1.301838391 | 0.129930698 | RPS19 | in | Hep3B | 30 | qRTP | AACACA | dAs; lnaAs; | RPS19:4677U15 |
| 5 | | | | vitro | | | CR | GCUGC | dCs; lnaAs; | |
| | | | | | | | | CCUC | dCs; lnaAs; | |
| | | | | | | | | | dGs; lnaCs; | |
| | | | | | | | | | dTs; | |
| | | | | | | | | | lnaGs; dCs; | |
| | | | | | | | | | lnaCs; | |
| | | | | | | | | | dCs; lnaTs; | |
| | | | | | | | | | dC-Sup | |
| RPS19- | 1.043784689 | 0.013612245 | RPS19 | in | Hep3B | 10 | qRTP | AACACA | dAs; lnaAs; | RPS19:4677U15 |
| 5 | | | | vitro | | | CR | GCUGC | dCs; lnaAs; | |
| | | | | | | | | CCUC | dCs; lnaAs; | |
| | | | | | | | | | dGs; lnaCs; | |
| | | | | | | | | | dTs; | |
| | | | | | | | | | lnaGs; dCs; | |
| | | | | | | | | | lnaCs; | |
| | | | | | | | | | dCs; lnaTs; | |
| | | | | | | | | | dC-Sup | |
| RPS19- | 1.284424777 | 0.017821662 | RPS19 | in | Hep3B | 30 | qRTP | AUGAA | dAs; lnaTs; | RPS19:4700U15 |
| 6 | | | | vitro | | | CR | CUCAC | dGs; lnaAs; | |
| | | | | | | | | AGUAG | dAs; lnaCs; | |
| | | | | | | | | | dTs; lnaCs; | |
| | | | | | | | | | dAs; | |
| | | | | | | | | | lnaCs; dAs; | |
| | | | | | | | | | lnaGs; | |
| | | | | | | | | | dTs; lnaAs; | |
| | | | | | | | | | dG-Sup | |
| RPS19- | 1.169182443 | 0.023653326 | RPS19 | in | Hep3B | 10 | qRTP | AUGAA | dAs; lnaTs; | RPS19:4700U15 |
| 6 | | | | vitro | | | CR | CUCAC | dGs; lnaAs; | |
| | | | | | | | | AGUAG | dAs; lnaCs; | |
| | | | | | | | | | dTs; lnaCs; | |
| | | | | | | | | | dAs; | |
| | | | | | | | | | lnaCs; dAs; | |
| | | | | | | | | | lnaGs; | |
| | | | | | | | | | dTs; lnaAs; | |
| | | | | | | | | | dG-Sup | |
| RPS19- | 1.252136112 | 0.119610648 | RPS19 | in | Hep3B | 30 | qRTP | UGAAG | dTs; lnaGs; | RPS19:9204L15 |
| 7 | | | | vitro | | | CR | UGGCU | dAs; lnaAs; | |
| | | | | | | | | GGGCA | dGs; lnaTs; | |
| | | | | | | | | | dGs; | |
| | | | | | | | | | lnaGs; dCs; | |
| | | | | | | | | | lnaTs; | |
| | | | | | | | | | dGs; lnaGs; | |
| | | | | | | | | | dGs; lnaCs; | |
| | | | | | | | | | dA- | |
| | | | | | | | | | Sup | |
| RPS19- | 1.250276658 | 0.000764166 | RPS19 | in | Hep3B | 10 | qRTP | UGAAG | dTs; lnaGs; | RPS19:9204L15 |
| 7 | | | | vitro | | | CR | UGGCU | dAs; lnaAs; | |
| | | | | | | | | GGGCA | dGs; lnaTs; | |
| | | | | | | | | | dGs; | |
| | | | | | | | | | lnaGs; dCs; | |
| | | | | | | | | | lnaTs; | |
| | | | | | | | | | dGs; lnaGs; | |
| | | | | | | | | | dGs; lnaCs; | |
| | | | | | | | | | dA- | |
| | | | | | | | | | Sup | |
| RPS19- | 1.203193321 | 0.284722629 | RPS19 | in | Hep3B | 30 | qRTP | UUGGG | dTs; lnaTs; | RPS19:9157L15 |
| 8 | | | | vitro | | | CR | CAUGG | dGs; lnaGs; | |
| | | | | | | | | AGCCA | dGs; lnaCs; | |
| | | | | | | | | | dAs; | |
| | | | | | | | | | lnaTs; dGs; | |
| | | | | | | | | | lnaGs; | |
| | | | | | | | | | dAs; lnaGs; | |
| | | | | | | | | | dCs; lnaCs; | |
| | | | | | | | | | dA- | |
| | | | | | | | | | Sup | |
| RPS19- | 1.493946586 | 0.095412699 | RPS19 | in | Hep3B | 10 | qRTP | UUGGG | dTs; lnaTs; | RPS19:9157L15 |
| 8 | | | | vitro | | | CR | CAUGG | dGs; lnaGs; | |
| | | | | | | | | AGCCA | dGs; lnaCs; | |
| | | | | | | | | | dAs; | |
| | | | | | | | | | lnaTs; dGs; | |
| | | | | | | | | | lnaGs; | |
| | | | | | | | | | dAs; lnaGs; | |
| | | | | | | | | | dCs; lnaCs; | |
| | | | | | | | | | dA- | |
| | | | | | | | | | Sup | |
| RPS19- | 1.051063226 | 0.25274829 | RPS19 | in | Hep3B | 30 | qRTP | UCUUG | dTs; lnaCs; | RPS19:9280L15 |
| 9 | | | | vitro | | | CR | GUCCU | dTs; lnaTs; | |
| | | | | | | | | UUUCC | dGs; lnaGs; | |
| | | | | | | | | | dTs; lnaCs; | |
| | | | | | | | | | dCs; | |
| | | | | | | | | | lnaTs; dTs; | |
| | | | | | | | | | lnaTs; dTs; | |
| | | | | | | | | | lnaCs; | |
| | | | | | | | | | dC-Sup | |
| RPS19- | 1.48241752 | 0.180576882 | RPS19 | in | Hep3B | 10 | qRTP | UCUUG | dTs; lnaCs; | RPS19:9280L15 |
| 9 | | | | vitro | | | CR | GUCCU | dTs; lnaTs; | |
| | | | | | | | | UUUCC | dGs; lnaGs; | |
| | | | | | | | | | dTs; lnaCs; | |
| | | | | | | | | | dCs; | |
| | | | | | | | | | lnaTs; dTs; | |
| | | | | | | | | | lnaTs; dTs; | |
| | | | | | | | | | lnaCs; | |
| | | | | | | | | | dC-Sup | |
| RPS19- | 1.125991846 | 0.14421167 | RPS19 | in | Hep3B | 30 | qRTP | UUUUC | dTs; lnaTs; | RPS19:9261L15 |
| 10 | | | | vitro | | | CR | AGCCCC | dTs; lnaTs; | |
| | | | | | | | | UCCA | dCs; lnaAs; | |
| | | | | | | | | | dGs; lnaCs; | |
| | | | | | | | | | dCs; | |
| | | | | | | | | | lnaCs; dCs; | |
| | | | | | | | | | lnaTs; dCs; | |
| | | | | | | | | | lnaCs; | |
| | | | | | | | | | dA-Sup | |
| RPS19- | 1.428611946 | 0.117376386 | RPS19 | in | Hep3B | 10 | qRTP | UUUUC | dTs; lnaTs; | RPS19:9261L15 |
| 10 | | | | vitro | | | CR | AGCCCC | dTs; lnaTs; | |
| | | | | | | | | UCCA | dCs; lnaAs; | |
| | | | | | | | | | dGs; lnaCs; | |
| | | | | | | | | | dCs; | |
| | | | | | | | | | lnaCs; dCs; | |
| | | | | | | | | | lnaTs; dCs; | |
| | | | | | | | | | lnaCs; | |
| | | | | | | | | | dA-Sup | |
| RPS19- | 1.19809862 | 0.171688401 | RPS19 | in | Hep3B | 30 | qRTP | UUGGA | dTs; lnaTs; | RPS19:9217L15 |
| 11 | | | | vitro | | | CR | GCCUC | dGs; lnaGs; | |
| | | | | | | | | GGCUG | dAs; lnaGs; | |
| | | | | | | | | | dCs; | |
| | | | | | | | | | lnaCs; dTs; | |
| | | | | | | | | | lnaCs; dGs; | |
| | | | | | | | | | lnaGs; | |
| | | | | | | | | | dCs; lnaTs; | |
| | | | | | | | | | dG-Sup | |
| RPS19- | 1.279785842 | 0.033348117 | RPS19 | in | Hep3B | 10 | qRTP | UUGGA | dTs; lnaTs; | RPS19:9217L15 |
| 11 | | | | vitro | | | CR | GCCUC | dGs; lnaGs; | |
| | | | | | | | | GGCUG | dAs; lnaGs; | |
| | | | | | | | | | dCs; | |
| | | | | | | | | | lnaCs; dTs; | |
| | | | | | | | | | lnaCs; dGs; | |
| | | | | | | | | | lnaGs; | |
| | | | | | | | | | dCs; lnaTs; | |
| | | | | | | | | | dG-Sup | |
| RPS19- | 1.051222346 | 0.197314827 | RPS19 | in | Hep3B | 30 | qRTP | UUGUG | dTs; lnaTs; | RPS19:9572L15 |
| 12 | | | | vitro | | | CR | CAAGC | dGs; lnaTs; | |
| | | | | | | | | AUUUA | dGs; lnaCs; | |
| | | | | | | | | | dAs; lnaAs; | |
| | | | | | | | | | dGs; | |
| | | | | | | | | | lnaCs; dAs; | |
| | | | | | | | | | lnaTs; | |
| | | | | | | | | | dTs; lnaTs; | |
| | | | | | | | | | dA-Sup | |
| RPS19- | 1.174081279 | 0.024205086 | RPS19 | in | Hep3B | 10 | qRTP | UUGUG | dTs; lnaTs; | RPS19:9572L15 |
| 12 | | | | vitro | | | CR | CAAGC | dGs; lnaTs; | |
| | | | | | | | | AUUUA | dGs; lnaCs; | |
| | | | | | | | | | dAs; lnaAs; | |
| | | | | | | | | | dGs; | |
| | | | | | | | | | lnaCs; dAs; | |
| | | | | | | | | | lnaTs; | |
| | | | | | | | | | dTs; lnaTs; | |
| | | | | | | | | | dA-Sup | |
| RPS19- | 1.247711722 | 0.104367941 | RPS19 | in | Hep3B | 30 | qRTP | AUCAA | dAs; lnaTs; | RPS19:9556L15 |
| 13 | | | | vitro | | | CR | AAGCCC | dCs; lnaAs; | |
| | | | | | | | | CGAA | dAs; lnaAs; | |
| | | | | | | | | | dAs; lnaGs; | |
| | | | | | | | | | dCs; | |
| | | | | | | | | | lnaCs; dCs; | |
| | | | | | | | | | lnaCs; dGs; | |
| | | | | | | | | | lnaAs; | |
| | | | | | | | | | dA-Sup | |
| RPS19- | 1.068573956 | 0.099872517 | RPS19 | in | Hep3B | 10 | qRTP | AUCAA | dAs; lnaTs; | RPS19:9556L15 |
| 13 | | | | vitro | | | CR | AAGCCC | dCs; lnaAs; | |
| | | | | | | | | CGAA | dAs; lnaAs; | |
| | | | | | | | | | dAs; lnaGs; | |
| | | | | | | | | | dCs; | |
| | | | | | | | | | lnaCs; dCs; | |
| | | | | | | | | | lnaCs; dGs; | |
| | | | | | | | | | lnaAs; | |
| | | | | | | | | | dA-Sup | |
| RPS19- | 1.109510606 | 0.05725917 | RPS19 | in | Hep3B | 30 | qRTP | AGUGG | dAs; lnaGs; | RPS19:9607L15 |
| 14 | | | | vitro | | | CR | GAGCC | dTs; lnaGs; | |
| | | | | | | | | CCCCU | dGs; lnaGs; | |
| | | | | | | | | | dAs; | |
| | | | | | | | | | lnaGs; dCs; | |
| | | | | | | | | | lnaCs; | |
| | | | | | | | | | dCs; lnaCs; | |
| | | | | | | | | | dCs; lnaCs; | |
| | | | | | | | | | dT- | |
| | | | | | | | | | Sup | |
| RPS19- | 1.180544433 | 0.014045078 | RPS19 | in | Hep3B | 10 | qRTP | AGUGG | dAs; lnaGs; | RPS19:9607L15 |
| 14 | | | | vitro | | | CR | GAGCC | dTs; lnaGs; | |
| | | | | | | | | CCCCU | dGs; lnaGs; | |
| | | | | | | | | | dAs; | |
| | | | | | | | | | lnaGs; dCs; | |
| | | | | | | | | | lnaCs; | |
| | | | | | | | | | dCs; lnaCs; | |
| | | | | | | | | | dCs; lnaCs; | |
| | | | | | | | | | dT- | |
| | | | | | | | | | Sup | |
| RPS19- | 1.522808407 | 0.063687802 | RPS19 | in | Hep3B | 30 | qRTP | AGUGA | dAs; lnaGs; | RPS19:9737L15 |
| 15 | | | | vitro | | | CR | GCACA | dTs; lnaGs; | |
| | | | | | | | | GGUCC | dAs; lnaGs; | |
| | | | | | | | | | dCs; | |
| | | | | | | | | | lnaAs; dCs; | |
| | | | | | | | | | lnaAs; | |
| | | | | | | | | | dGs; lnaGs; | |
| | | | | | | | | | dTs; lnaCs; | |
| | | | | | | | | | dC- | |
| | | | | | | | | | Sup | |
| RPS19- | 1.340877406 | 0.152944091 | RPS19 | in | Hep3B | 10 | qRTP | AGUGA | dAs; lnaGs; | RPS19:9737L15 |
| 15 | | | | vitro | | | CR | GCACA | dTs; lnaGs; | |
| | | | | | | | | GGUCC | dAs; lnaGs; | |
| | | | | | | | | | dCs; | |
| | | | | | | | | | lnaAs; dCs; | |
| | | | | | | | | | lnaAs; | |
| | | | | | | | | | dGs; lnaGs; | |
| | | | | | | | | | dTs; lnaCs; | |
| | | | | | | | | | dC- | |
| | | | | | | | | | Sup | |
| RPS19- | 1.344381391 | 0.070323864 | RPS19 | in | Hep3B | 30 | qRTP | UCAAG | dTs; lnaCs; | RPS19:9682L15 |
| 16 | | | | vitro | | | CR | AAGCC | dAs; lnaAs; | |
| | | | | | | | | ACCUG | dGs; lnaAs; | |
| | | | | | | | | | dAs; | |
| | | | | | | | | | lnaGs; dCs; | |
| | | | | | | | | | lnaCs; | |
| | | | | | | | | | dAs; lnaCs; | |
| | | | | | | | | | dCs; lnaTs; | |
| | | | | | | | | | dG- | |
| | | | | | | | | | Sup | |
| RPS19- | 1.193162148 | 0.091953555 | RPS19 | in | Hep3B | 10 | qRTP | UCAAG | dTs; lnaCs; | RPS19:9682L15 |
| 16 | | | | vitro | | | CR | AAGCC | dAs; lnaAs; | |
| | | | | | | | | ACCUG | dGs; lnaAs; | |
| | | | | | | | | | dAs; | |
| | | | | | | | | | lnaGs; dCs; | |
| | | | | | | | | | lnaCs; | |
| | | | | | | | | | dAs; lnaCs; | |
| | | | | | | | | | dCs; lnaTs; | |
| | | | | | | | | | dG- | |
| | | | | | | | | | Sup | |
| RPS19- | 1.298511555 | 0.091470739 | RPS19 | in | Hep3B | 30 | qRTP | ACUGA | dAs; lnaCs; | RPS19:9651L15 |
| 17 | | | | vitro | | | CR | GGGCC | dTs; lnaGs; | |
| | | | | | | | | CUAGU | dAs; lnaGs; | |
| | | | | | | | | | dGs; | |
| | | | | | | | | | lnaGs; dCs; | |
| | | | | | | | | | lnaCs; | |
| | | | | | | | | | dCs; lnaTs; | |
| | | | | | | | | | dAs; lnaGs; | |
| | | | | | | | | | dT- | |
| | | | | | | | | | Sup | |
| RPS19- | 1.26372178 | 0.100192636 | RPS19 | in | Hep3B | 10 | qRTP | ACUGA | dAs; lnaCs; | RPS19:9651L15 |
| 17 | | | | vitro | | | CR | GGGCC | dTs; lnaGs; | |
| | | | | | | | | CUAGU | dAs; lnaGs; | |
| | | | | | | | | | dGs; | |
| | | | | | | | | | lnaGs; dCs; | |
| | | | | | | | | | lnaCs; | |
| | | | | | | | | | dCs; lnaTs; | |
| | | | | | | | | | dAs; lnaGs; | |
| | | | | | | | | | dT- | |
| | | | | | | | | | Sup | |
| RPS19- | 1.109753471 | 0.042335157 | RPS19 | in | Hep3B | 30 | qRTP | UUAUU | dTs; lnaTs; | RPS19:3111U15 |
| 18 | | | | vitro | | | CR | AUUUA | dAs; lnaTs; | |
| | | | | | | | | UUUUC | dTs; lnaAs; | |
| | | | | | | | | | dTs; lnaTs; | |
| | | | | | | | | | dTs; | |
| | | | | | | | | | lnaAs; dTs; | |
| | | | | | | | | | lnaTs; dTs; | |
| | | | | | | | | | lnaTs; | |
| | | | | | | | | | dC-Sup | |
| RPS19- | 1.325325103 | 0.042027737 | RPS19 | in | Hep3B | 10 | qRTP | UUAUU | dTs; lnaTs; | RPS19:3111U15 |
| 18 | | | | vitro | | | CR | AUUUA | dAs; lnaTs; | |
| | | | | | | | | UUUUC | dTs; lnaAs; | |
| | | | | | | | | | dTs; lnaTs; | |
| | | | | | | | | | dTs; | |
| | | | | | | | | | lnaAs; dTs; | |
| | | | | | | | | | lnaTs; dTs; | |
| | | | | | | | | | lnaTs; | |
| | | | | | | | | | dC-Sup | |
| RPS19- | 1.344181764 | 0.033405259 | RPS19 | in | Hep3B | 30 | qRTP | UCUAG | dTs; lnaCs; | RPS19:3136U15 |
| 19 | | | | vitro | | | CR | GCCUG | dTs; lnaAs; | |
| | | | | | | | | UCACC | dGs; lnaGs; | |
| | | | | | | | | | dCs; | |
| | | | | | | | | | lnaCs; dTs; | |
| | | | | | | | | | lnaGs; dTs; | |
| | | | | | | | | | lnaCs; | |
| | | | | | | | | | dAs; lnaCs; | |
| | | | | | | | | | dC-Sup | |
| RPS19- | 1.094760256 | 0.023970137 | RPS19 | in | Hep3B | 10 | qRTP | UCUAG | dTs; lnaCs; | RPS19:3136U15 |
| 19 | | | | vitro | | | CR | GCCUG | dTs; lnaAs; | |
| | | | | | | | | UCACC | dGs; lnaGs; | |
| | | | | | | | | | dCs; | |
| | | | | | | | | | lnaCs; dTs; | |
| | | | | | | | | | lnaGs; dTs; | |
| | | | | | | | | | lnaCs; | |
| | | | | | | | | | dAs; lnaCs; | |
| | | | | | | | | | dC-Sup | |
| RPS19- | 1.32349884 | 0.014670793 | RPS19 | in | Hep3B | 30 | qRTP | AGUGC | dAs; lnaGs; | RPS19:3159U15 |
| 20 | | | | vitro | | | CR | AGUGG | dTs; lnaGs; | |
| | | | | | | | | CACAA | dCs; lnaAs; | |
| | | | | | | | | | dGs; lnaTs; | |
| | | | | | | | | | dGs; | |
| | | | | | | | | | lnaGs; dCs; | |
| | | | | | | | | | lnaAs; | |
| | | | | | | | | | dCs; lnaAs; | |
| | | | | | | | | | dA-Sup | |
| RPS19- | 1.170584919 | 0.098824552 | RPS19 | in | Hep3B | 10 | qRTP | AGUGC | dAs; lnaGs; | RPS19:3159U15 |
| 20 | | | | vitro | | | CR | AGUGG | dTs; lnaGs; | |
| | | | | | | | | CACAA | dCs; lnaAs; | |
| | | | | | | | | | dGs; lnaTs; | |
| | | | | | | | | | dGs; | |
| | | | | | | | | | lnaGs; dCs; | |
| | | | | | | | | | lnaAs; | |
| | | | | | | | | | dCs; lnaAs; | |
| | | | | | | | | | dA-Sup | |
| RPS19- | 1.211572419 | 0.061100627 | RPS19 | in | Hep3B | 30 | qRTP | AUAGC | dAs; lnaTs; | RPS19:7824L15 |
| 21 | | | | vitro | | | CR | UCACU | dAs; lnaGs; | |
| | | | | | | | | GCAGC | dCs; lnaTs; | |
| | | | | | | | | | dCs; lnaAs; | |
| | | | | | | | | | dCs; | |
| | | | | | | | | | lnaTs; dGs; | |
| | | | | | | | | | lnaCs; | |
| | | | | | | | | | dAs; lnaGs; | |
| | | | | | | | | | dC-Sup | |
| RPS19- | 1.019434019 | 0.068849728 | RPS19 | in | Hep3B | 10 | qRTP | AUAGC | dAs; lnaTs; | RPS19:7824L15 |
| 21 | | | | vitro | | | CR | UCACU | dAs; lnaGs; | |
| | | | | | | | | GCAGC | dCs; lnaTs; | |
| | | | | | | | | | dCs; lnaAs; | |
| | | | | | | | | | dCs; | |
| | | | | | | | | | lnaTs; dGs; | |
| | | | | | | | | | lnaCs; | |
| | | | | | | | | | dAs; lnaGs; | |
| | | | | | | | | | dC-Sup | |
| RPS19- | 1.250353999 | 0.069559406 | RPS19 | in | Hep3B | 30 | qRTP | ACUUG | dAs; lnaCs; | RPS19:3191L15 |
| 22 | | | | vitro | | | CR | AGCCCA | dTs; lnaTs; | |
| | | | | | | | | AGAA | dGs; lnaAs; | |
| | | | | | | | | | dGs; lnaCs; | |
| | | | | | | | | | dCs; | |
| | | | | | | | | | lnaCs; dAs; | |
| | | | | | | | | | lnaAs; | |
| | | | | | | | | | dGs; lnaAs; | |
| | | | | | | | | | dA-Sup | |
| RPS19- | 1.057459098 | 0.103173676 | RPS19 | in | Hep3B | 10 | qRTP | ACUUG | dAs; lnaCs; | RPS19:3191L15 |
| 22 | | | | vitro | | | CR | AGCCCA | dTs; lnaTs; | |
| | | | | | | | | AGAA | dGs; lnaAs; | |
| | | | | | | | | | dGs; lnaCs; | |
| | | | | | | | | | dCs; | |
| | | | | | | | | | lnaCs; dAs; | |
| | | | | | | | | | lnaAs; | |
| | | | | | | | | | dGs; lnaAs; | |
| | | | | | | | | | dA-Sup | |
| RPS19- | 1.332146568 | 0.017077662 | RPS19 | in | Hep3B | 30 | qRTP | AGCUG | dAs; lnaGs; | RPS19:3177L15 |
| 23 | | | | vitro | | | CR | CAGUG | dCs; lnaTs; | |
| | | | | | | | | AGCUA | dGs; lnaCs; | |
| | | | | | | | | | dAs; lnaGs; | |
| | | | | | | | | | dTs; | |
| | | | | | | | | | lnaGs; dAs; | |
| | | | | | | | | | lnaGs; | |
| | | | | | | | | | dCs; lnaTs; | |
| | | | | | | | | | dA-Sup | |
| RPS19- | 1.157898338 | 0.121229319 | RPS19 | in | Hep3B | 10 | qRTP | AGCUG | dAs; lnaGs; | RPS19:3177L15 |
| 23 | | | | vitro | | | CR | CAGUG | dCs; lnaTs; | |
| | | | | | | | | AGCUA | dGs; lnaCs; | |
| | | | | | | | | | dAs; lnaGs; | |
| | | | | | | | | | dTs; | |
| | | | | | | | | | lnaGs; dAs; | |
| | | | | | | | | | lnaGs; | |
| | | | | | | | | | dCs; lnaTs; | |
| | | | | | | | | | dA-Sup | |
| RPS19- | 1.407131071 | 0.027964922 | RPS19 | in | Hep3B | 30 | qRTP | AGACCC | dAs; lnaGs; | RPS19:3124L15 |
| 24 | | | | vitro | | | CR | UGUCC | dAs; lnaCs; | |
| | | | | | | | | CUGA | dCs; lnaCs; | |
| | | | | | | | | | dTs; lnaGs; | |
| | | | | | | | | | dTs; | |
| | | | | | | | | | lnaCs; dCs; | |
| | | | | | | | | | lnaCs; dTs; | |
| | | | | | | | | | lnaGs; | |
| | | | | | | | | | dA-Sup | |
| RPS19- | 0.927264288 | 0.043507399 | RPS19 | in | Hep3B | 10 | qRTP | AGACCC | dAs; lnaGs; | RPS19:3124L15 |
| 24 | | | | vitro | | | CR | UGUCC | dAs; lnaCs; | |
| | | | | | | | | CUGA | dCs; lnaCs; | |
| | | | | | | | | | dTs; lnaGs; | |
| | | | | | | | | | dTs; | |
| | | | | | | | | | lnaCs; dCs; | |
| | | | | | | | | | lnaCs; dTs; | |
| | | | | | | | | | lnaGs; | |
| | | | | | | | | | dA-Sup | |
| RPS19- | 1.328273354 | 0.035578557 | RPS19 | in | Hep3B | 30 | qRTP | UUGUA | dTs; lnaTs; | RPS19:3284U15 |
| 25 | | | | vitro | | | CR | GAGAU | dGs; lnaTs; | |
| | | | | | | | | GGAGU | dAs; lnaGs; | |
| | | | | | | | | | dAs; lnaGs; | |
| | | | | | | | | | dAs; | |
| | | | | | | | | | lnaTs; dGs; | |
| | | | | | | | | | lnaGs; | |
| | | | | | | | | | dAs; lnaGs; | |
| | | | | | | | | | dT- | |
| | | | | | | | | | Sup | |
| RPS19- | 1.24536121 | 0.135855577 | RPS19 | in | Hep3B | 10 | qRTP | UUGUA | dTs; lnaTs; | RPS19:3284U15 |
| 25 | | | | vitro | | | CR | GAGAU | dGs; lnaTs; | |
| | | | | | | | | GGAGU | dAs; lnaGs; | |
| | | | | | | | | | dAs; lnaGs; | |
| | | | | | | | | | dAs; | |
| | | | | | | | | | lnaTs; dGs; | |
| | | | | | | | | | lnaGs; | |
| | | | | | | | | | dAs; lnaGs; | |
| | | | | | | | | | dT- | |
| | | | | | | | | | Sup | |
| RPS19- | 1.677807153 | 0.110876468 | RPS19 | in | Hep3B | 30 | qRTP | UACAG | dTs; lnaAs; | RPS19:3241U15 |
| 26 | | | | vitro | | | CR | GUGCC | dCs; lnaAs; | |
| | | | | | | | | UAUCA | dGs; lnaGs; | |
| | | | | | | | | | dTs; | |
| | | | | | | | | | lnaGs; dCs; | |
| | | | | | | | | | lnaCs; | |
| | | | | | | | | | dTs; lnaAs; | |
| | | | | | | | | | dTs; lnaCs; | |
| | | | | | | | | | dA- | |
| | | | | | | | | | Sup | |
| RPS19- | 1.335470356 | 0.071730912 | RPS19 | in | Hep3B | 10 | qRTP | UACAG | dTs; lnaAs; | RPS19:3241U15 |
| 26 | | | | vitro | | | CR | GUGCC | dCs; lnaAs; | |
| | | | | | | | | UAUCA | dGs; lnaGs; | |
| | | | | | | | | | dTs; | |
| | | | | | | | | | lnaGs; dCs; | |
| | | | | | | | | | lnaCs; | |
| | | | | | | | | | dTs; lnaAs; | |
| | | | | | | | | | dTs; lnaCs; | |
| | | | | | | | | | dA- | |
| | | | | | | | | | Sup | |
| RPS19- | 1.230728544 | 0.072891264 | RPS19 | in | Hep3B | 30 | qRTP | CUAUC | dCs; lnaTs; | RPS19:3250U15 |
| 27 | | | | vitro | | | CR | AGUCA | dAs; lnaTs; | |
| | | | | | | | | CCAUG | dCs; lnaAs; | |
| | | | | | | | | | dGs; lnaTs; | |
| | | | | | | | | | dCs; | |
| | | | | | | | | | lnaAs; dCs; | |
| | | | | | | | | | lnaCs; | |
| | | | | | | | | | dAs; lnaTs; | |
| | | | | | | | | | dG-Sup | |
| RPS19- | 1.205576237 | 0.021804816 | RPS19 | in | Hep3B | 10 | qRTP | CUAUC | dCs; lnaTs; | RPS19:3250U15 |
| 27 | | | | vitro | | | CR | AGUCA | dAs; lnaTs; | |
| | | | | | | | | CCAUG | dCs; lnaAs; | |
| | | | | | | | | | dGs; lnaTs; | |
| | | | | | | | | | dCs; | |
| | | | | | | | | | lnaAs; dCs; | |
| | | | | | | | | | lnaCs; | |
| | | | | | | | | | dAs; lnaTs; | |
| | | | | | | | | | dG-Sup | |
| RPS19- | 1.077165373 | 0.02432642 | RPS19 | in | Hep3B | 30 | qRTP | AUAGU | dAs; lnaTs; | RPS19:3292L15 |
| 28 | | | | vitro | | | CR | GAGAC | dAs; lnaGs; | |
| | | | | | | | | UCCAU | dTs; lnaGs; | |
| | | | | | | | | | dAs; lnaGs; | |
| | | | | | | | | | dAs; | |
| | | | | | | | | | lnaCs; dTs; | |
| | | | | | | | | | lnaCs; | |
| | | | | | | | | | dCs; lnaAs; | |
| | | | | | | | | | dT-Sup | |
| RPS19- | 1.171755314 | 0.053877582 | RPS19 | in | Hep3B | 10 | qRTP | AUAGU | dAs; lnaTs; | RPS19:3292L15 |
| 28 | | | | vitro | | | CR | GAGAC | dAs; lnaGs; | |
| | | | | | | | | UCCAU | dTs; lnaGs; | |
| | | | | | | | | | dAs; lnaGs; | |
| | | | | | | | | | dAs; | |
| | | | | | | | | | lnaCs; dTs; | |
| | | | | | | | | | lnaCs; | |
| | | | | | | | | | dCs; lnaAs; | |
| | | | | | | | | | dT-Sup | |
| RPS19- | 1.610807145 | 0.075584248 | RPS19 | in | Hep3B | 30 | qRTP | AUGGU | dAs; lnaTs; | RPS19:3249L15 |
| 29 | | | | vitro | | | CR | GACUG | dGs; lnaGs; | |
| | | | | | | | | AUAGG | dTs; lnaGs; | |
| | | | | | | | | | dAs; lnaCs; | |
| | | | | | | | | | dTs; | |
| | | | | | | | | | lnaGs; dAs; | |
| | | | | | | | | | lnaTs; | |
| | | | | | | | | | dAs; lnaGs; | |
| | | | | | | | | | dG-Sup | |
| RPS19- | 1.312471849 | 0.113022827 | RPS19 | in | Hep3B | 10 | qRTP | AUGGU | dAs; lnaTs; | RPS19:3249L15 |
| 29 | | | | vitro | | | CR | GACUG | dGs; lnaGs; | |
| | | | | | | | | AUAGG | dTs; lnaGs; | |
| | | | | | | | | | dAs; lnaCs; | |
| | | | | | | | | | dTs; | |
| | | | | | | | | | lnaGs; dAs; | |
| | | | | | | | | | lnaTs; | |
| | | | | | | | | | dAs; lnaGs; | |
| | | | | | | | | | dG-Sup | |
| RPS19- | 0.991417057 | 0.016114717 | RPS19 | in | Hep3B | 30 | qRTP | UGAUA | dTs; lnaGs; | RPS19:3241L15 |
| 30 | | | | vitro | | | CR | GGCAC | dAs; lnaTs; | |
| | | | | | | | | CUGUA | dAs; lnaGs; | |
| | | | | | | | | | dGs; | |
| | | | | | | | | | lnaCs; dAs; | |
| | | | | | | | | | lnaCs; dCs; | |
| | | | | | | | | | lnaTs; | |
| | | | | | | | | | dGs; lnaTs; | |
| | | | | | | | | | dA-Sup | |
| RPS19- | 1.124566036 | 0.060588856 | RPS19 | in | Hep3B | 10 | qRTP | UGAUA | dTs; lnaGs; | RPS19:3241L15 |
| 30 | | | | vitro | | | CR | GGCAC | dAs; lnaTs; | |
| | | | | | | | | CUGUA | dAs; lnaGs; | |
| | | | | | | | | | dGs; | |
| | | | | | | | | | lnaCs; dAs; | |
| | | | | | | | | | lnaCs; dCs; | |
| | | | | | | | | | lnaTs; | |
| | | | | | | | | | dGs; lnaTs; | |
| | | | | | | | | | dA-Sup | |

### BRIEF DESCRIPTION OF THE SEQUENCE LISTING

| SEQ | | | Chr. | Chr. | |
|---|---|---|---|---|---|
| ID | Chrom | Gene | Start | End | Strand |
| 1 | chr1 | ABCA4 | 94446393 | 94598705 | − |
| 2 | chr1 | ABCA4 | 94446393 | 94598705 | + |
| 3 | chr3 | Abca4 | 121735377 | 121894979 | + |
| 4 | chr3 | Abca4 | 121735377 | 121894979 | − |
| 5 | chr2 | ABCB11 | 169767448 | 169899833 | − |
| 6 | chr2 | ABCB11 | 169767448 | 169899833 | + |
| 7 | chr2 | Abcb11 | 69064338 | 69192673 | − |
| 8 | chr2 | Abcb11 | 69064338 | 69192673 | + |
| 9 | chr7 | ABCB4 | 87019360 | 87117019 | − |
| 10 | chr7 | ABCB4 | 87019360 | 87117019 | + |
| 11 | chr5 | Abcb4 | 8881720 | 8971226 | + |
| 12 | chr5 | Abcb4 | 8881720 | 8971226 | − |
| 13 | chr2 | ABCG5 | 44027610 | 44077958 | − |
| 14 | chr2 | ABCG5 | 44027610 | 44077958 | + |
| 15 | chr17 | Abcg5 | 85045573 | 85094263 | − |
| 16 | chr17 | Abcg5 | 85045573 | 85094263 | + |
| 17 | chr2 | ABCG8 | 44054102 | 44117605 | + |
| 18 | chr2 | ABCG8 | 44054102 | 44117605 | − |
| 19 | chr17 | Abcg8 | 85070470 | 85111673 | + |
| 20 | chr17 | Abcg8 | 85070470 | 85111673 | − |
| 21 | chr4 | ALB | 74257971 | 74299129 | + |
| 22 | chr4 | ALB | 74257971 | 74299129 | − |
| 23 | chr5 | Alb | 90877914 | 90917629 | + |
| 24 | chr5 | Alb | 90877914 | 90917629 | − |
| 25 | chr19 | APOE | 45397038 | 45424650 | + |
| 26 | chr19 | APOE | 45397038 | 45424650 | − |
| 27 | chr7 | Apoe | 20269592 | 20296515 | − |
| 28 | chr7 | Apoe | 20269592 | 20296515 | + |
| 29 | chr7 | EPO | 100306422 | 100333323 | + |
| 30 | chr7 | EPO | 100306422 | 100333323 | − |
| 31 | chr5 | Epo | 137912247 | 137939044 | − |
| 32 | chr5 | Epo | 137912247 | 137939044 | + |
| 33 | chr13 | F7 | 113748104 | 113786995 | + |
| 34 | chr13 | F7 | 113748104 | 113786995 | − |
| 35 | chr8 | F7 | 13014033 | 13047809 | + |
| 36 | chr8 | F7 | 13014033 | 13047809 | − |
| 37 | chr14 | GCH1 | 55296723 | 55381542 | − |
| 38 | chr14 | GCH1 | 55296723 | 55381542 | + |
| 39 | chr14 | Gch1 | 47761569 | 47821077 | − |
| 40 | chr14 | Gch1 | 47761569 | 47821077 | + |
| 41 | chr11 | Hba-a1 | 32184488 | 32209303 | + |
| 42 | chr1 | Hba-a1 | 32184488 | 32209303 | − |
| 43 | chr16 | HBA2 | 210845 | 235709 | + |
| 44 | chr16 | HBA2 | 210845 | 235709 | − |
| 45 | chr7 | IL6 | 22754765 | 22783621 | + |
| 46 | chr7 | IL6 | 22754765 | 22783621 | − |
| 47 | chr5 | Il6 | 30327700 | 30358508 | + |
| 48 | chr5 | Il6 | 30327700 | 30358508 | − |
| 49 | chr10 | KCNMA1 | 78632634 | 79409577 | − |
| 50 | chr10 | KCNMA1 | 78632634 | 79409577 | + |
| 51 | chr14 | Kcnma1 | 24105982 | 24835427 | − |
| 52 | chr14 | Kcnma1 | 24105982 | 24835427 | + |
| 53 | chr5 | KCNMB1 | 169793166 | 169828638 | − |
| 54 | chr5 | KCNMB1 | 169793166 | 169828638 | + |
| 55 | chr11 | Kcnmb1 | 33851012 | 33885638 | + |
| 56 | chr11 | Kcnmb1 | 33851012 | 33885638 | − |
| 57 | chr3 | KCNMB2 | 178242223 | 178574217 | + |
| 58 | chr3 | KCNMB2 | 178242223 | 178574217 | − |
| 59 | chr3 | Kcnmb2 | 31789624 | 32111102 | + |
| 60 | chr3 | Kcnmb2 | 31789624 | 32111102 | − |
| 61 | chr3 | KCNMB3 | 178945536 | 178989679 | − |
| 62 | chr3 | KCNMB3 | 178945536 | 178989679 | + |
| 63 | chr3 | Kcnmb3 | 32359242 | 32402891 | − |
| 64 | chr3 | Kcnmb3 | 32359242 | 32402891 | + |
| 65 | chr12 | KCNMB4 | 70748061 | 70840072 | + |
| 66 | chr12 | KCNMB4 | 70748061 | 70840072 | − |
| 67 | chr10 | Kcnmb4 | 115842923 | 115922579 | − |
| 68 | chr10 | Kcnmb4 | 115842923 | 115922579 | + |
| 69 | chr19 | KLF1 | 12983236 | 13010017 | − |
| 70 | chr19 | KLF1 | 12983236 | 13010017 | + |
| 71 | chr8 | Klfl | 87413826 | 87441194 | + |
| 72 | chr8 | Klfl | 87413826 | 87441194 | − |
| 73 | chr9 | KLF4 | 110235132 | 110264047 | − |
| 74 | chr9 | KLF4 | 110235132 | 110264047 | + |
| 75 | chr4 | Klf4 | 55528008 | 55557347 | − |
| 76 | chr4 | Klf4 | 55528008 | 55557347 | + |
| 77 | chr5 | MSX2 | 174139574 | 174169902 | + |
| 78 | chr5 | MSX2 | 174139574 | 174169902 | − |
| 79 | chr13 | Msx2 | 53550249 | 53580149 | − |
| 80 | chr13 | Msx2 | 53550249 | 53580149 | + |
| 81 | chr11 | MYBPC3 | 47340956 | 47386253 | − |
| 82 | chr11 | MYBPC3 | 47340956 | 47386253 | + |
| 83 | chr2 | Mybpc3 | 90946300 | 90988673 | + |
| 84 | chr2 | Mybpc3 | 90946300 | 90988673 | − |
| 85 | chr17 | NF1 | 29409944 | 29561782 | + |
| 86 | chr17 | NF1 | 29409944 | 29561782 | − |
| 87 | chr11 | Nf1 | 79141393 | 79407111 | + |
| 88 | chr11 | Nf1 | 79141393 | 79407111 | − |
| 89 | chr14 | NKX2-1 | 36973603 | 37000903 | − |
| 90 | chr14 | NKX2-1 | 36973603 | 37000903 | + |
| 91 | chr12 | Nkx2-1 | 57620923 | 57649895 | − |
| 92 | chr12 | Nkx2-1 | 57620923 | 57649895 | + |
| 93 | chr14 | NKX2-1-AS1 | 36976482 | 37004221 | + |
| 94 | chr14 | NKX2-1-AS1 | 36976482 | 37004221 | − |
| 95 | chr5 | RPS14 | 149811791 | 149841319 | − |
| 96 | chr5 | RPS14 | 149811791 | 149841319 | + |
| 97 | chr18 | Rps14 | 60922249 | 60950200 | + |
| 98 | chr18 | Rps14 | 60922249 | 60950200 | − |
| 99 | chr19 | RPS19 | 42351987 | 42387484 | + |
| 100 | chr19 | RPS19 | 42351987 | 42387484 | − |
| 101 | chr7 | Rps19 | 25657732 | 25686821 | + |
| 102 | chr7 | Rps19 | 25657732 | 25686821 | − |
| 103 | chr12 | SCARB1 | 125250173 | 125360519 | − |
| 104 | chr12 | SCARB1 | 125250173 | 125360519 | + |
| 105 | chr5 | Scarb1 | 125745456 | 125833464 | − |
| 106 | chr5 | Scarb1 | 125745456 | 125833464 | + |
| 107 | chrX | TSIX | 73000039 | 73061066 | + |
| 108 | chrX | TSIX | 73000039 | 73061066 | − |
| 109 | chrX | Tsix | 100614855 | 100692296 | + |
| 110 | chrX | Tsix | 100614855 | 100692296 | − |
| 111 | chrX | XIST | 73028494 | 73084588 | − |
| 112 | chrX | XIST | 73028494 | 73084588 | + |
| 113 | chrX | Xist | 100643711 | 100690572 | − |
| 114 | chrX | Xist | 100643711 | 100690572 | + |

[0272] PRC2-associated Regions and Target Genes

| | | | | Target Gene | Target Gene |
|---|---|---|---|---|---|
| SEQ | | Chr. | Chr. | (same | (opposite |
| ID | Chrom | Start | End | strand match) | strand match) |
| 115 | chr14 | 36986861 | 36986881 | NKX2-1(7080)[20], | NKX2-1- |
| | | | | SFTA3(253970) | AS1(100506237) |
| | | | | [−3871] | [−1601] |
| 116 | chr14 | 36988536 | 36988580 | NKX2-1-AS1 | NKX2-1(7080)[44], |
| | | | | (100506237)[44] | SFTA3(253970) |
| | | | | | [−5546] |
| 117 | chr14 | 36988883 | 36988928 | NKX2-1-AS1 | NKX2-1(7080)[45], |
| | | | | (100506237)[45] | SFTA3(253970) |
| | | | | | [−5893] |
| 118 | chr14 | 36990476 | 36990516 | NKX2-1-AS1 | NKX2-1(7080) |
| | | | | (100506237)[40] | [−1046], |
| | | | | | SFTA3(253970) |
| | | | | | [−7486] |
| 119 | chr2 | 44073970 | 44073995 | ABCG8(64241)[25] | ABCG5(64240) |
| | | | | | [−8012] |
| 120 | chrX | 73040480 | 73040522 | TSIX(9383)[42] | XIST(7503)[28] |
| 121 | chrX | 73040602 | 73040629 | TSIX(9383)[27] | XIST(7503)[27] |
| 122 | chrX | 73040916 | 73040963 | TSIX(9383)[47] | XIST(7503)[47] |
| 123 | chrX | 73041063 | 73041126 | XIST(7503)[63] | TSIX(9383)[63] |
| 124 | chrX | 73041342 | 73041457 | TSIX(9383)[115] | XIST(7503)[115] |
| 125 | chrX | 73041507 | 73041553 | XIST(7503)[46] | TSIX(9383)[46] |
| 126 | chrX | 73041604 | 73041654 | XIST(7503)[50] | TSIX(9383)[50] |
| 127 | chrX | 73041867 | 73041904 | TSIX(9383)[37] | XIST(7503)[37] |
| 128 | chrX | 73041939 | 73041980 | TSIX(9383)[41] | XIST(7503)[41] |
| 129 | chrX | 73042008 | 73042058 | XIST(7503)[50] | TSIX(9383)[50] |
| 130 | chrX | 73042193 | 73042230 | TSIX(9383)[37] | XIST(7503)[37] |
| 131 | chrX | 73042262 | 73042312 | XIST(7503)[50] | TSIX(9383)[50] |
| 132 | chrX | 73042622 | 73042666 | TSIX(9383)[44] | XIST(7503)[44] |
| 133 | chrX | 73042656 | 73042704 | XIST(7503)[48] | TSIX(9383)[48] |
| 134 | chrX | 73042683 | 73042736 | TSIX(9383)[53] | XIST(7503)[53] |
| 135 | chrX | 73043495 | 73043539 | TSIX(9383)[44] | XIST(7503)[44] |
| 136 | chrX | 73044414 | 73044456 | XIST(7503)[42] | TSIX(9383)[42] |
| 137 | chrX | 73045102 | 73045140 | TSIX(9383)[38] | XIST(7503)[38] |
| 138 | chrX | 73045291 | 73045331 | XIST(7503)[40] | TSIX(9383)[40] |
| 139 | chrX | 73045831 | 73045962 | TSIX(9383)[131] | XIST(7503)[131] |
| 140 | chrX | 73046079 | 73046125 | TSIX(9383)[46] | XIST(7503)[46] |
| 141 | chrX | 73046204 | 73046249 | TSIX(9383)[45] | XIST(7503)[45] |
| 142 | chrX | 73046359 | 73046395 | XIST(7503)[36] | TSIX(9383)[36] |
| 143 | chrX | 73047019 | 73047078 | XIST(7503)[59] | TSIX(9383)[59] |
| 144 | chrX | 73047115 | 73047151 | XIST(7503)[36] | TSIX(9383)[36] |
| 145 | chrX | 73047151 | 73047241 | TSIX(9383)[90] | XIST(7503)[90] |
| 146 | chrX | 73047249 | 73047320 | TSIX(9383)[71] | XIST(7503)[71] |
| 147 | chrX | 73047334 | 73047507 | TSIX(9383)[173] | XIST(7503)[173] |
| 148 | chrX | 73047553 | 73047643 | TSIX(9383)[90] | XIST(7503)[90] |
| 149 | chrX | 73047749 | 73047846 | TSIX(9383)[97] | XIST(7503)[97] |
| 150 | chrX | 73047764 | 73047816 | XIST(7503)[52] | TSIX(9383)[52] |
| 151 | chrX | 73047846 | 73047934 | TSIX(9383)[88] | XIST(7503)[88] |
| 152 | chrX | 73047885 | 73047934 | XIST(7503)[49] | TSIX(9383)[49] |
| 153 | chrX | 73048096 | 73048191 | XIST(7503)[95] | TSIX(9383)[95] |
| 154 | chrX | 73048191 | 73048255 | XIST(7503)[64] | TSIX(9383)[64] |
| 155 | chrX | 73048454 | 73048609 | XIST(7503)[155] | TSIX(9383)[155] |
| 156 | chrX | 73048928 | 73048968 | TSIX(9383)[40] | XIST(7503)[40] |
| 157 | chrX | 73050356 | 73050397 | TSIX(9383)[−1290] | XIST(7503)[41] |
| 158 | chrX | 73050387 | 73050434 | XIST(7503)[47] | TSIX(9383)[−1321] |
| 159 | chrX | 73050901 | 73050947 | TSIX(9383)[−1835] | XIST(7503)[46] |
| 160 | chrX | 73050939 | 73050987 | XIST(7503)[48] | TSIX(9383)[−1873] |
| 161 | chrX | 73051037 | 73051090 | XIST(7503)[53] | TSIX(9383)[−1971] |
| 162 | chrX | 73051063 | 73051129 | TSIX(9383)[−1997] | XIST(7503)[66] |
| 163 | chrX | 73051129 | 73051184 | TSIX(9383)[−2063] | XIST(7503)[55] |
| 164 | chrX | 73051299 | 73051322 | TSIX(9383)[−2233] | XIST(7503)[23] |
| 165 | chrX | 73051883 | 73052247 | TSIX(9383)[−2817] | XIST(7503)[364] |
| 166 | chr14 | 36984861 | 36988881 | NKX2-1(7080)[20], | NKX2-1-AS1 |
| | | | | SFTA3(253970) | (100506237) |
| | | | | [−3871] | [−1601] |
| 167 | chr14 | 36986536 | 36990580 | NKX2-1-AS1 | NKX2-1(7080)[44], |
| | | | | (100506237)[44] | SFTA3(253970) |
| | | | | | [−5546] |
| 168 | chr14 | 36986883 | 36990928 | NKX2-1-AS1 | NKX2-1(7080)[45], |
| | | | | (100506237)[45] | SFTA3(253970) |
| | | | | | [−5893] |
| 169 | chr14 | 36988476 | 36992516 | NKX2-1-AS1 | NKX2-1(7080) |
| | | | | (100506237)[40] | [−1046], |
| | | | | | SFTA3(253970)[−7486] |
| 170 | chr2 | 44071970 | 44075995 | ABCG8(64241)[25] | ABCG5(64240)[−8012] |
| 171 | chrX | 73038480 | 73042522 | TSIX(9383)[42] | XIST(7503)[28] |
| 172 | chrX | 73038602 | 73042629 | TSIX(9383)[27] | XIST(7503)[27] |
| 173 | chrX | 73038916 | 73042963 | TSIX(9383)[47] | XIST(7503)[47] |
| 174 | chrX | 73039063 | 73043126 | XIST(7503)[63] | TSIX(9383)[63] |
| 175 | chrX | 73039342 | 73043457 | TSIX(9383)[115] | XIST(7503)[115] |
| 176 | chrX | 73039507 | 73043553 | XIST(7503)[46] | TSIX(9383)[46] |
| 177 | chrX | 73039604 | 73043654 | XIST(7503)[50] | TSIX(9383)[50] |
| 178 | chrX | 73039867 | 73043904 | TSIX(9383)[37] | XIST(7503)[37] |
| 179 | chrX | 73039939 | 73043980 | TSIX(9383)[41] | XIST(7503)[41] |
| 180 | chrX | 73040008 | 73044058 | XIST(7503)[50] | TSIX(9383)[50] |
| 181 | chrX | 73040193 | 73044230 | TSIX(9383)[37] | XIST(7503)[37] |
| 182 | chrX | 73040262 | 73044312 | XIST(7503)[50] | TSIX(9383)[50] |
| 183 | chrX | 73040622 | 73044666 | TSIX(9383)[44] | XIST(7503)[44] |
| 184 | chrX | 73040656 | 73044704 | XIST(7503)[48] | TSIX(9383)[48] |
| 185 | chrX | 73040683 | 73044736 | TSIX(9383)[53] | XIST(7503)[53] |
| 186 | chrX | 73041495 | 73045539 | TSIX(9383)[44] | XIST(7503)[44] |
| 187 | chrX | 73042414 | 73046456 | XIST(7503)[42] | TSIX(9383)[42] |
| 188 | chrX | 73043102 | 73047140 | TSIX(9383)[38] | XIST(7503)[38] |
| 189 | chrX | 73043291 | 73047331 | XIST(7503)[40] | TSIX(9383)[40] |
| 190 | chrX | 73043831 | 73047962 | TSIX(9383)[131] | XIST(7503)[131] |
| 191 | chrX | 73044079 | 73048125 | TSIX(9383)[46] | XIST(7503)[46] |
| 192 | chrX | 73044204 | 73048249 | TSIX(9383)[45] | XIST(7503)[45] |
| 193 | chrX | 73044359 | 73048395 | XIST(7503)[36] | TSIX(9383)[36] |
| 194 | chrX | 73045019 | 73049078 | XIST(7503)[59] | TSIX(9383)[59] |
| 195 | chrX | 73045115 | 73049151 | XIST(7503)[36] | TSIX(9383)[36] |
| 196 | chrX | 73045151 | 73049241 | TSIX(9383)[90] | XIST(7503)[90] |
| 197 | chrX | 73045249 | 73049320 | TSIX(9383)[71] | XIST(7503)[71] |
| 198 | chrX | 73045334 | 73049507 | TSIX(9383)[173] | XIST(7503)[173] |
| 199 | chrX | 73045553 | 73049643 | TSIX(9383)[90] | XIST(7503)[90] |
| 200 | chrX | 73045749 | 73049846 | TSIX(9383)[97] | XIST(7503)[97] |
| 201 | chrX | 73045764 | 73049816 | XIST(7503)[52] | TSIX(9383)[52] |
| 202 | chrX | 73045846 | 73049934 | TSIX(9383)[88] | XIST(7503)[88] |
| 203 | chrX | 73045885 | 73049934 | XIST(7503)[49] | TSIX(9383)[49] |
| 204 | chrX | 73046096 | 73050191 | XIST(7503)[95] | TSIX(9383)[95] |
| 205 | chrX | 73046191 | 73050255 | XIST(7503)[64] | TSIX(9383)[64] |
| 206 | chrX | 73046454 | 73050609 | XIST(7503)[155] | TSIX(9383)[155] |
| 207 | chrX | 73046928 | 73050968 | TSIX(9383)[40] | XIST(7503)[40] |
| 208 | chrX | 73048356 | 73052397 | TSIX(9383)[−1290] | XIST(7503)[41] |
| 209 | chrX | 73048387 | 73052434 | XIST(7503)[47] | TSIX(9383)[−1321] |
| 210 | chrX | 73048901 | 73052947 | TSIX(9383)[−1835] | XIST(7503)[46] |
| 211 | chrX | 73048939 | 73052987 | XIST(7503)[48] | TSIX(9383)[−1873] |
| 212 | chrX | 73049037 | 73053090 | XIST(7503)[53] | TSIX(9383)[−1971] |
| 213 | chrX | 73049063 | 73053129 | TSIX(9383)[−1997] | XIST(7503)[66] |
| 214 | chrX | 73049129 | 73053184 | TSIX(9383)[−2063] | XIST(7503)[55] |
| 215 | chrX | 73049299 | 73053322 | TSIX(9383)[−2233] | XIST(7503)[23] |
| 216 | chrX | 73049883 | 73054247 | TSIX(9383)[−2817] | XIST(7503)[364] |
| 217 | chr1 | 94461155 | 94461211 | ABCA4(24)[56] | |
| 218 | chr1 | 94470336 | 94470384 | ABCA4(24)[48] | |
| 219 | chr1 | 94488089 | 94488111 | ABCA4(24)[22] | |
| 220 | chr1 | 94490150 | 94490199 | ABCA4(24)[49] | |
| 221 | chr1 | 94490940 | 94490987 | ABCA4(24)[47] | |
| 222 | chr1 | 94497300 | 94497324 | ABCA4(24)[24] | |
| 223 | chr1 | 94510139 | 94510165 | ABCA4(24)[26] | |
| 224 | chr1 | 94513510 | 94513552 | ABCA4(24)[42] | |
| 225 | chr1 | 94524386 | 94524428 | ABCA4(24)[42] | |
| 226 | chr1 | 94530706 | 94530751 | ABCA4(24)[45] | |
| 227 | chr1 | 94567151 | 94567192 | ABCA4(24)[41] | |
| 228 | chr1 | 94577865 | 94577942 | ABCA4(24)[77] | |
| 229 | chr1 | 94578716 | 94578743 | ABCA4(24)[27] | |
| 230 | chr1 | 94578803 | 94578849 | ABCA4(24)[46] | |
| 231 | chr1 | 94582229 | 94582284 | ABCA4(24)[55] | |
| 232 | chr10 | 78629613 | 78629655 | KCNMA1(3778)[42] | |
| 233 | chr10 | 78630733 | 78630785 | KCNMA1(3778)[52] | |
| 234 | chr10 | 78642280 | 78642326 | KCNMA1(3778)[46] | |
| 235 | chr10 | 78644328 | 78644370 | KCNMA1(3778)[42] | |
| 236 | chr10 | 78667691 | 78667745 | KCNMA1(3778)[54] | |
| 237 | chr10 | 78677601 | 78677644 | KCNMA1(3778)[43] | |
| 238 | chr10 | 78680557 | 78680593 | KCNMA1(3778)[36] | |
| 239 | chr10 | 78705044 | 78705089 | KCNMA1(3778)[45] | |
| 240 | chr10 | 78711760 | 78711793 | KCNMA1(3778)[33] | |
| 241 | chr10 | 78740807 | 78740861 | KCNMA1(3778)[54] | |
| 242 | chr10 | 78769520 | 78769576 | KCNMA1(3778)[56] | |
| 243 | chr10 | 78779099 | 78779141 | KCNMA1(3778)[42] | |
| 244 | chr10 | 78791211 | 78791262 | KCNMA1(3778)[51] | |
| 245 | chr10 | 78845533 | 78845588 | KCNMA1(3778)[55] | |
| 246 | chr10 | 78850011 | 78850052 | KCNMA1(3778)[41] | |
| 247 | chr10 | 78855366 | 78855404 | KCNMA1(3778)[38] | |
| 248 | chr10 | 78861471 | 78861516 | KCNMA1(3778)[45] | |
| 249 | chr10 | 78875404 | 78875450 | KCNMA1(3778)[46] | |
| 250 | chr10 | 78878853 | 78878893 | KCNMA1(3778)[40] | |
| 251 | chr10 | 78880465 | 78880508 | KCNMA1(3778)[43] | |
| 252 | chr10 | 78882309 | 78882356 | KCNMA1(3778)[47] | |
| 253 | chr10 | 78905600 | 78905646 | KCNMA1(3778)[46] | |
| 254 | chr10 | 78907193 | 78907238 | KCNMA1(3778)[45] | |
| 255 | chr10 | 78919611 | 78919662 | KCNMA1(3778)[51] | |
| 256 | chr10 | 78922716 | 78922755 | KCNMA1(3778)[39] | |
| 257 | chr10 | 78932445 | 78932486 | KCNMA1(3778)[41] | |
| 258 | chr10 | 78939334 | 78939375 | KCNMA1(3778)[41] | |
| 259 | chr10 | 78954311 | 78954360 | KCNMA1(3778)[49] | |
| 260 | chr10 | 78963205 | 78963246 | KCNMA1(3778)[41] | |
| 261 | chr10 | 78980966 | 78981002 | KCNMA1(3778)[36] | |
| 262 | chr10 | 78982273 | 78982299 | KCNMA1(3778)[26] | |
| 263 | chr10 | 78991917 | 78991948 | KCNMA1(3778)[31] | |
| 264 | chr10 | 78995700 | 78995723 | KCNMA1(3778)[23] | |
| 265 | chr10 | 79000429 | 79000475 | KCNMA1(3778)[46] | |
| 266 | chr10 | 79000988 | 79001048 | KCNMA1(3778)[60] | |
| 267 | chr10 | 79004132 | 79004169 | KCNMA1(3778)[37] | |
| 268 | chr10 | 79012036 | 79012082 | KCNMA1(3778)[46] | |
| 269 | chr10 | 79043629 | 79043713 | KCNMA1(3778)[84] | |
| 270 | chr10 | 79043735 | 79043776 | KCNMA1(3778)[41] | |
| 271 | chr10 | 79051867 | 79051892 | KCNMA1(3778)[25] | |
| 272 | chr10 | 79059398 | 79059427 | KCNMA1(3778)[29] | |
| 273 | chr10 | 79065270 | 79065315 | KCNMA1(3778)[45] | |
| 274 | chr10 | 79071963 | 79072010 | KCNMA1(3778)[47] | |
| 275 | chr10 | 79092586 | 79092610 | KCNMA1(3778)[24] | |
| 276 | chr10 | 79098692 | 79098754 | KCNMA1(3778)[62] | |
| 277 | chr10 | 79103619 | 79103679 | KCNMA1(3778)[60] | |
| 278 | chr10 | 79106087 | 79106126 | KCNMA1(3778)[39] | |
| 279 | chr10 | 79113696 | 79113726 | KCNMA1(3778)[30] | |
| 280 | chr10 | 79121038 | 79121064 | KCNMA1(3778)[26] | |
| 281 | chr10 | 79123461 | 79123508 | KCNMA1(3778)[47] | |
| 282 | chr10 | 79128649 | 79128674 | KCNMA1(3778)[25] | |
| 283 | chr10 | 79130855 | 79130906 | KCNMA1(3778)[51] | |
| 284 | chr10 | 79137862 | 79137911 | KCNMA1(3778)[49] | |
| 285 | chr10 | 79142914 | 79142974 | KCNMA1(3778)[60] | |
| 286 | chr10 | 79160700 | 79160757 | KCNMA1(3778)[57] | |
| 287 | chr10 | 79175190 | 79175227 | KCNMA1(3778)[37] | |
| 288 | chr10 | 79176113 | 79176157 | KCNMA1(3778)[44] | |
| 289 | chr10 | 79176891 | 79176936 | KCNMA1(3778)[45] | |
| 290 | chr10 | 79206797 | 79206843 | KCNMA1(3778)[46] | |
| 291 | chr10 | 79211736 | 79211771 | KCNMA1(3778)[35] | |
| 292 | chr10 | 79214804 | 79214831 | KCNMA1(3778)[27] | |
| 293 | chr10 | 79216114 | 79216160 | KCNMA1(3778)[46] | |
| 294 | chr10 | 79229577 | 79229617 | KCNMA1(3778)[40] | |
| 295 | chr10 | 79232479 | 79232526 | KCNMA1(3778)[47] | |
| 296 | chr10 | 79237815 | 79237861 | KCNMA1(3778)[46] | |
| 297 | chr10 | 79239621 | 79239687 | KCNMA1(3778)[66] | |
| 298 | chr10 | 79242574 | 79242602 | KCNMA1(3778)[28] | |
| 299 | chr10 | 79242732 | 79242836 | KCNMA1(3778)[104] | |
| 300 | chr10 | 79259952 | 79260000 | KCNMA1(3778)[48] | |
| 301 | chr10 | 79262273 | 79262301 | KCNMA1(3778)[28] | |
| 302 | chr10 | 79263991 | 79264025 | KCNMA1(3778)[34] | |
| 303 | chr10 | 79272190 | 79272243 | KCNMA1(3778)[53] | |
| 304 | chr10 | 79274548 | 79274591 | KCNMA1(3778)[43] | |
| 305 | chr10 | 79275967 | 79276017 | KCNMA1(3778)[50] | |
| 306 | chr10 | 79282016 | 79282056 | KCNMA1(3778)[40] | |
| 307 | chr10 | 79287017 | 79287060 | KCNMA1(3778)[43] | |
| 308 | chr10 | 79291295 | 79291341 | KCNMA1(3778)[46] | |
| 309 | chr10 | 79301530 | 79301565 | KCNMA1(3778)[35] | |
| 310 | chr10 | 79305254 | 79305297 | KCNMA1(3778)[43] | |
| 311 | chr10 | 79322214 | 79322260 | KCNMA1(3778)[46] | |
| 312 | chr10 | 79336558 | 79336616 | KCNMA1(3778)[58] | |
| 313 | chr10 | 79347012 | 79347057 | KCNMA1(3778)[45] | |
| 314 | chr10 | 79353089 | 79353135 | KCNMA1(3778)[46] | |
| 315 | chr10 | 79359648 | 79359696 | KCNMA1(3778)[48] | |
| 316 | chr10 | 79363037 | 79363070 | KCNMA1(3778)[33] | |
| 317 | chr10 | 79366843 | 79366880 | KCNMA1(3778)[37] | |
| 318 | chr10 | 79373997 | 79374021 | KCNMA1(3778)[24] | |
| 319 | chr10 | 79379079 | 79379117 | KCNMA1(3778)[38] | |
| 320 | chr10 | 79387162 | 79387185 | KCNMA1(3778)[23] | |
| 321 | chr10 | 79403994 | 79404031 | KCNMA1(3778)[−6417] | |
| 322 | chr10 | 79405184 | 79405218 | KCNMA1(3778)[−7607] | |
| 323 | chr10 | 79407109 | 79407167 | KCNMA1(3778)[−9532] | |
| 324 | chr11 | 47346830 | 47346877 | MYBPC3(4607)[−6079] | MADD(8567)[47] |
| 325 | chr11 | 47349129 | 47349166 | MYBPC3(4607)[−3790] | MADD(8567)[37] |
| 326 | chr11 | 47349402 | 47349425 | MYBPC3(4607)[−3531] | MADD(8567)[23] |
| 327 | chr11 | 47349922 | 47349969 | MYBPC3(4607)[−2987] | MADD(8567)[47] |
| 328 | chr11 | 47350926 | 47350947 | MYBPC3(4607)[−2009] | MADD(8567)[21] |
| 329 | chr11 | 47351199 | 47351257 | MYBPC3(4607)[−1699] | MADD(8567)[58] |
| 330 | chr11 | 47353239 | 47353282 | MYBPC3(4607)[43] | MADD(8567)[−1657] |
| 331 | chr11 | 47353515 | 47353561 | MYBPC3(4607)[46] | MADD(8567)[−1933] |
| 332 | chr11 | 47354183 | 47354224 | MYBPC3(4607)[41] | MADD(8567)[−2601] |
| 333 | chr11 | 47363623 | 47363669 | MYBPC3(4607)[46] | |
| 334 | chr11 | 47368706 | 47368756 | MYBPC3(4607)[50], | |
| | | | | SPI1(6688)[−7652] | |
| 335 | chr12 | 70792053 | 70792102 | KCNMB4(27345)[49] | |
| 336 | chr12 | 70792695 | 70792770 | KCNMB4(27345)[75] | |
| 337 | chr12 | 70798621 | 70798646 | KCNMB4(27345)[25] | |
| 338 | chr12 | 70803601 | 70803628 | KCNMB4(27345)[27] | |
| 339 | chr12 | 125263070 | 125263111 | SCARB1(949)[41] | |
| 340 | chr12 | 125267386 | 125267432 | SCARB1(949)[46] | |
| 341 | chr12 | 125293055 | 125293097 | SCARB1(949)[42] | |
| 342 | chr12 | 125294834 | 125294952 | SCARB1(949)[118] | |
| 343 | chr12 | 125296413 | 125296458 | SCARB1(949)[45] | |
| 344 | chr12 | 125313266 | 125313306 | SCARB1(949)[40] | |
| 345 | chr12 | 125336744 | 125336809 | SCARB1(949)[65] | |
| 346 | chr12 | 125339948 | 125339996 | SCARB1(949)[48] | |
| 347 | chr12 | 125341715 | 125341761 | SCARB1(949)[46] | |
| 348 | chr12 | 125346238 | 125346284 | SCARB1(949)[46] | |
| 349 | chr13 | 113750726 | 113750768 | MCF2L(23263)[42], | |
| | | | | F7(2155)[−9336] | |
| 350 | chr13 | 113761791 | 113761835 | F7(2155)[44], | |
| | | | | MCF2L(23263)[−7738] | |
| 351 | chr13 | 113761963 | 113762011 | F7(2155)[48], | |
| | | | | MCF2L(23263)[−7910] | |
| 352 | chr13 | 113762098 | 113762143 | F7(2155)[45], | |
| | | | | MCF2L(23263)[−8045] | |
| 353 | chr13 | 113762278 | 113762320 | F7(2155)[42], | |
| | | | | MCF2L(23263)[−8225] | |
| 354 | chr13 | 113762488 | 113762538 | F7(2155)[50], | |
| | | | | MCF2L(23263)[−8435] | |
| 355 | chr13 | 113762727 | 113762777 | F7(2155)[50], | |
| | | | | MCF2L(23263)[−8674] | |
| 356 | chr13 | 113762965 | 113763015 | F7(2155)[50], | |
| | | | | MCF2L(23263)[−8912] | |
| 357 | chr13 | 113763051 | 113763101 | F7(2155)[50], | |
| | | | | MCF2L(23263)[−8998] | |
| 358 | chr13 | 113763204 | 113763254 | F7(2155)[50], | |
| | | | | MCF2L(23263)[−9151] | |
| 359 | chr13 | 113766213 | 113766260 | F7(2155)[47] | |
| 360 | chr13 | 113773370 | 113773456 | F7(2155)[86], | |
| | | | | F10(2159)[−3656] | |
| 361 | chr13 | 113777491 | 113777545 | F10(2159)[54], | |
| | | | | F7(2155)[−2496], | |
| | | | | KARSP2(100419560) | |
| | | | | [−7190] | |
| 362 | chr14 | 36977137 | 36977181 | SFTA3(253970)[44], | |
| | | | | NKX2-1(7080)[−8422] | |
| 363 | chr14 | 36999959 | 36999992 | NKX2-1-AS1 | PHKBP2(5259)[−3039] |
| | | | | (100506237)[−7738] | |
| 364 | chr14 | 55308697 | 55308744 | GCH1(2643)[21] | |
| 365 | chr17 | 29422803 | 29422842 | NF1(4763)[39] | MIR4733(100616266) |
| | | | | | [−1360] |
| 366 | chr17 | 29422984 | 29423060 | NF1(4763)[76] | MIR4733(100616266) |
| | | | | | [−1541] |
| 367 | chr17 | 29427222 | 29427266 | NF1(4763)[44] | MIR4733(100616266) |
| | | | | | [−5779] |
| 368 | chr17 | 29450634 | 29450681 | NF1(4763)[47] | |
| 369 | chr17 | 29509584 | 29509630 | NF1(4763)[46] | |
| 370 | chr17 | 29528098 | 29528144 | NF1(4763)[46] | |
| 371 | chr17 | 29530237 | 29530378 | NF1(4763)[141] | |
| 372 | chr17 | 29551815 | 29551905 | NF1(4763)[90] | |
| 373 | chr17 | 29552208 | 29552244 | NF1(4763)[36] | |
| 374 | chr17 | 29553645 | 29553692 | NF1(4763)[47] | |
| 375 | chr17 | 29555929 | 29555961 | NF1(4763)[32] | |
| 376 | chr17 | 29557088 | 29557132 | NF1(4763)[44] | |
| 377 | chr17 | 29557306 | 29557393 | NF1(4763)[87] | |
| 378 | chr17 | 29558089 | 29558145 | NF1(4763)[56] | |
| 379 | chr17 | 29559123 | 29559169 | NF1(4763)[46] | |
| 380 | chr17 | 29560088 | 29560130 | NF1(4763)[42] | |
| 381 | chr17 | 29562830 | 29562881 | NF1(4763)[51] | |
| 382 | chr17 | 29586063 | 29586090 | NF1(4763)[27] | |
| 383 | chr17 | 29587384 | 29587430 | NF1(4763)[46] | |
| 384 | chr17 | 29592284 | 29592353 | NF1(4763)[69] | LOC100506582 |
| | | | | | (100506582)[−6672] |
| 385 | chr17 | 29597280 | 29597325 | NF1(4763)[45] | LOC100506582 |
| | | | | | (100506582)[−1700] |
| 386 | chr17 | 29600686 | 29600743 | NF1(4763)[57] | LOC100506582 |
| | | | | | (100506582)[−46] |
| 387 | chr17 | 29622727 | 29622772 | NF1(4763)[45] | OMG(4974)[45], |
| | | | | | EVI2B(2124)[−8015] |
| 388 | chr17 | 29624203 | 29624243 | NF1(4763)[40] | OMG(4974)[40], |
| | | | | | EVI2B(2124)[−6544] |
| 389 | chr17 | 29632137 | 29632176 | NF1(4763)[39] | EVI2B(2124)[39], |
| | | | | | OMG(4974)[−7757] |
| 390 | chr17 | 29645542 | 29645588 | NF1(4763)[46] | EVI2A(2123)[46], |
| | | | | | EVI2B(2124)[−4412] |
| 391 | chr17 | 29652908 | 29652954 | NF1(4763)[46] | EVI2A(2123)[−4141] |
| 392 | chr17 | 29654648 | 29654694 | NF1(4763)[46] | EVI2A(2123)[−5881] |
| 393 | chr17 | 29656000 | 29656231 | NF1(4763)[231] | EVI2A(2123)[−7233] |
| 394 | chr17 | 29661997 | 29662043 | NF1(4763)[46] | |
| 395 | chr17 | 29662124 | 29662222 | NF1(4763)[98] | |
| 396 | chr17 | 29663799 | 29663844 | NF1(4763)[45], | |
| | | | | AK4P1(206)[−8487] | |
| 397 | chr17 | 29666116 | 29666200 | NF1(4763)[84], | |
| | | | | AK4P1(206)[−6131] | |
| 398 | chr17 | 29670089 | 29670135 | NF1(4763)[46], | |
| | | | | AK4P1(206)[−2196] | |
| 399 | chr17 | 29677359 | 29677402 | NF1(4763)[43], | |
| | | | | AK4P1(206)[−2840] | |
| 400 | chr17 | 29679700 | 29679745 | NF1(4763)[45], | |
| | | | | AK4P1(206)[−5181] | |
| 401 | chr17 | 29684358 | 29684404 | NF1(4763)[46], | |
| | | | | AK4P1(206)[−9839] | |
| 402 | chr17 | 29687534 | 29687580 | NF1(4763)[46] | |
| 403 | chr17 | 29701521 | 29701559 | NF1(4763)[38] | |
| 404 | chr17 | 29701699 | 29701764 | NF1(4763)[65] | |
| 405 | chr17 | 29701858 | 29701900 | NF1(4763)[42] | |
| 406 | chr17 | 29701930 | 29701982 | NF1(4763)[52] | |
| 407 | chr17 | 29702147 | 29702195 | NF1(4763)[48] | |
| 408 | chr19 | 12985488 | 12985537 | DNASE2(1777)[−487], | MAST1(22983)[49] |
| | | | | KLF1(10661)[−9699] | |
| 409 | chr19 | 12986844 | 12986889 | DNASE2(1777)[45], | MAST1(22983)[−1078] |
| | | | | KLF1(10661)[−8347] | |
| 410 | chr19 | 12987025 | 12987071 | DNASE2(1777)[46], | MAST1(22983)[−1259] |
| | | | | KLF1(10661)[−8165] | |
| 411 | chr19 | 12989310 | 12989356 | DNASE2(1777)[46], | MAST1(22983)[−3544] |
| | | | | KLF1(10661)[−5880] | |
| 412 | chr19 | 12991866 | 12991916 | DNASE2(1777)[50], | MAST1(22983)[−6100] |
| | | | | KLF1(10661)[−3320] | |
| 413 | chr19 | 12997134 | 12997187 | KLF1(10661)[53], | GCDH(2639)[−4786], |
| | | | | DNASE2(1777)[−4799] | RPS6P25(729389)[−7720] |
| 414 | chr19 | 13004386 | 13004431 | SYCE2(256126)[−5462], | GCDH(2639)[45], |
| | | | | KLF1(10661)[−6369] | RPS6P25(729389)[−476] |
| 415 | chr19 | 13005098 | 13005138 | SYCE2(256126)[−4755], | GCDH(2639)[40], |
| | | | | KLF1(10661)[−7081] | RPS6P25(729389)[40] |
| 416 | chr19 | 13005101 | 13005147 | SYCE2(256126)[−4746], | GCDH(2639)[46], |
| | | | | KLF1(10661)[−7084] | RPS6P25(729389)[46] |
| 417 | chr19 | 13005182 | 13005227 | SYCE2(256126)[−4666], | GCDH(2639)[45], |
| | | | | KLF1(10661)[−7165] | RPS6P25(729389)[45] |
| 418 | chr19 | 13005259 | 13005306 | SYCE2(256126)[−4587], | GCDH(2639)[47], |
| | | | | KLF1(10661)[−7242] | RPS6P25(729389)[47] |
| 419 | chr19 | 13005316 | 13005362 | SYCE2(256126)[−4531], | GCDH(2639)[46], |
| | | | | KLF1(10661)[−7299] | RPS6P25(729389)[46] |
| 420 | chr19 | 13005316 | 13005361 | SYCE2(256126)[−4532], | GCDH(2639)[45], |
| | | | | KLF1(10661)[−7299] | RPS6P25(729389)[45] |
| 421 | chr19 | 13005317 | 13005388 | SYCE2(256126)[−4505], | GCDH(2639)[71], |
| | | | | KLF1(10661)[−7300] | RPS6P25(729389)[71] |
| 422 | chr19 | 13005319 | 13005390 | SYCE2(256126)[−4503], | GCDH(2639)[71], |
| | | | | KLF1(10661)[−7302] | RPS6P25(729389)[71] |
| 423 | chr19 | 13005404 | 13005449 | SYCE2(256126)[−4444], | GCDH(2639)[45], |
| | | | | KLF1(10661)[−7387] | RPS6P25(729389)[45] |
| 424 | chr19 | 13005501 | 13005544 | SYCE2(256126)[−4349], | GCDH(2639)[43], |
| | | | | KLF1(10661)[−7484] | RPS6P25(729389)[43] |
| 425 | chr19 | 42354723 | 42354769 | DMRTC2(63946)[46], | LYPD4(147719)[−6215] |
| | | | | RPS19(6223)[−9218] | |
| 426 | chr19 | 42365188 | 42365230 | RPS19(6223)[42], | |
| | | | | DMRTC2(63946)[−8791] | |
| 427 | chr19 | 42373171 | 42373212 | RPS19(6223)[41], | |
| | | | | CD79A(973)[−7977] | |
| 428 | chr19 | 42373237 | 42373262 | RPS19(6223)[25], | |
| | | | | CD79A(973)[−7927] | |
| 429 | chr19 | 42373507 | 42373552 | RPS19(6223)[45], | |
| | | | | CD79A(973)[−7637] | |
| 430 | chr19 | 42373574 | 42373621 | RPS19(6223)[47], | |
| | | | | CD79A(973)[−7568] | |
| 431 | chr19 | 42381914 | 42381962 | CD79A(973)[48], | |
| | | | | ARHGEF1(9138)[−5304], | |
| | | | | RPS19(6223)[−6430] | |
| 432 | chr19 | 42382156 | 42382181 | CD79A(973)[25], | |
| | | | | ARHGEF1(9138)[−5085], | |
| | | | | RPS19(6223)[−6672] | |
| 433 | chr19 | 45406347 | 45406389 | TOMM40(10452)[42], | |
| | | | | APOE(348)[−2649] | |
| 434 | chr19 | 45406676 | 45406716 | TOMM40(10452)[40], | |
| | | | | APOE(348)[−2322] | |
| 435 | chr19 | 45409123 | 45409165 | APOE(348)[42], | |
| | | | | TOMM40(10452)[−2177], | |
| | | | | APOC1(341)[−8755] | |
| 436 | chr19 | 45409468 | 45409514 | APOE(348)[46], | |
| | | | | TOMM40(10452)[−2522], | |
| | | | | APOC1(341)[−8406] | |
| 437 | chr19 | 45409837 | 45409883 | APOE(348)[46], | |
| | | | | TOMM40(10452)[−2891], | |
| | | | | APOC1(341)[−8037] | |
| 438 | chr19 | 45410983 | 45411028 | APOE(348)[45], | |
| | | | | TOMM40(10452)[−4037], | |
| | | | | APOC1(341)[−6892] | |
| 439 | chr19 | 45411789 | 45411830 | APOE(348)[41], | |
| | | | | TOMM40(10452)[−4843], | |
| | | | | APOC1(341)[−6090] | |
| 440 | chr19 | 45411950 | 45411997 | APOE(348)[47], | |
| | | | | TOMM40(10452)[−5004], | |
| | | | | APOC1(341)[−5923] | |
| 441 | chr19 | 45412076 | 45412107 | APOE(348)[31], | |
| | | | | TOMM40(10452)[−5130], | |
| | | | | APOC1(341)[−5813] | |
| 442 | chr19 | 45412191 | 45412233 | APOE(348)[42], | |
| | | | | TOMM40(10452)[−5245], | |
| | | | | APOC1(341)[−5687] | |
| 443 | chr19 | 45412296 | 45412341 | APOE(348)[45], | |
| | | | | TOMM40(10452)[−5350], | |
| | | | | APOC1(341)[−5579] | |
| 444 | chr19 | 45412414 | 45412489 | APOE(348)[75], | |
| | | | | APOC1(341)[−5431], | |
| | | | | TOMM40(10452)[−5468] | |
| 445 | chr19 | 45417965 | 45417997 | APOC1(341)[32], | |
| | | | | APOE(348)[−5315] | |
| 446 | chr19 | 45422276 | 45422322 | APOC1(341)[46], | |
| | | | | APOC1P1(342)[−7737], | |
| | | | | APOE(348)[−9626] | |
| 447 | chr2 | 169834044 | 169834091 | ABCB11(8647)[47] | |
| 448 | chr2 | 169847801 | 169847845 | ABCB11(8647)[44] | |
| 449 | chr2 | 169864883 | 169864953 | ABCB11(8647)[70] | |
| 450 | chr2 | 169873562 | 169873606 | ABCB11(8647)[44] | |
| 451 | chr2 | 169884497 | 169884543 | ABCB11(8647)[46] | |
| 452 | chr3 | 178262467 | 178262509 | KCNMB2(10242)[42] | |
| 453 | chr3 | 178273909 | 178273974 | KCNMB2(10242)[65] | |
| 454 | chr3 | 178312101 | 178312150 | KCNMB2(10242)[49] | |
| 455 | chr3 | 178325388 | 178325440 | KCNMB2(10242)[52] | |
| 456 | chr3 | 178355343 | 178355366 | KCNMB2(10242)[23] | |
| 457 | chr3 | 178443657 | 178443714 | KCNMB2(10242)[57] | |
| 458 | chr3 | 178462415 | 178462458 | KCNMB2(10242)[43] | |
| 459 | chr3 | 178482580 | 178482633 | KCNMB2(10242)[53] | |
| 460 | chr3 | 178490530 | 178490578 | KCNMB2(10242)[48] | |
| 461 | chr3 | 178494782 | 178494829 | KCNMB2(10242)[47] | |
| 462 | chr3 | 178499505 | 178499551 | KCNMB2(10242)[46] | |
| 463 | chr3 | 178519508 | 178519550 | KCNMB2(10242)[42] | |
| 464 | chr3 | 178522482 | 178522525 | KCNMB2(10242)[43] | |
| 465 | chr4 | 74270805 | 74270842 | ALB(213)[37] | |
| 466 | chr5 | 149822154 | 149822182 | RPS14(6208)[−1609] | |
| 467 | chr5 | 149823875 | 149823920 | RPS14(6208)[45] | |
| 468 | chr5 | 149824066 | 149824142 | RPS14(6208)[76] | |
| 469 | chr5 | 149824975 | 149825102 | RPS14(6208)[127] | |
| 470 | chr5 | 149825211 | 149825252 | RPS14(6208)[41] | |
| 471 | chr5 | 149826062 | 149826106 | RPS14(6208)[44] | |
| 472 | chr5 | 149826427 | 149826474 | RPS14(6208)[47] | |
| 473 | chr5 | 149827162 | 149827207 | RPS14(6208)[45] | |
| 474 | chr5 | 149827228 | 149827288 | RPS14(6208)[60] | |
| 475 | chr5 | 149827893 | 149827999 | RPS14(6208)[106] | |
| 476 | chr5 | 149828191 | 149828229 | RPS14(6208)[38] | |
| 477 | chr5 | 149828307 | 149828336 | RPS14(6208)[29] | |
| 478 | chr5 | 149828432 | 149828572 | RPS14(6208)[140] | |
| 479 | chr5 | 149828975 | 149829049 | RPS14(6208)[74] | |
| 480 | chr5 | 169805858 | 169805905 | KCNMB1(3779)[47] | KCNIP1(30820)[47] |
| 481 | chr5 | 169810714 | 169810760 | KCNMB1(3779)[46] | KCNIP1(30820)[46] |
| 482 | chr5 | 169820767 | 169820804 | KCNMB1(3779)[−4129] | KCNIP1(30820)[37] |
| 483 | chr5 | 174152063 | 174152079 | MSX2(4488)[16] | |
| 484 | chr5 | 174153274 | 174153310 | MSX2(4488)[36] | |
| 485 | chr7 | 22761823 | 22761871 | IL6(3569)[−4894] | LOC541472(541472) |
| | | | | | [−3142] |
| 486 | chr7 | 22769164 | 22769233 | IL6(3569)[69] | LOC541472(541472) |
| | | | | | [−1929] |
| 487 | chr7 | 87021788 | 87021837 | ABCB4(5244)[−9523] | CROT(54677)[49] |
| 488 | chr7 | 87035115 | 87035147 | ABCB4(5244)[32] | CROT(54677)[−6003] |
| 489 | chr7 | 87044500 | 87044513 | ABCB4(5244)[13] | |
| 490 | chr7 | 87048084 | 87048132 | ABCB4(5244)[48] | |
| 491 | chr7 | 87072736 | 87072784 | ABCB4(5244)[48] | |
| 492 | chr7 | 87085372 | 87085423 | ABCB4(5244)[51] | |
| 493 | chr7 | 87093573 | 87093616 | ABCB4(5244)[43] | |
| 494 | chr7 | 87101049 | 87101072 | ABCB4(5244)[23] | |
| 495 | chr9 | 110247275 | 110247311 | KLF4(9314)[36] | |
| 496 | chr9 | 110247470 | 110247514 | KLF4(9314)[44] | |
| 497 | chr9 | 110247602 | 110247640 | KLF4(9314)[38] | |
| 498 | chr9 | 110247741 | 110247808 | KLF4(9314)[67] | |
| 499 | chr9 | 110247872 | 110247919 | KLF4(9314)[47] | |
| 500 | chr9 | 110247997 | 110248042 | KLF4(9314)[45] | |
| 501 | chr9 | 110248060 | 110248114 | KLF4(9314)[54] | |
| 502 | chr9 | 110249341 | 110249387 | KLF4(9314)[46] | |
| 503 | chr9 | 110249423 | 110249467 | KLF4(9314)[44] | |
| 504 | chr9 | 110249601 | 110249651 | KLF4(9314)[50] | |
| 505 | chr9 | 110249844 | 110249889 | KLF4(9314)[45] | |
| 506 | chr9 | 110249928 | 110249969 | KLF4(9314)[41] | |
| 507 | chr9 | 110250045 | 110250116 | KLF4(9314)[71] | |
| 508 | chr9 | 110250337 | 110250400 | KLF4(9314)[63] | |
| 509 | chr9 | 110250458 | 110250511 | KLF4(9314)[53] | |
| 510 | chr9 | 110251313 | 110251356 | KLF4(9314)[43] | |
| 511 | chr9 | 110251454 | 110251496 | KLF4(9314)[42] | |
| 512 | chr9 | 110251516 | 110251550 | KLF4(9314)[34] | |
| 513 | chrX | 73014615 | 73014667 | TSIX(9383)[52] | |
| 514 | chrX | 73014761 | 73014821 | TSIX(9383)[60] | |
| 515 | chrX | 73014834 | 73014851 | TSIX(9383)[17] | |
| 516 | chrX | 73014885 | 73014932 | TSIX(9383)[47] | |
| 517 | chrX | 73015097 | 73015192 | TSIX(9383)[95] | |
| 518 | chrX | 73059662 | 73059707 | XIST(7503)[45] | |
| 519 | chrX | 73060611 | 73060656 | XIST(7503)[45] | |
| 520 | chrX | 73061961 | 73062008 | XIST(7503)[47] | |
| 521 | chrX | 73062356 | 73062405 | XIST(7503)[49] | |
| 522 | chrX | 73062680 | 73062740 | XIST(7503)[60] | |
| 523 | chrX | 73063258 | 73063312 | XIST(7503)[54] | |
| 524 | chrX | 73063736 | 73063759 | XIST(7503)[23] | |
| 525 | chrX | 73069729 | 73069767 | XIST(7503)[38] | |
| 526 | chrX | 73070916 | 73070940 | XIST(7503)[24] | |
| 527 | chrX | 73070999 | 73071071 | XIST(7503)[72] | |
| 528 | chrX | 73071203 | 73071245 | XIST(7503)[42] | |
| 529 | chrX | 73071384 | 73071459 | XIST(7503)[75] | |
| 530 | chrX | 73071471 | 73071508 | XIST(7503)[37] | |
| 531 | chrX | 73071676 | 73071725 | XIST(7503)[49] | |
| 532 | chrX | 73071753 | 73071785 | XIST(7503)[32] | |
| 533 | chrX | 73072209 | 73072261 | XIST(7503)[52] | |
| 534 | chr1 | 94459155 | 94463211 | ABCA4(24)[56] | |
| 535 | chr1 | 94468336 | 94472384 | ABCA4(24)[48] | |
| 536 | chr1 | 94486089 | 94490111 | ABCA4(24)[22] | |
| 537 | chr1 | 94488150 | 94492199 | ABCA4(24)[49] | |
| 538 | chr1 | 94488940 | 94492987 | ABCA4(24)[47] | |
| 539 | chr1 | 94495300 | 94499324 | ABCA4(24)[24] | |
| 540 | chr1 | 94508139 | 94512165 | ABCA4(24)[26] | |
| 541 | chr1 | 94511510 | 94515552 | ABCA4(24)[42] | |
| 542 | chr1 | 94522386 | 94526428 | ABCA4(24)[42] | |
| 543 | chr1 | 94528706 | 94532751 | ABCA4(24)[45] | |
| 544 | chr1 | 94565151 | 94569192 | ABCA4(24)[41] | |
| 545 | chr1 | 94575865 | 94579942 | ABCA4(24)[77] | |
| 546 | chr1 | 94576716 | 94580743 | ABCA4(24)[27] | |
| 547 | chr1 | 94576803 | 94580849 | ABCA4(24)[46] | |
| 548 | chr1 | 94580229 | 94584284 | ABCA4(24)[55] | |
| 549 | chr10 | 78627613 | 78631655 | KCNMA1(3778)[42] | |
| 550 | chr10 | 78628733 | 78632785 | KCNMA1(3778)[52] | |
| 551 | chr10 | 78640280 | 78644326 | KCNMA1(3778)[46] | |
| 552 | chr10 | 78642328 | 78646370 | KCNMA1(3778)[42] | |
| 553 | chr10 | 78665691 | 78669745 | KCNMA1(3778)[54] | |
| 554 | chr10 | 78675601 | 78679644 | KCNMA1(3778)[43] | |
| 555 | chr10 | 78678557 | 78682593 | KCNMA1(3778)[36] | |
| 556 | chr10 | 78703044 | 78707089 | KCNMA1(3778)[45] | |
| 557 | chr10 | 78709760 | 78713793 | KCNMA1(3778)[33] | |
| 558 | chr10 | 78738807 | 78742861 | KCNMA1(3778)[54] | |
| 559 | chr10 | 78767520 | 78771576 | KCNMA1(3778)[56] | |
| 560 | chr10 | 78777099 | 78781141 | KCNMA1(3778)[42] | |
| 561 | chr10 | 78789211 | 78793262 | KCNMA1(3778)[51] | |
| 562 | chr10 | 78843533 | 78847588 | KCNMA1(3778)[55] | |
| 563 | chr10 | 78848011 | 78852052 | KCNMA1(3778)[41] | |
| 564 | chr10 | 78853366 | 78857404 | KCNMA1(3778)[38] | |
| 565 | chr10 | 78859471 | 78863516 | KCNMA1(3778)[45] | |
| 566 | chr10 | 78873404 | 78877450 | KCNMA1(3778)[46] | |
| 567 | chr10 | 78876853 | 78880893 | KCNMA1(3778)[40] | |
| 568 | chr10 | 78878465 | 78882508 | KCNMA1(3778)[43] | |
| 569 | chr10 | 78880309 | 78884356 | KCNMA1(3778)[47] | |
| 570 | chr10 | 78903600 | 78907646 | KCNMA1(3778)[46] | |
| 571 | chr10 | 78905193 | 78909238 | KCNMA1(3778)[45] | |
| 572 | chr10 | 78917611 | 78921662 | KCNMA1(3778)[51] | |
| 573 | chr10 | 78920716 | 78924755 | KCNMA1(3778)[39] | |
| 574 | chr10 | 78930445 | 78934486 | KCNMA1(3778)[41] | |
| 575 | chr10 | 78937334 | 78941375 | KCNMA1(3778)[41] | |
| 576 | chr10 | 78952311 | 78956360 | KCNMA1(3778)[49] | |
| 577 | chr10 | 78961205 | 78965246 | KCNMA1(3778)[41] | |
| 578 | chr10 | 78978966 | 78983002 | KCNMA1(3778)[36] | |
| 579 | chr10 | 78980273 | 78984299 | KCNMA1(3778)[26] | |
| 580 | chr10 | 78989917 | 78993948 | KCNMA1(3778)[31] | |
| 581 | chr10 | 78993700 | 78997723 | KCNMA1(3778)[23] | |
| 582 | chr10 | 78998429 | 79002475 | KCNMA1(3778)[46] | |
| 583 | chr10 | 78998988 | 79003048 | KCNMA1(3778)[60] | |
| 584 | chr10 | 79002132 | 79006169 | KCNMA1(3778)[37] | |
| 585 | chr10 | 79010036 | 79014082 | KCNMA1(3778)[46] | |
| 586 | chr10 | 79041629 | 79045713 | KCNMA1(3778)[84] | |
| 587 | chr10 | 79041735 | 79045776 | KCNMA1(3778)[41] | |
| 588 | chr10 | 79049867 | 79053892 | KCNMA1(3778)[25] | |
| 589 | chr10 | 79057398 | 79061427 | KCNMA1(3778)[29] | |
| 590 | chr10 | 79063270 | 79067315 | KCNMA1(3778)[45] | |
| 591 | chr10 | 79069963 | 79074010 | KCNMA1(3778)[47] | |
| 592 | chr10 | 79090586 | 79094610 | KCNMA1(3778)[24] | |
| 593 | chr10 | 79096692 | 79100754 | KCNMA1(3778)[62] | |
| 594 | chr10 | 79101619 | 79105679 | KCNMA1(3778)[60] | |
| 595 | chr10 | 79104087 | 79108126 | KCNMA1(3778)[39] | |
| 596 | chr10 | 79111696 | 79115726 | KCNMA1(3778)[30] | |
| 597 | chr10 | 79119038 | 79123064 | KCNMA1(3778)[26] | |
| 598 | chr10 | 79121461 | 79125508 | KCNMA1(3778)[47] | |
| 599 | chr10 | 79126649 | 79130674 | KCNMA1(3778)[25] | |
| 600 | chr10 | 79128855 | 79132906 | KCNMA1(3778)[51] | |
| 601 | chr10 | 79135862 | 79139911 | KCNMA1(3778)[49] | |
| 602 | chr10 | 79140914 | 79144974 | KCNMA1(3778)[60] | |
| 603 | chr10 | 79158700 | 79162757 | KCNMA1(3778)[57] | |
| 604 | chr10 | 79173190 | 79177227 | KCNMA1(3778)[37] | |
| 605 | chr10 | 79174113 | 79178157 | KCNMA1(3778)[44] | |
| 606 | chr10 | 79174891 | 79178936 | KCNMA1(3778)[45] | |
| 607 | chr10 | 79204797 | 79208843 | KCNMA1(3778)[46] | |
| 608 | chr10 | 79209736 | 79213771 | KCNMA1(3778)[35] | |
| 609 | chr10 | 79212804 | 79216831 | KCNMA1(3778)[27] | |
| 610 | chr10 | 79214114 | 79218160 | KCNMA1(3778)[46] | |
| 611 | chr10 | 79227577 | 79231617 | KCNMA1(3778)[40] | |
| 612 | chr10 | 79230479 | 79234526 | KCNMA1(3778)[47] | |
| 613 | chr10 | 79235815 | 79239861 | KCNMA1(3778)[46] | |
| 614 | chr10 | 79237621 | 79241687 | KCNMA1(3778)[66] | |
| 615 | chr10 | 79240574 | 79244602 | KCNMA1(3778)[28] | |
| 616 | chr10 | 79240732 | 79244836 | KCNMA1(3778)[104] | |
| 617 | chr10 | 79257952 | 79262000 | KCNMA1(3778)[48] | |
| 618 | chr10 | 79260273 | 79264301 | KCNMA1(3778)[28] | |
| 619 | chr10 | 79261991 | 79266025 | KCNMA1(3778)[34] | |
| 620 | chr10 | 79270190 | 79274243 | KCNMA1(3778)[53] | |
| 621 | chr10 | 79272548 | 79276591 | KCNMA1(3778)[43] | |
| 622 | chr10 | 79273967 | 79278017 | KCNMA1(3778)[50] | |
| 623 | chr10 | 79280016 | 79284056 | KCNMA1(3778)[40] | |
| 624 | chr10 | 79285017 | 79289060 | KCNMA1(3778)[43] | |
| 625 | chr10 | 79289295 | 79293341 | KCNMA1(3778)[46] | |
| 626 | chr10 | 79299530 | 79303565 | KCNMA1(3778)[35] | |
| 627 | chr10 | 79303254 | 79307297 | KCNMA1(3778)[43] | |
| 628 | chr10 | 79320214 | 79324260 | KCNMA1(3778)[46] | |
| 629 | chr10 | 79334558 | 79338616 | KCNMA1(3778)[58] | |
| 630 | chr10 | 79345012 | 79349057 | KCNMA1(3778)[45] | |
| 631 | chr10 | 79351089 | 79355135 | KCNMA1(3778)[46] | |
| 632 | chr10 | 79357648 | 79361696 | KCNMA1(3778)[48] | |
| 633 | chr10 | 79361037 | 79365070 | KCNMA1(3778)[33] | |
| 634 | chr10 | 79364843 | 79368880 | KCNMA1(3778)[37] | |
| 635 | chr10 | 79371997 | 79376021 | KCNMA1(3778)[24] | |
| 636 | chr10 | 79377079 | 79381117 | KCNMA1(3778)[38] | |
| 637 | chr10 | 79385162 | 79389185 | KCNMA1(3778)[23] | |
| 638 | chr10 | 79401994 | 79406031 | KCNMA1(3778)[−6417] | |
| 639 | chr10 | 79403184 | 79407218 | KCNMA1(3778)[−7607] | |
| 640 | chr10 | 79405109 | 79409167 | KCNMA1(3778)[−9532] | |
| 641 | chr11 | 47344830 | 47348877 | MYBPC3(4607)[−6079] | MADD(8567)[47] |
| 642 | chr11 | 47347129 | 47351166 | MYBPC3(4607)[−3790] | MADD(8567)[37] |
| 643 | chr11 | 47347402 | 47351425 | MYBPC3(4607)[−3531] | MADD(8567)[23] |
| 644 | chr11 | 47347922 | 47351969 | MYBPC3(4607)[−2987] | MADD(8567)[47] |
| 645 | chr11 | 47348926 | 47352947 | MYBPC3(4607)[−2009] | MADD(8567)[21] |
| 646 | chr11 | 47349199 | 47353257 | MYBPC3(4607)[−1699] | MADD(8567)[58] |
| 647 | chr11 | 47351239 | 47355282 | MYBPC3(4607)[43] | MADD(8567)[−1657] |
| 648 | chr11 | 47351515 | 47355561 | MYBPC3(4607)[46] | MADD(8567)[−1933] |
| 649 | chr11 | 47352183 | 47356224 | MYBPC3(4607)[41] | MADD(8567)[−2601] |
| 650 | chr11 | 47361623 | 47365669 | MYBPC3(4607)[46] | |
| 651 | chr11 | 47366706 | 47370756 | MYBPC3(4607)[50], | |
| | | | | SPI1(6688)[−7652] | |
| 652 | chr12 | 70790053 | 70794102 | KCNMB4(27345)[49] | |
| 653 | chr12 | 70790695 | 70794770 | KCNMB4(27345)[75] | |
| 654 | chr12 | 70796621 | 70800646 | KCNMB4(27345)[25] | |
| 655 | chr12 | 70801601 | 70805628 | KCNMB4(27345)[27] | |
| 656 | chr12 | 125261070 | 125265111 | SCARB1(949)[41] | |
| 657 | chr12 | 125265386 | 125269432 | SCARB1(949)[46] | |
| 658 | chr12 | 125291055 | 125295097 | SCARB1(949)[42] | |
| 659 | chr12 | 125292834 | 125296952 | SCARB1(949)[118] | |
| 660 | chr12 | 125294413 | 125298458 | SCARB1(949)[45] | |
| 661 | chr12 | 125311266 | 125315306 | SCARB1(949)[40] | |
| 662 | chr12 | 125334744 | 125338809 | SCARB1(949)[65] | |
| 663 | chr12 | 125337948 | 125341996 | SCARB1(949)[48] | |
| 664 | chr12 | 125339715 | 125343761 | SCARB1(949)[46] | |
| 665 | chr12 | 125344238 | 125348284 | SCARB1(949)[46] | |
| 666 | chr13 | 113748726 | 113752768 | MCF2L(23263)[42], | |
| | | | | F7(2155)[−9336] | |
| 667 | chr13 | 113759791 | 113763835 | F7(2155)[44], | |
| | | | | MCF2L(23263)[−7738] | |
| 668 | chr13 | 113759963 | 113764011 | F7(2155)[48], | |
| | | | | MCF2L(23263)[−7910] | |
| 669 | chr13 | 113760098 | 113764143 | F7(2155)[45], | |
| | | | | MCF2L(23263)[−8045] | |
| 670 | chr13 | 113760278 | 113764320 | F7(2155)[42], | |
| | | | | MCF2L(23263)[−8225] | |
| 671 | chr13 | 113760488 | 113764538 | F7(2155)[50], | |
| | | | | MCF2L(23263)[−8435] | |
| 672 | chr13 | 113760727 | 113764777 | F7(2155)[50], | |
| | | | | MCF2L(23263)[−8674] | |
| 673 | chr13 | 113760965 | 113765015 | F7(2155)[50], | |
| | | | | MCF2L(23263)[−8912] | |
| 674 | chr13 | 113761051 | 113765101 | F7(2155)[50], | |
| | | | | MCF2L(23263)[−8998] | |
| 675 | chr13 | 113761204 | 113765254 | F7(2155)[50], | |
| | | | | MCF2L(23263)[−9151] | |
| 676 | chr13 | 113764213 | 113768260 | F7(2155)[47] | |
| 677 | chr13 | 113771370 | 113775456 | F7(2155)[86], | |
| | | | | F10(2159)[−3656] | |
| 678 | chr13 | 113775491 | 113779545 | F10(2159)[54], | |
| | | | | F7(2155)[−2496], | |
| | | | | KARSP2(100419560) | |
| | | | | [−7190] | |
| 679 | chr14 | 36975137 | 36979181 | SFTA3(253970)[44], | |
| | | | | NKX2-1(7080)[−8422] | |
| 680 | chr14 | 36997959 | 37001992 | NKX2-1-AS1 | PHKBP2(5259)[−3039] |
| | | | | (100506237)[−7738] | |
| 681 | chr14 | 55306697 | 55310744 | GCH1(2643)[21] | |
| 682 | chr17 | 29420803 | 29424842 | NF1(4763)[39] | MIR4733(100616266) |
| | | | | | [−1360] |
| 683 | chr17 | 29420984 | 29425060 | NF1(4763)[76] | MIR4733(100616266) |
| | | | | | [−1541] |
| 684 | chr17 | 29425222 | 29429266 | NF1(4763)[44] | MIR4733(100616266) |
| | | | | | [−5779] |
| 685 | chr17 | 29448634 | 29452681 | NF1(4763)[47] | |
| 686 | chr17 | 29507584 | 29511630 | NF1(4763)[46] | |
| 687 | chr17 | 29526098 | 29530144 | NF1(4763)[46] | |
| 688 | chr17 | 29528237 | 29532378 | NF1(4763)[141] | |
| 689 | chr17 | 29549815 | 29553905 | NF1(4763)[90] | |
| 690 | chr17 | 29550208 | 29554244 | NF1(4763)[36] | |
| 691 | chr17 | 29551645 | 29555692 | NF1(4763)[47] | |
| 692 | chr17 | 29553929 | 29557961 | NF1(4763)[32] | |
| 693 | chr17 | 29555088 | 29559132 | NF1(4763)[44] | |
| 694 | chr17 | 29555306 | 29559393 | NF1(4763)[87] | |
| 695 | chr17 | 29556089 | 29560145 | NF1(4763)[56] | |
| 696 | chr17 | 29557123 | 29561169 | NF1(4763)[46] | |
| 697 | chr17 | 29558088 | 29562130 | NF1(4763)[42] | |
| 698 | chr17 | 29560830 | 29564881 | NF1(4763)[51] | |
| 699 | chr17 | 29584063 | 29588090 | NF1(4763)[27] | |
| 700 | chr17 | 29585384 | 29589430 | NF1(4763)[46] | |
| 701 | chr17 | 29590284 | 29594353 | NF1(4763)[69] | LOC100506582 |
| | | | | | (100506582) |
| | | | | | [−6672] |
| 702 | chr17 | 29595280 | 29599325 | NF1(4763)[45] | LOC100506582 |
| | | | | | (100506582) |
| | | | | | [−1700] |
| 703 | chr17 | 29598686 | 29602743 | NF1(4763)[57] | LOC100506582 |
| | | | | | (100506582)[−46] |
| 704 | chr17 | 29620727 | 29624772 | NF1(4763)[45] | OMG(4974)[45], |
| | | | | | EVI2B(2124)[−8015] |
| 705 | chr17 | 29622203 | 29626243 | NF1(4763)[40] | OMG(4974)[40], |
| | | | | | EVI2B(2124)[−6544] |
| 706 | chr17 | 29630137 | 29634176 | NF1(4763)[39] | EVI2B(2124)[39], |
| | | | | | OMG(4974)[−7757] |
| 707 | chr17 | 29643542 | 29647588 | NF1(4763)[46] | EVI2A(2123)[46], |
| | | | | | EVI2B(2124)[−4412] |
| 708 | chr17 | 29650908 | 29654954 | NF1(4763)[46] | EVI2A(2123)[−4141] |
| 709 | chr17 | 29652648 | 29656694 | NF1(4763)[46] | EVI2A(2123)[−5881] |
| 710 | chr17 | 29654000 | 29658231 | NF1(4763)[231] | EVI2A(2123)[−7233] |
| 711 | chr17 | 29659997 | 29664043 | NF1(4763)[46] | |
| 712 | chr17 | 29660124 | 29664222 | NF1(4763)[98] | |
| 713 | chr17 | 29661799 | 29665844 | NF1(4763)[45], | |
| | | | | AK4P1(206)[−8487] | |
| 714 | chr17 | 29664116 | 29668200 | NF1(4763)[84], | |
| | | | | AK4P1(206)[−6131] | |
| 715 | chr17 | 29668089 | 29672135 | NF1(4763)[46], | |
| | | | | AK4P1(206)[−2196] | |
| 716 | chr17 | 29675359 | 29679402 | NF1(4763)[43], | |
| | | | | AK4P1(206)[−2840] | |
| 717 | chr17 | 29677700 | 29681745 | NF1(4763)[45], | |
| | | | | AK4P1(206)[−5181] | |
| 718 | chr17 | 29682358 | 29686404 | NF1(4763)[46], | |
| | | | | AK4P1(206)[−9839] | |
| 719 | chr17 | 29685534 | 29689580 | NF1(4763)[46] | |
| 720 | chr17 | 29699521 | 29703559 | NF1(4763)[38] | |
| 721 | chr17 | 29699699 | 29703764 | NF1(4763)[65] | |
| 722 | chr17 | 29699858 | 29703900 | NF1(4763)[42] | |
| 723 | chr17 | 29699930 | 29703982 | NF1(4763)[52] | |
| 724 | chr17 | 29700147 | 29704195 | NF1(4763)[48] | |
| 725 | chr19 | 12983488 | 12987537 | DNASE2(1777)[−487], | MAST1(22983)[49] |
| | | | | KLF1(10661)[−9699] | |
| 726 | chr19 | 12984844 | 12988889 | DNASE2(1777)[45], | MAST1(22983)[−1078] |
| | | | | KLF1(10661)[−8347] | |
| 727 | chr19 | 12985025 | 12989071 | DNASE2(1777)[46], | MAST1(22983)[−1259] |
| | | | | KLF1(10661)[−8165] | |
| 728 | chr19 | 12987310 | 12991356 | DNASE2(1777)[46], | MAST1(22983)[−3544] |
| | | | | KLF1(10661)[−5880] | |
| 729 | chr19 | 12989866 | 12993916 | DNASE2(1777)[50], | MAST1(22983)[−6100] |
| | | | | KLF1(10661)[−3320] | |
| 730 | chr19 | 12995134 | 12999187 | KLF1(10661)[53], | GCDH(2639)[−4786], |
| | | | | DNASE2(1777)[−4799] | RPS6P25(729389)[−7720] |
| 731 | chr19 | 13002386 | 13006431 | SYCE2(256126)[−5462], | GCDH(2639)[45], |
| | | | | KLF1(10661)[−6369] | RPS6P25(729389)[−476] |
| 732 | chr19 | 13003098 | 13007138 | SYCE2(256126)[−4755], | GCDH(2639)[40], |
| | | | | KLF1(10661)[−7081] | RPS6P25(729389)[40] |
| 733 | chr19 | 13003101 | 13007147 | SYCE2(256126)[−4746], | GCDH(2639)[46], |
| | | | | KLF1(10661)[−7084] | RPS6P25(729389)[46] |
| 734 | chr19 | 13003182 | 13007227 | SYCE2(256126)[−4666], | GCDH(2639)[45], |
| | | | | KLF1(10661)[−7165] | RPS6P25(729389)[45] |
| 735 | chr19 | 13003259 | 13007306 | SYCE2(256126)[−4587], | GCDH(2639)[47], |
| | | | | KLF1(10661)[−7242] | RPS6P25(729389)[47] |
| 736 | chr19 | 13003316 | 13007362 | SYCE2(256126)[−4531], | GCDH(2639)[46], |
| | | | | KLF1(10661)[−7299] | RPS6P25(729389)[46] |
| 737 | chr19 | 13003316 | 13007361 | SYCE2(256126)[−4532], | GCDH(2639)[45], |
| | | | | KLF1(10661)[−7299] | RPS6P25(729389)[45] |
| 738 | chr19 | 13003317 | 13007388 | SYCE2(256126)[−4505], | GCDH(2639)[71], |
| | | | | KLF1(10661)[−7300] | RPS6P25(729389)[71] |
| 739 | chr19 | 13003319 | 13007390 | SYCE2(256126)[−4503], | GCDH(2639)[71], |
| | | | | KLF1(10661)[−7302] | RPS6P25(729389)[71] |
| 740 | chr19 | 13003404 | 13007449 | SYCE2(256126)[−4444], | GCDH(2639)[45], |
| | | | | KLF1(10661)[−7387] | RPS6P25(729389)[45] |
| 741 | chr19 | 13003501 | 13007544 | SYCE2(256126)[−4349], | GCDH(2639)[43], |
| | | | | KLF1(10661)[−7484] | RPS6P25(729389)[43] |
| 742 | chr19 | 42352723 | 42356769 | DMRTC2(63946)[46], | LYPD4(147719)[−6215] |
| | | | | RPS19(6223)[−9218] | |
| 743 | chr19 | 42363188 | 42367230 | RPS19(6223)[42], | |
| | | | | DMRTC2(63946)[−8791] | |
| 744 | chr19 | 42371171 | 42375212 | RPS19(6223)[41], | |
| | | | | CD79A(973)[−7977] | |
| 745 | chr19 | 42371237 | 42375262 | RPS19(6223)[25], | |
| | | | | CD79A(973)[−7927] | |
| 746 | chr19 | 42371507 | 42375552 | RPS19(6223)[45], | |
| | | | | CD79A(973)[−7637] | |
| 747 | chr19 | 42371574 | 42375621 | RPS19(6223)[47], | |
| | | | | CD79A(973)[−7568] | |
| 748 | chr19 | 42379914 | 42383962 | CD79A(973)[48], | |
| | | | | ARHGEF1(9138)[−5304], | |
| | | | | RPS19(6223)[−6430] | |
| 749 | chr19 | 42380156 | 42384181 | CD79A(973)[25], | |
| | | | | ARHGEF1(9138)[−5085], | |
| | | | | RPS19(6223)[−6672] | |
| 750 | chr19 | 45404347 | 45408389 | TOMM40(10452)[42], | |
| | | | | APOE(348)[−2649] | |
| 751 | chr19 | 45404676 | 45408716 | TOMM40(10452)[40], | |
| | | | | APOE(348)[−2322] | |
| 752 | chr19 | 45407123 | 45411165 | APOE(348)[42], | |
| | | | | TOMM40(10452)[−2177], | |
| | | | | APOC1(341)[−8755] | |
| 753 | chr19 | 45407468 | 45411514 | APOE(348)[46], | |
| | | | | TOMM40(10452)[−2522], | |
| | | | | APOC1(341)[−8406] | |
| 754 | chr19 | 45407837 | 45411883 | APOE(348)[46], | |
| | | | | TOMM40(10452)[−2891], | |
| | | | | APOC1(341)[−8037] | |
| 755 | chr19 | 45408983 | 45413028 | APOE(348)[45], | |
| | | | | TOMM40(10452)[−4037], | |
| | | | | APOC1(341)[−6892] | |
| 756 | chr19 | 45409789 | 45413830 | APOE(348)[41], | |
| | | | | TOMM40(10452)[−4843], | |
| | | | | APOC1(341)[−6090] | |
| 757 | chr19 | 45409950 | 45413997 | APOE(348)[47], | |
| | | | | TOMM40(10452)[−5004], | |
| | | | | APOC1(341)[−5923] | |
| 758 | chr19 | 45410076 | 45414107 | APOE(348)[31], | |
| | | | | TOMM40(10452)[−5130], | |
| | | | | APOC1(341)[−5813] | |
| 759 | chr19 | 45410191 | 45414233 | APOE(348)[42], | |
| | | | | TOMM40(10452)[−5245], | |
| | | | | APOC1(341)[−5687] | |
| 760 | chr19 | 45410296 | 45414341 | APOE(348)[45], | |
| | | | | TOMM40(10452)[−5350], | |
| | | | | APOC1(341)[−5579] | |
| 761 | chr19 | 45410414 | 45414489 | APOE(348)[75], | |
| | | | | APOC1(341)[−5431], | |
| | | | | TOMM40(10452)[−5468] | |
| 762 | chr19 | 45415965 | 45419997 | APOC1(341)[32], | |
| | | | | APOE(348)[−5315] | |
| 763 | chr19 | 45420276 | 45424322 | APOC1(341)[46], | |
| | | | | APOC1P1(342)[−7737], | |
| | | | | APOE(348)[−9626] | |
| 764 | chr2 | 169832044 | 169836091 | ABCB11(8647)[47] | |
| 765 | chr2 | 169845801 | 169849845 | ABCB11(8647)[44] | |
| 766 | chr2 | 169862883 | 169866953 | ABCB11(8647)[70] | |
| 767 | chr2 | 169871562 | 169875606 | ABCB11(8647)[44] | |
| 768 | chr2 | 169882497 | 169886543 | ABCB11(8647)[46] | |
| 769 | chr3 | 178260467 | 178264509 | KCNMB2(10242)[42] | |
| 770 | chr3 | 178271909 | 178275974 | KCNMB2(10242)[65] | |
| 771 | chr3 | 178310101 | 178314150 | KCNMB2(10242)[49] | |
| 772 | chr3 | 178323388 | 178327440 | KCNMB2(10242)[52] | |
| 773 | chr3 | 178353343 | 178357366 | KCNMB2(10242)[23] | |
| 774 | chr3 | 178441657 | 178445714 | KCNMB2(10242)[57] | |
| 775 | chr3 | 178460415 | 178464458 | KCNMB2(10242)[43] | |
| 776 | chr3 | 178480580 | 178484633 | KCNMB2(10242)[53] | |
| 777 | chr3 | 178488530 | 178492578 | KCNMB2(10242)[48] | |
| 778 | chr3 | 178492782 | 178496829 | KCNMB2(10242)[47] | |
| 779 | chr3 | 178497505 | 178501551 | KCNMB2(10242)[46] | |
| 780 | chr3 | 178517508 | 178521550 | KCNMB2(10242)[42] | |
| 781 | chr3 | 178520482 | 178524525 | KCNMB2(10242)[43] | |
| 782 | chr4 | 74268805 | 74272842 | ALB(213)[37] | |
| 783 | chr5 | 149820154 | 149824182 | RPS14(6208)[−1609] | |
| 784 | chr5 | 149821875 | 149825920 | RPS14(6208)[45] | |
| 785 | chr5 | 149822066 | 149826142 | RPS14(6208)[76] | |
| 786 | chr5 | 149822975 | 149827102 | RPS14(6208)[127] | |
| 787 | chr5 | 149823211 | 149827252 | RPS14(6208)[41] | |
| 788 | chr5 | 149824062 | 149828106 | RPS14(6208)[44] | |
| 789 | chr5 | 149824427 | 149828474 | RPS14(6208)[47] | |
| 790 | chr5 | 149825162 | 149829207 | RPS14(6208)[45] | |
| 791 | chr5 | 149825228 | 149829288 | RPS14(6208)[60] | |
| 792 | chr5 | 149825893 | 149829999 | RPS14(6208)[106] | |
| 793 | chr5 | 149826191 | 149830229 | RPS14(6208)[38] | |
| 794 | chr5 | 149826307 | 149830336 | RPS14(6208)[29] | |
| 795 | chr5 | 149826432 | 149830572 | RPS14(6208)[140] | |
| 796 | chr5 | 149826975 | 149831049 | RPS14(6208)[74] | |
| 797 | chr5 | 169803858 | 169807905 | KCNMB1(3779)[47] | KCNIP1(30820)[47] |
| 798 | chr5 | 169808714 | 169812760 | KCNMB1(3779)[46] | KCNIP1(30820)[46] |
| 799 | chr5 | 169818767 | 169822804 | KCNMB1(3779)[−4129] | KCNIP1(30820)[37] |
| 800 | chr5 | 174150063 | 174154079 | MSX2(4488)[16] | |
| 801 | chr5 | 174151274 | 174155310 | MSX2(4488)[36] | |
| 802 | chr7 | 22759823 | 22763871 | IL6(3569)[−4894] | LOC541472(541472) |
| | | | | | [−3142] |
| 803 | chr7 | 22767164 | 22771233 | IL6(3569)[69] | LOC541472(541472) |
| | | | | | [−1929] |
| 804 | chr7 | 87019788 | 87023837 | ABCB4(5244)[−9523] | CROT(54677)[49] |
| 805 | chr7 | 87033115 | 87037147 | ABCB4(5244)[32] | CROT(54677)[−6003] |
| 806 | chr7 | 87042500 | 87046513 | ABCB4(5244)[13] | |
| 807 | chr7 | 87046084 | 87050132 | ABCB4(5244)[48] | |
| 808 | chr7 | 87070736 | 87074784 | ABCB4(5244)[48] | |
| 809 | chr7 | 87083372 | 87087423 | ABCB4(5244)[51] | |
| 810 | chr7 | 87091573 | 87095616 | ABCB4(5244)[43] | |
| 811 | chr7 | 87099049 | 87103072 | ABCB4(5244)[23] | |
| 812 | chr9 | 110245275 | 110249311 | KLF4(9314)[36] | |
| 813 | chr9 | 110245470 | 110249514 | KLF4(9314)[44] | |
| 814 | chr9 | 110245602 | 110249640 | KLF4(9314)[38] | |
| 815 | chr9 | 110245741 | 110249808 | KLF4(9314)[67] | |
| 816 | chr9 | 110245872 | 110249919 | KLF4(9314)[47] | |
| 817 | chr9 | 110245997 | 110250042 | KLF4(9314)[45] | |
| 818 | chr9 | 110246060 | 110250114 | KLF4(9314)[54] | |
| 819 | chr9 | 110247341 | 110251387 | KLF4(9314)[46] | |
| 820 | chr9 | 110247423 | 110251467 | KLF4(9314)[44] | |
| 821 | chr9 | 110247601 | 110251651 | KLF4(9314)[50] | |
| 822 | chr9 | 110247844 | 110251889 | KLF4(9314)[45] | |
| 823 | chr9 | 110247928 | 110251969 | KLF4(9314)[41] | |
| 824 | chr9 | 110248045 | 110252116 | KLF4(9314)[71] | |
| 825 | chr9 | 110248337 | 110252400 | KLF4(9314)[63] | |
| 826 | chr9 | 110248458 | 110252511 | KLF4(9314)[53] | |
| 827 | chr9 | 110249313 | 110253356 | KLF4(9314)[43] | |
| 828 | chr9 | 110249454 | 110253496 | KLF4(9314)[42] | |
| 829 | chr9 | 110249516 | 110253550 | KLF4(9314)[34] | |
| 830 | chrX | 73012615 | 73016667 | TSIX(9383)[52] | |
| 831 | chrX | 73012761 | 73016821 | TSIX(9383)[60] | |
| 832 | chrX | 73012834 | 73016851 | TSIX(9383)[17] | |
| 833 | chrX | 73012885 | 73016932 | TSIX(9383)[47] | |
| 834 | chrX | 73013097 | 73017192 | TSIX(9383)[95] | |
| 835 | chrX | 73057662 | 73061707 | XIST(7503)[45] | |
| 836 | chrX | 73058611 | 73062656 | XIST(7503)[45] | |
| 837 | chrX | 73059961 | 73064008 | XIST(7503)[47] | |
| 838 | chrX | 73060356 | 73064405 | XIST(7503)[49] | |
| 839 | chrX | 73060680 | 73064740 | XIST(7503)[60] | |
| 840 | chrX | 73061258 | 73065312 | XIST(7503)[54] | |
| 841 | chrX | 73061736 | 73065759 | XIST(7503)[23] | |
| 842 | chrX | 73067729 | 73071767 | XIST(7503)[38] | |
| 843 | chrX | 73068916 | 73072940 | XIST(7503)[24] | |
| 844 | chrX | 73068999 | 73073071 | XIST(7503)[72] | |
| 845 | chrX | 73069203 | 73073245 | XIST(7503)[42] | |
| 846 | chrX | 73069384 | 73073459 | XIST(7503)[75] | |
| 847 | chrX | 73069471 | 73073508 | XIST(7503)[37] | |
| 848 | chrX | 73069676 | 73073725 | XIST(7503)[49] | |
| 849 | chrX | 73069753 | 73073785 | XIST(7503)[32] | |
| 850 | chrX | 73070209 | 73074261 | XIST(7503)[52] | |
| 851 | chr1 | 94466781 | 94466832 | | ABCA4(24)[51] |
| 852 | chr1 | 94473889 | 94473910 | | ABCA4(24)[21] |
| 853 | chr1 | 94485296 | 94485334 | | ABCA4(24)[38] |
| 854 | chr1 | 94500569 | 94500628 | | ABCA4(24)[59] |
| 855 | chr1 | 94501631 | 94501676 | | ABCA4(24)[45] |
| 856 | chr1 | 94522891 | 94522952 | | ABCA4(24)[61] |
| 857 | chr1 | 94525598 | 94525642 | | ABCA4(24)[44] |
| 858 | chr1 | 94525842 | 94525886 | | ABCA4(24)[44] |
| 859 | chr1 | 94530569 | 94530635 | | ABCA4(24)[66] |
| 860 | chr1 | 94539507 | 94539622 | | ABCA4(24)[115] |
| 861 | chr1 | 94547647 | 94547692 | | ABCA4(24)[45] |
| 862 | chr1 | 94560611 | 94560659 | | ABCA4(24)[48] |
| 863 | chr1 | 94563698 | 94563754 | | ABCA4(24)[56] |
| 864 | chr1 | 94571041 | 94571083 | | ABCA4(24)[42] |
| 865 | chr1 | 94573651 | 94573691 | | ABCA4(24)[40] |
| 866 | chr10 | 78685151 | 78685197 | | KCNMA1(3778)[46] |
| 867 | chr10 | 78689142 | 78689192 | | KCNMA1(3778)[50] |
| 868 | chr10 | 78708464 | 78708504 | | KCNMA1(3778)[40] |
| 869 | chr10 | 78716319 | 78716374 | | KCNMA1(3778)[55] |
| 870 | chr10 | 78722370 | 78722396 | | KCNMA1(3778)[26] |
| 871 | chr10 | 78723774 | 78723815 | | KCNMA1(3778)[41] |
| 872 | chr10 | 78729084 | 78729113 | | KCNMA1(3778)[29] |
| 873 | chr10 | 78752630 | 78752676 | | KCNMA1(3778)[46] |
| 874 | chr10 | 78759868 | 78759918 | | KCNMA1(3778)[50] |
| 875 | chr10 | 78779835 | 78779887 | | KCNMA1(3778)[52] |
| 876 | chr10 | 78785547 | 78785590 | | KCNMA1(3778)[43] |
| 877 | chr10 | 78801561 | 78801594 | | KCNMA1(3778)[33] |
| 878 | chr10 | 78810580 | 78810630 | | KCNMA1(3778)[50] |
| 879 | chr10 | 78822728 | 78822794 | | KCNMA1(3778)[66] |
| 880 | chr10 | 78835485 | 78835524 | | KCNMA1(3778)[39] |
| 881 | chr10 | 78843239 | 78843280 | | KCNMA1(3778)[41] |
| 882 | chr10 | 78846138 | 78846212 | | KCNMA1(3778)[74] |
| 883 | chr10 | 78889318 | 78889362 | | KCNMA1(3778)[44] |
| 884 | chr10 | 78930450 | 78930482 | | KCNMA1(3778)[32] |
| 885 | chr10 | 78932522 | 78932569 | | KCNMA1(3778)[47] |
| 886 | chr10 | 78933601 | 78933670 | | KCNMA1(3778)[69] |
| 887 | chr10 | 78956386 | 78956428 | | KCNMA1(3778)[42] |
| 888 | chr10 | 78962402 | 78962445 | | KCNMA1(3778)[43] |
| 889 | chr10 | 78963889 | 78963938 | | KCNMA1(3778)[49] |
| 890 | chr10 | 78991762 | 78991808 | | KCNMA1(3778)[46] |
| 891 | chr10 | 79017833 | 79017878 | | KCNMA1(3778)[45] |
| 892 | chr10 | 79063881 | 79063925 | | KCNMA1(3778)[44] |
| 893 | chr10 | 79072056 | 79072404 | | KCNMA1(3778)[348] |
| 894 | chr10 | 79075759 | 79075796 | | KCNMA1(3778)[37] |
| 895 | chr10 | 79101345 | 79101387 | | KCNMA1(3778)[42] |
| 896 | chr10 | 79104514 | 79104557 | | KCNMA1(3778)[43] |
| 897 | chr10 | 79104641 | 79104686 | | KCNMA1(3778)[45] |
| 898 | chr10 | 79105014 | 79105066 | | KCNMA1(3778)[52] |
| 899 | chr10 | 79106171 | 79106217 | | KCNMA1(3778)[46] |
| 900 | chr10 | 79113303 | 79113347 | | KCNMA1(3778)[44] |
| 901 | chr10 | 79120099 | 79120151 | | KCNMA1(3778)[52] |
| 902 | chr10 | 79136296 | 79136746 | | KCNMA1(3778)[450] |
| 903 | chr10 | 79139585 | 79139630 | | KCNMA1(3778)[45] |
| 904 | chr10 | 79150870 | 79150903 | | KCNMA1(3778)[33] |
| 905 | chr10 | 79156024 | 79156072 | | KCNMA1(3778)[48] |
| 906 | chr10 | 79176560 | 79176592 | | KCNMA1(3778)[32] |
| 907 | chr10 | 79182928 | 79182974 | | KCNMA1(3778)[46] |
| 908 | chr10 | 79204071 | 79204112 | | KCNMA1(3778)[41] |
| 909 | chr10 | 79229863 | 79229923 | | KCNMA1(3778)[60] |
| 910 | chr10 | 79238017 | 79238063 | | KCNMA1(3778)[46] |
| 911 | chr10 | 79260292 | 79260336 | | KCNMA1(3778)[44] |
| 912 | chr10 | 79266456 | 79266489 | | KCNMA1(3778)[33] |
| 913 | chr10 | 79275762 | 79275811 | | KCNMA1(3778)[49] |
| 914 | chr10 | 79277312 | 79277336 | | KCNMA1(3778)[24] |
| 915 | chr10 | 79347212 | 79347259 | | KCNMA1(3778)[47] |
| 916 | chr10 | 79379618 | 79379662 | | KCNMA1(3778)[44] |
| 917 | chr10 | 79381206 | 79381246 | | KCNMA1(3778)[40] |
| 918 | chr10 | 79393109 | 79393151 | | KCNMA1(3778)[42] |
| 919 | chr10 | 79397200 | 79397242 | | KCNMA1(3778)[42] |
| 920 | chr10 | 79398470 | 79398518 | | KCNMA1(3778)[−893] |
| 921 | chr11 | 47345490 | 47345534 | MADD(8567)[44] | MYBPC3(4607)[−7422] |
| 922 | chr11 | 47353788 | 47353833 | MADD(8567)[−2206] | MYBPC3(4607)[45] |
| 923 | chr11 | 47357530 | 47357572 | MADD(8567)[−5948] | MYBPC3(4607)[42] |
| 924 | chr11 | 47376415 | 47376465 | | SPI1(6688)[50], |
| | | | | | MYBPC3(4607)[−2162] |
| 925 | chr12 | 70822409 | 70822458 | | KCNMB4(27345) |
| | | | | | [49] |
| 926 | chr12 | 125263000 | 125263044 | | SCARB1(949)[44] |
| 927 | chr12 | 125270910 | 125270957 | | SCARB1(949)[47] |
| 928 | chr12 | 125271326 | 125271370 | | SCARB1(949)[44] |
| 929 | chr12 | 125284749 | 125284793 | | SCARB1(949)[44] |
| 930 | chr12 | 125287695 | 125287738 | | SCARB1(949)[43] |
| 931 | chr12 | 125296449 | 125296495 | | SCARB1(949)[46] |
| 932 | chr12 | 125298841 | 125298886 | | SCARB1(949)[45] |
| 933 | chr12 | 125302095 | 125302139 | | SCARB1(949)[44] |
| 934 | chr12 | 125334008 | 125334054 | | SCARB1(949)[46] |
| 935 | chr12 | 125340056 | 125340101 | | SCARB1(949)[45] |
| 936 | chr12 | 125341676 | 125341713 | | SCARB1(949)[37] |
| 937 | chr12 | 125347385 | 125347428 | | SCARB1(949)[43] |
| 938 | chr12 | 125348319 | 125348353 | | SCARB1(949)[34] |
| 939 | chr13 | 113761639 | 113761686 | | F7(2155)[47], |
| | | | | | MCF2L(23263)[−7586] |
| 940 | chr13 | 113761640 | 113761681 | | F7(2155)[41], |
| | | | | | MCF2L(23263)[−7587] |
| 941 | chr13 | 113761689 | 113761796 | | F7(2155)[107], |
| | | | | | MCF2L(23263)[−7636] |
| 942 | chr13 | 113761792 | 113761839 | | F7(2155)[47], |
| | | | | | MCF2L(23263)[−7739] |
| 943 | chr13 | 113762234 | 113762281 | | F7(2155)[47], |
| | | | | | MCF2L(23263)[−8181] |
| 944 | chr13 | 113762370 | 113762417 | | F7(2155)[47], |
| | | | | | MCF2L(23263)[−8317] |
| 945 | chr13 | 113762643 | 113762690 | | F7(2155)[47], |
| | | | | | MCF2L(23263)[−8590] |
| 946 | chr13 | 113762762 | 113762809 | | F7(2155)[47], |
| | | | | | MCF2L(23263)[−8709] |
| 947 | chr13 | 113762886 | 113762936 | | F7(2155)[50], |
| | | | | | MCF2L(23263)[−8833] |
| 948 | chr13 | 113762915 | 113762962 | | F7(2155)[47], |
| | | | | | MCF2L(23263)[−8862] |
| 949 | chr13 | 113763088 | 113763130 | | F7(2155)[42], |
| | | | | | MCF2L(23263)[−9035] |
| 950 | chr13 | 113763121 | 113763167 | | F7(2155)[46], |
| | | | | | MCF2L(23263)[−9068] |
| 951 | chr13 | 113763274 | 113763315 | | F7(2155)[41], |
| | | | | | MCF2L(23263)[−9221] |
| 952 | chr13 | 113763343 | 113763385 | | F7(2155)[42], |
| | | | | | MCF2L(23263)[−9290] |
| 953 | chr13 | 113763360 | 113763402 | | F7(2155)[42], |
| | | | | | MCF2L(23263)[−9307] |
| 954 | chr13 | 113763562 | 113763603 | | F7(2155)[41], |
| | | | | | MCF2L(23263)[−9509] |
| 955 | chr13 | 113766145 | 113766201 | | F7(2155)[56] |
| 956 | chr13 | 113773566 | 113773622 | | F7(2155)[56], |
| | | | | | F10(2159)[−3490] |
| 957 | chr14 | 36977662 | 36977713 | | SFTA3(253970)[51], |
| | | | | | NKX2-1(7080)[−7890] |
| 958 | chr14 | 55326141 | 55326204 | | GCH1(2643)[63] |
| 959 | chr14 | 55331570 | 55331607 | | GCH1(2643)[37] |
| 960 | chr16 | 214494 | 214536 | | HBZP1(3051)[42], |
| | | | | | HBM(3042)[−1436], |
| | | | | | HBA2(3040)[−8309], |
| | | | | | HBZ(3050)[−9990] |
| 961 | chr16 | 223660 | 223702 | | HBA2(3040)[42], |
| | | | | | HBA1(3039)[−2976], |
| | | | | | HBQ1(3049)[−6630], |
| | | | | | HBM(3042)[−6893], |
| | | | | | HBZP1(3051)[−8505] |
| 962 | chr16 | 226723 | 226768 | | HBA1(3039)[45], |
| | | | | | HBA2(3040)[−3014], |
| | | | | | HBQ1(3049)[−3564], |
| | | | | | HBM(3042)[−9956] |
| 963 | chr16 | 226968 | 227010 | | HBA1(3039)[42], |
| | | | | | HBA2(3040)[−3259], |
| | | | | | HBQ1(3049)[−3322] |
| 964 | chr16 | 227471 | 227514 | | HBA1(3039)[43], |
| | | | | | HBQ1(3049)[−2818], |
| | | | | | HBA2(3040)[−3762] |
| 965 | chr16 | 230704 | 230749 | LUC7L(55692)[−8220] | HBQ1(3049)[45], |
| | | | | | HBA1(3039)[−3184], |
| | | | | | HBA2(3040)[−6995] |
| 966 | chr17 | 29422695 | 29422737 | MIR4733(100616266) | NF1(4763)[42] |
| | | | | [−1252] | |
| 967 | chr17 | 29427372 | 29427421 | MIR4733(100616266) | NF1(4763)[49] |
| | | | | [−5929] | |
| 968 | chr17 | 29432878 | 29432923 | | NF1(4763)[45] |
| 969 | chr17 | 29533501 | 29533555 | | NF1(4763)[54] |
| 970 | chr17 | 29604496 | 29604572 | LOC100506582 | NF1(4763)[76] |
| | | | | (100506582)[−3856] | |
| 971 | chr17 | 29620714 | 29620758 | OMG(4974)[−909] | NF1(4763)[44] |
| 972 | chr17 | 29632077 | 29632117 | EVI2B(2124)[40], | NF1(4763)[40] |
| | | | | OMG(4974)[−7697] | |
| 973 | chr17 | 29645231 | 29645274 | EVI2A(2123)[43], | NF1(4763)[43] |
| | | | | EVI2B(2124)[−4101] | |
| 974 | chr17 | 29645871 | 29645917 | EVI2A(2123)[46], | NF1(4763)[46] |
| | | | | EVI2B(2124)[−4741] | |
| 975 | chr17 | 29647786 | 29647825 | EVI2A(2123)[39], | NF1(4763)[39] |
| | | | | EVI2B(2124)[−6656] | |
| 976 | chr17 | 29656459 | 29656520 | EVI2A(2123)[−7692] | NF1(4763)[61] |
| 977 | chr17 | 29687637 | 29687683 | | NF1(4763)[46] |
| 978 | chr17 | 29694256 | 29694321 | | NF1(4763)[65] |
| 979 | chr19 | 12985367 | 12985413 | MAST1(22983)[46] | DNASE2(1777)[−611], |
| | | | | | KLF1(10661)[−9823] |
| 980 | chr19 | 12986083 | 12986142 | MAST1(22983)[−317] | DNASE2(1777)[59], |
| | | | | | KLF1(10661)[−9094] |
| 981 | chr19 | 12991947 | 12991998 | MAST1(22983)[−6181], | DNASE2(1777)[51], |
| | | | | GCDH(2639)[−9975] | KLF1(10661)[−3238] |
| 982 | chr19 | 12996323 | 12996364 | GCDH(2639)[−5609], | KLF1(10661)[41], |
| | | | | RPS6P25(729389)[−8543] | DNASE2(1777)[−3988] |
| 983 | chr19 | 12996682 | 12996725 | GCDH(2639)[−5248], | KLF1(10661)[43], |
| | | | | RPS6P25(729389)[−8182] | DNASE2(1777)[−4347] |
| 984 | chr19 | 12997354 | 12997413 | GCDH(2639)[−4560], | KLF1(10661)[59], |
| | | | | RPS6P25(729389)[−7494] | DNASE2(1777)[−5019] |
| 985 | chr19 | 13004322 | 13004363 | GCDH(2639)[41], | SYCE2(256126)[−5530], |
| | | | | RPS6P25(729389)[−544] | KLF1(10661)[−6305] |
| 986 | chr19 | 13004446 | 13004494 | GCDH(2639)[48], | SYCE2(256126)[−5399], |
| | | | | RPS6P25(729389)[−413] | KLF1(10661)[−6429] |
| 987 | chr19 | 13004905 | 13004947 | GCDH(2639)[42], | SYCE2(256126)[−4946], |
| | | | | RPS6P25(729389)[40] | KLF1(10661)[−6888] |
| 988 | chr19 | 13004907 | 13004949 | GCDH(2639)[42], | SYCE2(256126)[−4944], |
| | | | | RPS6P25(729389)[42] | KLF1(10661)[−6890] |
| 989 | chr19 | 13004908 | 13004949 | GCDH(2639)[41], | SYCE2(256126)[−4944], |
| | | | | RPS6P25(729389)[41] | KLF1(10661)[−6891] |
| 990 | chr19 | 13004932 | 13004978 | GCDH(2639)[46], | SYCE2(256126)[−4915], |
| | | | | RPS6P25(729389)[46] | KLF1(10661)[−6915] |
| 991 | chr19 | 13004979 | 13005002 | GCDH(2639)[23], | SYCE2(256126)[−4891], |
| | | | | RPS6P25(729389)[23] | KLF1(10661)[−6962] |
| 992 | chr19 | 13005033 | 13005074 | GCDH(2639)[41], | SYCE2(256126)[−4819], |
| | | | | RPS6P25(729389)[41] | KLF1(10661)[−7016] |
| 993 | chr19 | 13005035 | 13005076 | GCDH(2639)[41], | SYCE2(256126)[−4817], |
| | | | | RPS6P25(729389)[41] | KLF1(10661)[−7018] |
| 994 | chr19 | 13005143 | 13005188 | GCDH(2639)[45], | SYCE2(256126)[−4705], |
| | | | | RPS6P25(729389)[45] | KLF1(10661)[−7126] |
| 995 | chr19 | 13005168 | 13005230 | GCDH(2639)[62], | SYCE2(256126)[−4663], |
| | | | | RPS6P25(729389)[62] | KLF1(10661)[−7151] |
| 996 | chr19 | 13005169 | 13005217 | GCDH(2639)[48], | SYCE2(256126)[−4676], |
| | | | | RPS6P25(729389)[48] | KLF1(10661)[−7152] |
| 997 | chr19 | 13005171 | 13005219 | GCDH(2639)[48], | SYCE2(256126)[−4674], |
| | | | | RPS6P25(729389)[48] | KLF1(10661)[−7154] |
| 998 | chr19 | 13005173 | 13005219 | GCDH(2639)[46], | SYCE2(256126)[−4674], |
| | | | | RPS6P25(729389)[46] | KLF1(10661)[−7156] |
| 999 | chr19 | 13005186 | 13005231 | GCDH(2639)[45], | SYCE2(256126)[−4662], |
| | | | | RPS6P25(729389)[45] | KLF1(10661)[−7169] |
| 1000 | chr19 | 13005193 | 13005219 | GCDH(2639)[26], | SYCE2(256126)[−4674], |
| | | | | RPS6P25(729389)[26] | KLF1(10661)[−7176] |
| 1001 | chr19 | 13005249 | 13005295 | GCDH(2639)[46], | SYCE2(256126)[−4598], |
| | | | | RPS6P25(729389)[46] | KLF1(10661)[−7232] |
| 1002 | chr19 | 13005320 | 13005364 | GCDH(2639)[44], | SYCE2(256126)[−4529], |
| | | | | RPS6P25(729389)[44] | KLF1(10661)[−7303] |
| 1003 | chr19 | 13005321 | 13005370 | GCDH(2639)[49], | SYCE2(256126)[−4523], |
| | | | | RPS6P25(729389)[49] | KLF1(10661)[−7304] |
| 1004 | chr19 | 13005322 | 13005366 | GCDH(2639)[44], | SYCE2(256126)[−4527], |
| | | | | RPS6P25(729389)[44] | KLF1(10661)[−7305] |
| 1005 | chr19 | 13005322 | 13005367 | GCDH(2639)[45], | SYCE2(256126)[−4526], |
| | | | | RPS6P25(729389)[45] | KLF1(10661)[−7305] |
| 1006 | chr19 | 13005370 | 13005420 | GCDH(2639)[50], | SYCE2(256126)[−4473], |
| | | | | RPS6P25(729389)[50] | KLF1(10661)[−7353] |
| 1007 | chr19 | 13005372 | 13005433 | GCDH(2639)[61], | SYCE2(256126)[−4460], |
| | | | | RPS6P25(729389)[61] | KLF1(10661)[−7355] |
| 1008 | chr19 | 13005391 | 13005438 | GCDH(2639)[47], | SYCE2(256126)[−4455], |
| | | | | RPS6P25(729389)[47] | KLF1(10661)[−7374] |
| 1009 | chr19 | 13005416 | 13005458 | GCDH(2639)[42], | SYCE2(256126)[−4435], |
| | | | | RPS6P25(729389)[42] | KLF1(10661)[−7399] |
| 1010 | chr19 | 13005476 | 13005590 | GCDH(2639)[114], | SYCE2(256126)[−4303], |
| | | | | RPS6P25(729389)[114] | KLF1(10661)[−7459] |
| 1011 | chr19 | 13005478 | 13005628 | GCDH(2639)[150], | SYCE2(256126)[−4265], |
| | | | | RPS6P25(729389)[150] | KLF1(10661)[−7461] |
| 1012 | chr19 | 13005500 | 13005563 | GCDH(2639)[63], | SYCE2(256126)[−4330], |
| | | | | RPS6P25(729389)[63] | KLF1(10661)[−7483] |
| 1013 | chr19 | 13005501 | 13005549 | GCDH(2639)[48], | SYCE2(256126)[−4344], |
| | | | | RPS6P25(729389)[48] | KLF1(10661)[−7484] |
| 1014 | chr19 | 13005501 | 13005628 | GCDH(2639)[127], | SYCE2(256126)[−4265], |
| | | | | RPS6P25(729389)[127] | KLF1(10661)[−7484] |
| 1015 | chr19 | 13005503 | 13005589 | GCDH(2639)[86], | SYCE2(256126)[−4304], |
| | | | | RPS6P25(729389)[86] | KLF1(10661)[−7486] |
| 1016 | chr19 | 13005544 | 13005594 | GCDH(2639)[50], | SYCE2(256126)[−4299], |
| | | | | RPS6P25(729389)[50] | KLF1(10661)[−7527] |
| 1017 | chr19 | 13005563 | 13005656 | GCDH(2639)[93], | SYCE2(256126)[−4237], |
| | | | | RPS6P25(729389)[93] | KLF1(10661)[−7546] |
| 1018 | chr19 | 13005581 | 13005625 | GCDH(2639)[44], | SYCE2(256126)[−4268], |
| | | | | RPS6P25(729389)[44] | KLF1(10661)[−7564] |
| 1019 | chr19 | 13005590 | 13005723 | GCDH(2639)[133], | SYCE2(256126)[−4170], |
| | | | | RPS6P25(729389)[133] | KLF1(10661)[−7573] |
| 1020 | chr19 | 13005592 | 13005636 | GCDH(2639)[44], | SYCE2(256126)[−4257], |
| | | | | RPS6P25(729389)[44] | KLF1(10661)[−7575] |
| 1021 | chr19 | 13005628 | 13005723 | GCDH(2639)[95], | SYCE2(256126)[−4170], |
| | | | | RPS6P25(729389)[95] | KLF1(10661)[−7611] |
| 1022 | chr19 | 13005628 | 13005724 | GCDH(2639)[96], | SYCE2(256126)[−4169], |
| | | | | RPS6P25(729389)[96] | KLF1(10661)[−7611] |
| 1023 | chr19 | 13005656 | 13005721 | GCDH(2639)[65], | SYCE2(256126)[−4172], |
| | | | | RPS6P25(729389)[65] | KLF1(10661)[−7639] |
| 1024 | chr19 | 13005709 | 13005737 | GCDH(2639)[28], | SYCE2(256126)[−4156], |
| | | | | RPS6P25(729389)[16] | KLF1(10661)[−7692] |
| 1025 | chr19 | 13006950 | 13006993 | GCDH(2639)[43], | SYCE2(256126)[−2900], |
| | | | | RPS6P25(729389)[−1225] | KLF1(10661)[−8933] |
| 1026 | chr19 | 42354612 | 42354638 | LYPD4(147719)[−6104] | DMRTC2(63946) |
| | | | | | [26], |
| | | | | | RPS19(6223)[−9349] |
| 1027 | chr19 | 42364166 | 42364188 | | RPS19(6223)[22], |
| | | | | | DMRTC2(63946) |
| | | | | | [−7769] |
| 1028 | chr19 | 42365512 | 42365555 | | RPS19(6223)[43], |
| | | | | | DMRTC2(63946) |
| | | | | | [−9115] |
| 1029 | chr19 | 42382107 | 42382140 | | CD79A(973)[33], |
| | | | | | ARHGEF1(9138)[−5126], |
| | | | | | RPS19(6223)[−6623] |
| 1030 | chr19 | 42385243 | 42385297 | | CD79A(973)[54], |
| | | | | | ARHGEF1(9138)[−1969], |
| | | | | | RPS19(6223)[−9759] |
| 1031 | chr19 | 42385246 | 42385297 | | CD79A(973)[51], |
| | | | | | ARHGEF1(9138)[−1969], |
| | | | | | RPS19(6223)[−9762] |
| 1032 | chr19 | 45406342 | 45406383 | | TOMM40(10452)[41], |
| | | | | | APOE(348)[−2655] |
| 1033 | chr19 | 45409050 | 45409093 | | APOE(348)[43], |
| | | | | | TOMM40(10452)[−2104], |
| | | | | | APOC1(341)[−8827] |
| 1034 | chr19 | 45411024 | 45411110 | | APOE(348)[86], |
| | | | | | TOMM40(10452)[−4078], |
| | | | | | APOC1(341)[−6810] |
| 1035 | chr19 | 45417968 | 45418010 | | APOC1(341)[42], |
| | | | | | APOE(348)[−5318] |
| 1036 | chr2 | 44031598 | 44031667 | DYNC2LI1(51626) | ABCG5(64240)[−7943] |
| | | | | [69] | |
| 1037 | chr2 | 44042998 | 44043059 | DYNC2LI1(51626) | ABCG5(64240)[61] |
| | | | | [−5849] | |
| 1038 | chr2 | 169787082 | 169787129 | | ABCB11(8647)[47] |
| 1039 | chr2 | 169790114 | 169790163 | | ABCB11(8647)[49] |
| 1040 | chr2 | 169790723 | 169790765 | | ABCB11(8647)[42] |
| 1041 | chr2 | 169792889 | 169792930 | | ABCB11(8647)[41] |
| 1042 | chr2 | 169841285 | 169842489 | | ABCB11(8647)[1204] |
| 1043 | chr2 | 169850770 | 169850832 | | ABCB11(8647)[62] |
| 1044 | chr2 | 169867485 | 169867527 | | ABCB11(8647)[42] |
| 1045 | chr2 | 169870529 | 169870559 | | ABCB11(8647)[30] |
| 1046 | chr2 | 169872120 | 169872160 | | ABCB11(8647)[40] |
| 1047 | chr2 | 169875117 | 169875140 | | ABCB11(8647)[23] |
| 1048 | chr2 | 169877389 | 169877439 | | ABCB11(8647)[50] |
| 1049 | chr3 | 178263224 | 178263269 | | KCNMB2(10242) |
| | | | | | [45] |
| 1050 | chr3 | 178266281 | 178266333 | | KCNMB2(10242) |
| | | | | | [52] |
| 1051 | chr3 | 178276610 | 178276697 | | KCNMB2(10242) |
| | | | | | [87] |
| 1052 | chr3 | 178302653 | 178302699 | | KCNMB2(10242) |
| | | | | | [46] |
| 1053 | chr3 | 178338337 | 178338376 | | KCNMB2(10242) |
| | | | | | [39] |
| 1054 | chr3 | 178349009 | 178349050 | | KCNMB2(10242) |
| | | | | | [41] |
| 1055 | chr3 | 178352682 | 178352734 | | KCNMB2(10242) |
| | | | | | [52] |
| 1056 | chr3 | 178379880 | 178379926 | | KCNMB2(10242) |
| | | | | | [46] |
| 1057 | chr3 | 178435281 | 178435329 | | KCNMB2(10242) |
| | | | | | [48] |
| 1058 | chr3 | 178435374 | 178435414 | | KCNMB2(10242) |
| | | | | | [40] |
| 1059 | chr3 | 178444669 | 178444699 | | KCNMB2(10242) |
| | | | | | [30] |
| 1060 | chr3 | 178494032 | 178494057 | | KCNMB2(10242) |
| | | | | | [25] |
| 1061 | chr3 | 178525989 | 178526013 | | KCNMB2(10242) |
| | | | | | [24] |
| 1062 | chr3 | 178543602 | 178543655 | | KCNMB2(10242) |
| | | | | | [53] |
| 1063 | chr3 | 178545455 | 178545505 | | KCNMB2(10242) |
| | | | | | [50] |
| 1064 | chr3 | 178547472 | 178547496 | | KCNMB2(10242) |
| | | | | | [24] |
| 1065 | chr3 | 178948110 | 178948155 | PIK3CA(5290)[45] | KCNMB3(27094) |
| | | | | | [−9381] |
| 1066 | chr3 | 178951985 | 178952031 | PIK3CA(5290)[46] | KCNMB3(27094) |
| | | | | | [−5505] |
| 1067 | chr3 | 178962168 | 178962189 | PIK3CA(5290)[−9671] | KCNMB3(27094) |
| | | | | | [21] |
| 1068 | chr4 | 74274911 | 74274950 | | ALB(213)[39] |
| 1069 | chr4 | 74279061 | 74279106 | | ALB(213)[45] |
| 1070 | chr5 | 149826395 | 149826437 | | RPS14(6208)[42] |
| 1071 | chr5 | 169798551 | 169798598 | KCNIP1(30820)[47] | KCNMB1(3779)[−6568] |
| 1072 | chr5 | 169805525 | 169805580 | KCNIP1(30820)[55] | KCNMB1(3779)[55] |
| 1073 | chr5 | 169808988 | 169809028 | KCNIP1(30820)[40] | KCNMB1(3779)[40] |
| 1074 | chr5 | 169812495 | 169812544 | KCNIP1(30820)[49] | KCNMB1(3779)[49] |
| 1075 | chr5 | 169820237 | 169820263 | KCNIP1(30820)[26] | KCNMB1(3779)[−3599] |
| 1076 | chr5 | 169820936 | 169821002 | KCNIP1(30820)[66] | KCNMB1(3779)[−4298] |
| 1077 | chr5 | 174153300 | 174153335 | | MSX2(4488)[35] |
| 1078 | chr5 | 174156181 | 174156222 | | MSX2(4488)[41] |
| 1079 | chr7 | 22761063 | 22761087 | LOC541472(541472) | IL6(3569)[−5678] |
| | | | | [−3926] | |
| 1080 | chr7 | 87027939 | 87028029 | CROT(54677)[90] | ABCB4(5244)[−3331] |
| 1081 | chr7 | 87028184 | 87028231 | CROT(54677)[47] | ABCB4(5244)[−3129] |
| 1082 | chr7 | 87036203 | 87036245 | CROT(54677)[−7091] | ABCB4(5244)[42] |
| 1083 | chr7 | 87078031 | 87078075 | | ABCB4(5244)[44] |
| 1084 | chr7 | 87081579 | 87081620 | | ABCB4(5244)[41] |
| 1085 | chr7 | 87093783 | 87093828 | | ABCB4(5244)[45] |
| 1086 | chr7 | 87102642 | 87102694 | | ABCB4(5244)[52] |
| 1087 | chr7 | 87104176 | 87104215 | | ABCB4(5244)[39] |
| 1088 | chr7 | 100318508 | 100318555 | | EPO(2056)[47] |
| 1089 | chr7 | 100320687 | 100320732 | | EPO(2056)[45] |
| 1090 | chr9 | 110247403 | 110247448 | | KLF4(9314)[45] |
| 1091 | chr9 | 110249091 | 110249137 | | KLF4(9314)[46] |
| 1092 | chr9 | 110249347 | 110249389 | | KLF4(9314)[42] |
| 1093 | chr9 | 110249600 | 110249645 | | KLF4(9314)[45] |
| 1094 | chr9 | 110249916 | 110249963 | | KLF4(9314)[47] |
| 1095 | chr9 | 110250072 | 110250116 | | KLF4(9314)[44] |
| 1096 | chr9 | 110250156 | 110250202 | | KLF4(9314)[46] |
| 1097 | chr9 | 110250276 | 110250317 | | KLF4(9314)[41] |
| 1098 | chr9 | 110251521 | 110251556 | | KLF4(9314)[35] |
| 1099 | chrX | 73014492 | 73014626 | | TSIX(9383)[134] |
| 1100 | chrX | 73014770 | 73014829 | | TSIX(9383)[59] |
| 1101 | chrX | 73016012 | 73016065 | | TSIX(9383)[53] |
| 1102 | chrX | 73061196 | 73061239 | | XIST(7503)[43] |
| 1103 | chrX | 73062157 | 73062198 | | XIST(7503)[41] |
| 1104 | chrX | 73062267 | 73062309 | | XIST(7503)[42] |
| 1105 | chrX | 73062553 | 73062579 | | XIST(7503)[26] |
| 1106 | chrX | 73062598 | 73062647 | | XIST(7503)[49] |
| 1107 | chrX | 73062720 | 73062761 | | XIST(7503)[41] |
| 1108 | chrX | 73062957 | 73062999 | | XIST(7503)[42] |
| 1109 | chrX | 73063227 | 73063267 | | XIST(7503)[40] |
| 1110 | chrX | 73068144 | 73068190 | | XIST(7503)[46] |
| 1111 | chrX | 73069499 | 73069548 | | XIST(7503)[49] |
| 1112 | chrX | 73069606 | 73069640 | | XIST(7503)[34] |
| 1113 | chrX | 73070004 | 73070069 | | XIST(7503)[65] |
| 1114 | chrX | 73070433 | 73070495 | | XIST(7503)[62] |
| 1115 | chrX | 73070781 | 73070815 | | XIST(7503)[34] |
| 1116 | chrX | 73070832 | 73070860 | | XIST(7503)[28] |
| 1117 | chrX | 73070912 | 73070962 | | XIST(7503)[50] |
| 1118 | chrX | 73071015 | 73071090 | | XIST(7503)[75] |
| 1119 | chrX | 73071149 | 73071228 | | XIST(7503)[79] |
| 1120 | chrX | 73071228 | 73071331 | | XIST(7503)[103] |
| 1121 | chrX | 73071368 | 73071406 | | XIST(7503)[38] |
| 1122 | chrX | 73071460 | 73071515 | | XIST(7503)[55] |
| 1123 | chrX | 73071652 | 73071695 | | XIST(7503)[43] |
| 1124 | chrX | 73072012 | 73072067 | | XIST(7503)[55] |
| 1125 | chrX | 73072088 | 73072154 | | XIST(7503)[66] |
| 1126 | chrX | 73072239 | 73072291 | | XIST(7503)[52] |
| 1127 | chrX | 73072532 | 73072581 | | XIST(7503)[49] |
| 1128 | chrX | 73073261 | 73073279 | | XIST(7503)[−673] |
| 1129 | chr1 | 94464781 | 94468832 | | ABCA4(24)[51] |
| 1130 | chr1 | 94471889 | 94475910 | | ABCA4(24)[21] |
| 1131 | chr1 | 94483296 | 94487334 | | ABCA4(24)[38] |
| 1132 | chr1 | 94498569 | 94502628 | | ABCA4(24)[59] |
| 1133 | chr1 | 94499631 | 94503676 | | ABCA4(24)[45] |
| 1134 | chr1 | 94520891 | 94524952 | | ABCA4(24)[61] |
| 1135 | chr1 | 94523598 | 94527642 | | ABCA4(24)[44] |
| 1136 | chr1 | 94523842 | 94527886 | | ABCA4(24)[44] |
| 1137 | chr1 | 94528569 | 94532635 | | ABCA4(24)[66] |
| 1138 | chr1 | 94537507 | 94541622 | | ABCA4(24)[115] |
| 1139 | chr1 | 94545647 | 94549692 | | ABCA4(24)[45] |
| 1140 | chr1 | 94558611 | 94562659 | | ABCA4(24)[48] |
| 1141 | chr1 | 94561698 | 94565754 | | ABCA4(24)[56] |
| 1142 | chr1 | 94569041 | 94573083 | | ABCA4(24)[42] |
| 1143 | chr1 | 94571651 | 94575691 | | ABCA4(24)[40] |
| 1144 | chr10 | 78683151 | 78687197 | | KCNMA1(3778)[46] |
| 1145 | chr10 | 78687142 | 78691192 | | KCNMA1(3778)[50] |
| 1146 | chr10 | 78706464 | 78710504 | | KCNMA1(3778)[40] |
| 1147 | chr10 | 78714319 | 78718374 | | KCNMA1(3778)[55] |
| 1148 | chr10 | 78720370 | 78724396 | | KCNMA1(3778)[26] |
| 1149 | chr10 | 78721774 | 78725815 | | KCNMA1(3778)[41] |
| 1150 | chr10 | 78727084 | 78731113 | | KCNMA1(3778)[29] |
| 1151 | chr10 | 78750630 | 78754676 | | KCNMA1(3778)[46] |
| 1152 | chr10 | 78757868 | 78761918 | | KCNMA1(3778)[50] |
| 1153 | chr10 | 78777835 | 78781887 | | KCNMA1(3778)[52] |
| 1154 | chr10 | 78783547 | 78787590 | | KCNMA1(3778)[43] |
| 1155 | chr10 | 78799561 | 78803594 | | KCNMA1(3778)[33] |
| 1156 | chr10 | 78808580 | 78812630 | | KCNMA1(3778)[50] |
| 1157 | chr10 | 78820728 | 78824794 | | KCNMA1(3778)[66] |
| 1158 | chr10 | 78833485 | 78837524 | | KCNMA1(3778)[39] |
| 1159 | chr10 | 78841239 | 78845280 | | KCNMA1(3778)[41] |
| 1160 | chr10 | 78844138 | 78848212 | | KCNMA1(3778)[74] |
| 1161 | chr10 | 78887318 | 78891362 | | KCNMA1(3778)[44] |
| 1162 | chr10 | 78928450 | 78932482 | | KCNMA1(3778)[32] |
| 1163 | chr10 | 78930522 | 78934569 | | KCNMA1(3778)[47] |
| 1164 | chr10 | 78931601 | 78935670 | | KCNMA1(3778)[69] |
| 1165 | chr10 | 78954386 | 78958428 | | KCNMA1(3778)[42] |
| 1166 | chr10 | 78960402 | 78964445 | | KCNMA1(3778)[43] |
| 1167 | chr10 | 78961889 | 78965938 | | KCNMA1(3778)[49] |
| 1168 | chr10 | 78989762 | 78993808 | | KCNMA1(3778)[46] |
| 1169 | chr10 | 79015833 | 79019878 | | KCNMA1(3778)[45] |
| 1170 | chr10 | 79061881 | 79065925 | | KCNMA1(3778)[44] |
| 1171 | chr10 | 79070056 | 79074404 | | KCNMA1(3778)[348] |
| 1172 | chr10 | 79073759 | 79077796 | | KCNMA1(3778)[37] |
| 1173 | chr10 | 79099345 | 79103387 | | KCNMA1(3778)[42] |
| 1174 | chr10 | 79102514 | 79106557 | | KCNMA1(3778)[43] |
| 1175 | chr10 | 79102641 | 79106686 | | KCNMA1(3778)[45] |
| 1176 | chr10 | 79103014 | 79107066 | | KCNMA1(3778)[52] |
| 1177 | chr10 | 79104171 | 79108217 | | KCNMA1(3778)[46] |
| 1178 | chr10 | 79111303 | 79115347 | | KCNMA1(3778)[44] |
| 1179 | chr10 | 79118099 | 79122151 | | KCNMA1(3778)[52] |
| 1180 | chr10 | 79134296 | 79138746 | | KCNMA1(3778)[450] |
| 1181 | chr10 | 79137585 | 79141630 | | KCNMA1(3778)[45] |
| 1182 | chr10 | 79148870 | 79152903 | | KCNMA1(3778)[33] |
| 1183 | chr10 | 79154024 | 79158072 | | KCNMA1(3778)[48] |
| 1184 | chr10 | 79174560 | 79178592 | | KCNMA1(3778)[32] |
| 1185 | chr10 | 79180928 | 79184974 | | KCNMA1(3778)[46] |
| 1186 | chr10 | 79202071 | 79206112 | | KCNMA1(3778)[41] |
| 1187 | chr10 | 79227863 | 79231923 | | KCNMA1(3778)[60] |
| 1188 | chr10 | 79236017 | 79240063 | | KCNMA1(3778)[46] |
| 1189 | chr10 | 79258292 | 79262336 | | KCNMA1(3778)[44] |
| 1190 | chr10 | 79264456 | 79268489 | | KCNMA1(3778)[33] |
| 1191 | chr10 | 79273762 | 79277811 | | KCNMA1(3778)[49] |
| 1192 | chr10 | 79275312 | 79279336 | | KCNMA1(3778)[24] |
| 1193 | chr10 | 79345212 | 79349259 | | KCNMA1(3778)[47] |
| 1194 | chr10 | 79377618 | 79381662 | | KCNMA1(3778)[44] |
| 1195 | chr10 | 79379206 | 79383246 | | KCNMA1(3778)[40] |
| 1196 | chr10 | 79391109 | 79395151 | | KCNMA1(3778)[42] |
| 1197 | chr10 | 79395200 | 79399242 | | KCNMA1(3778)[42] |
| 1198 | chr10 | 79396470 | 79400518 | | KCNMA1(3778)[−893] |
| 1199 | chr11 | 47343490 | 47347534 | MADD(8567)[44] | MYBPC3(4607)[−7422] |
| 1200 | chr11 | 47351788 | 47355833 | MADD(8567)[−2206] | MYBPC3(4607)[45] |
| 1201 | chr11 | 47355530 | 47359572 | MADD(8567)[−5948] | MYBPC3(4607)[42] |
| 1202 | chr11 | 47374415 | 47378465 | | SPI1(6688)[50], |
| | | | | | MYBPC3(4607)[−2162] |
| 1203 | chr12 | 70820409 | 70824458 | | KCNMB4(27345) |
| | | | | | [49] |
| 1204 | chr12 | 125261000 | 125265044 | | SCARB1(949)[44] |
| 1205 | chr12 | 125268910 | 125272957 | | SCARB1(949)[47] |
| 1206 | chr12 | 125269326 | 125273370 | | SCARB1(949)[44] |
| 1207 | chr12 | 125282749 | 125286793 | | SCARB1(949)[44] |
| 1208 | chr12 | 125285695 | 125289738 | | SCARB1(949)[43] |
| 1209 | chr12 | 125294449 | 125298495 | | SCARB1(949)[46] |
| 1210 | chr12 | 125296841 | 125300886 | | SCARB1(949)[45] |
| 1211 | chr12 | 125300095 | 125304139 | | SCARB1(949)[44] |
| 1212 | chr12 | 125332008 | 125336054 | | SCARB1(949)[46] |
| 1213 | chr12 | 125338056 | 125342101 | | SCARB1(949)[45] |
| 1214 | chr12 | 125339676 | 125343713 | | SCARB1(949)[37] |
| 1215 | chr12 | 125345385 | 125349428 | | SCARB1(949)[43] |
| 1216 | chr12 | 125346319 | 125350353 | | SCARB1(949)[34] |
| 1217 | chr13 | 113759639 | 113763686 | | F7(2155)[47], |
| | | | | | MCF2L(23263)[−7586] |
| 1218 | chr13 | 113759640 | 113763681 | | F7(2155)[41], |
| | | | | | MCF2L(23263)[−7587] |
| 1219 | chr13 | 113759689 | 113763796 | | F7(2155)[107], |
| | | | | | MCF2L(23263)[−7636] |
| 1220 | chr13 | 113759792 | 113763839 | | F7(2155)[47], |
| | | | | | MCF2L(23263)[−7739] |
| 1221 | chr13 | 113760234 | 113764281 | | F7(2155)[47], |
| | | | | | MCF2L(23263)[−8181] |
| 1222 | chr13 | 113760370 | 113764417 | | F7(2155)[47], |
| | | | | | MCF2L(23263)[−8317] |
| 1223 | chr13 | 113760643 | 113764690 | | F7(2155)[47], |
| | | | | | MCF2L(23263)[−8590] |
| 1224 | chr13 | 113760762 | 113764809 | | F7(2155)[47], |
| | | | | | MCF2L(23263)[−8709] |
| 1225 | chr13 | 113760886 | 113764936 | | F7(2155)[50], |
| | | | | | MCF2L(23263)[−8833] |
| 1226 | chr13 | 113760915 | 113764962 | | F7(2155)[47], |
| | | | | | MCF2L(23263)[−8862] |
| 1227 | chr13 | 113761088 | 113765130 | | F7(2155)[42], |
| | | | | | MCF2L(23263)[−9035] |
| 1228 | chr13 | 113761121 | 113765167 | | F7(2155)[46], |
| | | | | | MCF2L(23263)[−9068] |
| 1229 | chr13 | 113761274 | 113765315 | | F7(2155)[41], |
| | | | | | MCF2L(23263)[−9221] |
| 1230 | chr13 | 113761343 | 113765385 | | F7(2155)[42], |
| | | | | | MCF2L(23263)[−9290] |
| 1231 | chr13 | 113761360 | 113765402 | | F7(2155)[42], |
| | | | | | MCF2L(23263)[−9307] |
| 1232 | chr13 | 113761562 | 113765603 | | F7(2155)[41], |
| | | | | | MCF2L(23263)[−9509] |
| 1233 | chr13 | 113764145 | 113768201 | | F7(2155)[56] |
| 1234 | chr13 | 113771566 | 113775622 | | F7(2155)[56], |
| | | | | | F10(2159)[−3490] |
| 1235 | chr14 | 36975662 | 36979713 | | SFTA3(253970)[51], |
| | | | | | NKX2-1(7080)[−7890] |
| 1236 | chr14 | 55324141 | 55328204 | | GCH1(2643)[63] |
| 1237 | chr14 | 55329570 | 55333607 | | GCH1(2643)[37] |
| 1238 | chr16 | 212494 | 216536 | | HBZP1(3051)[42], |
| | | | | | HBM(3042)[−1436], |
| | | | | | HBA2(3040)[−8309], |
| | | | | | HBZ(3050)[−9990] |
| 1239 | chr16 | 221660 | 225702 | | HBA2(3040)[42], |
| | | | | | HBA1(3039)[−2976], |
| | | | | | HBQ1(3049)[−6630], |
| | | | | | HBM(3042)[−6893], |
| | | | | | HBZP1(3051)[−8505] |
| 1240 | chr16 | 224723 | 228768 | | HBA1(3039)[45], |
| | | | | | HBA2(3040)[−3014], |
| | | | | | HBQ1(3049)[−3564], |
| | | | | | HBM(3042)[−9956] |
| 1241 | chr16 | 224968 | 229010 | | HBA1(3039)[42], |
| | | | | | HBA2(3040)[−3259], |
| | | | | | HBQ1(3049)[−3322] |
| 1242 | chr16 | 225471 | 229514 | | HBA1(3039)[43], |
| | | | | | HBQ1(3049)[−2818], |
| | | | | | HBA2(3040)[−3762] |
| 1243 | chr16 | 228704 | 232749 | LUC7L(55692)[−8220] | HBQ1(3049)[45], |
| | | | | | HBA1(3039)[−3184], |
| | | | | | HBA2(3040)[−6995] |
| 1244 | chr17 | 29420695 | 29424737 | MIR4733(100616266) | NF1(4763)[42] |
| | | | | [−1252] | |
| 1245 | chr17 | 29425372 | 29429421 | MIR4733(100616266) | NF1(4763)[49] |
| | | | | [−5929] | |
| 1246 | chr17 | 29430878 | 29434923 | | NF1(4763)[45] |
| 1247 | chr17 | 29531501 | 29535555 | | NF1(4763)[54] |
| 1248 | chr17 | 29602496 | 29606572 | LOC100506582 | NF1(4763)[76] |
| | | | | (100506582)[−3856] | |
| 1249 | chr17 | 29618714 | 29622758 | OMG(4974)[−909] | NF1(4763)[44] |
| 1250 | chr17 | 29630077 | 29634117 | EVI2B(2124)[40], | NF1(4763)[40] |
| | | | | OMG(4974)[−7697] | |
| 1251 | chr17 | 29643231 | 29647274 | EVI2A(2123)[43], | NF1(4763)[43] |
| | | | | EVI2B(2124)[−4101] | |
| 1252 | chr17 | 29643871 | 29647917 | EVI2A(2123)[46], | NF1(4763)[46] |
| | | | | EVI2B(2124)[−4741] | |
| 1253 | chr17 | 29645786 | 29649825 | EVI2A(2123)[39], | NF1(4763)[39] |
| | | | | EVI2B(2124)[−6656] | |
| 1254 | chr17 | 29654459 | 29658520 | EVI2A(2123)[−7692] | NF1(4763)[61] |
| 1255 | chr17 | 29685637 | 29689683 | | NF1(4763)[46] |
| 1256 | chr17 | 29692256 | 29696321 | | NF1(4763)[65] |
| 1257 | chr19 | 12983367 | 12987413 | MAST1(22983)[46] | DNASE2(1777)[−611], |
| | | | | | KLF1(10661)[−9823] |
| 1258 | chr19 | 12984083 | 12988142 | MAST1(22983)[−317] | DNASE2(1777)[59], |
| | | | | | KLF1(10661)[−9094] |
| 1259 | chr19 | 12989947 | 12993998 | MAST1(22983)[−6181], | DNASE2(1777)[51], |
| | | | | GCDH(2639)[−9975] | KLF1(10661)[−3238] |
| 1260 | chr19 | 12994323 | 12998364 | GCDH(2639)[−5609], | KLF1(10661)[41], |
| | | | | RPS6P25(729389)[−8543] | DNASE2(1777)[−3988] |
| 1261 | chr19 | 12994682 | 12998725 | GCDH(2639)[−5248], | KLF1(10661)[43], |
| | | | | RPS6P25(729389)[−8182] | DNASE2(1777)[−4347] |
| 1262 | chr19 | 12995354 | 12999413 | GCDH(2639)[−4560], | KLF1(10661)[59], |
| | | | | RPS6P25(729389)[−7494] | DNASE2(1777)[−5019] |
| 1263 | chr19 | 13002322 | 13006363 | GCDH(2639)[41], | SYCE2(256126)[−5530], |
| | | | | RPS6P25(729389)[−544] | KLF1(10661)[−6305] |
| 1264 | chr19 | 13002446 | 13006494 | GCDH(2639)[48], | SYCE2(256126)[−5399], |
| | | | | RPS6P25(729389)[−413] | KLF1(10661)[−6429] |
| 1265 | chr19 | 13002905 | 13006947 | GCDH(2639)[42], | SYCE2(256126)[−4946], |
| | | | | RPS6P25(729389)[40] | KLF1(10661)[−6888] |
| 1266 | chr19 | 13002907 | 13006949 | GCDH(2639)[42], | SYCE2(256126)[−4944], |
| | | | | RPS6P25(729389)[42] | KLF1(10661)[−6890] |
| 1267 | chr19 | 13002908 | 13006949 | GCDH(2639)[41], | SYCE2(256126)[−4944], |
| | | | | RPS6P25(729389)[41] | KLF1(10661)[−6891] |
| 1268 | chr19 | 13002932 | 13006978 | GCDH(2639)[46], | SYCE2(256126)[−4915], |
| | | | | RPS6P25(729389)[46] | KLF1(10661)[−6915] |
| 1269 | chr19 | 13002979 | 13007002 | GCDH(2639)[23], | SYCE2(256126)[−4891], |
| | | | | RPS6P25(729389)[23] | KLF1(10661)[−6962] |
| 1270 | chr19 | 13003033 | 13007074 | GCDH(2639)[41], | SYCE2(256126)[−4819], |
| | | | | RPS6P25(729389)[41] | KLF1(10661)[−7016] |
| 1271 | chr19 | 13003035 | 13007076 | GCDH(2639)[41], | SYCE2(256126)[−4817], |
| | | | | RPS6P25(729389)[41] | KLF1(10661)[−7018] |
| 1272 | chr19 | 13003143 | 13007188 | GCDH(2639)[45], | SYCE2(256126)[−4705], |
| | | | | RPS6P25(729389)[45] | KLF1(10661)[−7126] |
| 1273 | chr19 | 13003168 | 13007230 | GCDH(2639)[62], | SYCE2(256126)[−4663], |
| | | | | RPS6P25(729389)[62] | KLF1(10661)[−7151] |
| 1274 | chr19 | 13003169 | 13007217 | GCDH(2639)[48], | SYCE2(256126)[−4676], |
| | | | | RPS6P25(729389)[48] | KLF1(10661)[−7152] |
| 1275 | chr19 | 13003171 | 13007219 | GCDH(2639)[48], | SYCE2(256126)[−4674], |
| | | | | RPS6P25(729389)[48] | KLF1(10661)[−7154] |
| 1276 | chr19 | 13003173 | 13007219 | GCDH(2639)[46], | SYCE2(256126)[−4674], |
| | | | | RPS6P25(729389)[46] | KLF1(10661)[−7156] |
| 1277 | chr19 | 13003186 | 13007231 | GCDH(2639)[45], | SYCE2(256126)[−4662], |
| | | | | RPS6P25(729389)[45] | KLF1(10661)[−7169] |
| 1278 | chr19 | 13003193 | 13007219 | GCDH(2639)[26], | SYCE2(256126)[−4674], |
| | | | | RPS6P25(729389)[26] | KLF1(10661)[−7176] |
| 1279 | chr19 | 13003249 | 13007295 | GCDH(2639)[46], | SYCE2(256126)[−4598], |
| | | | | RPS6P25(729389)[46] | KLF1(10661)[− 7232] |
| 1280 | chr19 | 13003320 | 13007364 | GCDH(2639)[44], | SYCE2(256126)[−4529], |
| | | | | RPS6P25(729389)[44] | KLF1(10661)[−7303] |
| 1281 | chr19 | 13003321 | 13007370 | GCDH(2639)[49], | SYCE2(256126)[−4523], |
| | | | | RPS6P25(729389)[49] | KLF1(10661)[−7304] |
| 1282 | chr19 | 13003322 | 13007366 | GCDH(2639)[44], | SYCE2(256126)[−4527], |
| | | | | RPS6P25(729389)[44] | KLF1(10661)[−7305] |
| 1283 | chr19 | 13003322 | 13007367 | GCDH(2639)[45], | SYCE2(256126)[−4526], |
| | | | | RPS6P25(729389)[45] | KLF1(10661)[−7305] |
| 1284 | chr19 | 13003370 | 13007420 | GCDH(2639)[50], | SYCE2(256126)[−4473], |
| | | | | RPS6P25(729389)[50] | KLF1(10661)[−7353] |
| 1285 | chr19 | 13003372 | 13007433 | GCDH(2639)[61], | SYCE2(256126)[−4460], |
| | | | | RPS6P25(729389)[61] | KLF1(10661)[−7355] |
| 1286 | chr19 | 13003391 | 13007438 | GCDH(2639)[47], | SYCE2(256126)[−4455], |
| | | | | RPS6P25(729389)[47] | KLF1(10661)[−7374] |
| 1287 | chr19 | 13003416 | 13007458 | GCDH(2639)[42], | SYCE2(256126)[−4435], |
| | | | | RPS6P25(729389)[42] | KLF1(10661)[−7399] |
| 1288 | chr19 | 13003476 | 13007590 | GCDH(2639)[114], | SYCE2(256126)[−4303], |
| | | | | RPS6P25(729389)[114] | KLF1(10661)[−7459] |
| 1289 | chr19 | 13003478 | 13007628 | GCDH(2639)[150], | SYCE2(256126)[−4265], |
| | | | | RPS6P25(729389)[150] | KLF1(10661)[−7461] |
| 1290 | chr19 | 13003500 | 13007563 | GCDH(2639)[63], | SYCE2(256126)[−4330], |
| | | | | RPS6P25(729389)[63] | KLF1(10661)[−7483] |
| 1291 | chr19 | 13003501 | 13007549 | GCDH(2639)[48], | SYCE2(256126)[−4344], |
| | | | | RPS6P25(729389)[48] | KLF1(10661)[−7484] |
| 1292 | chr19 | 13003501 | 13007628 | GCDH(2639)[127], | SYCE2(256126)[−4265], |
| | | | | RPS6P25(729389)[127] | KLF1(10661)[−7484] |
| 1293 | chr19 | 13003503 | 13007589 | GCDH(2639)[86], | SYCE2(256126)[−4304], |
| | | | | RPS6P25(729389)[86] | KLF1(10661)[−7486] |
| 1294 | chr19 | 13003544 | 13007594 | GCDH(2639)[50], | SYCE2(256126)[−4299], |
| | | | | RPS6P25(729389)[50] | KLF1(10661)[−7527] |
| 1295 | chr19 | 13003563 | 13007656 | GCDH(2639)[93], | SYCE2(256126)[−4237], |
| | | | | RPS6P25(729389)[93] | KLF1(10661)[−7546] |
| 1296 | chr19 | 13003581 | 13007625 | GCDH(2639)[44], | SYCE2(256126)[−4268], |
| | | | | RPS6P25(729389)[44] | KLF1(10661)[−7564] |
| 1297 | chr19 | 13003590 | 13007723 | GCDH(2639)[133], | SYCE2(256126)[−4170], |
| | | | | RPS6P25(729389)[133] | KLF1(10661)[−7573] |
| 1298 | chr19 | 13003592 | 13007636 | GCDH(2639)[44], | SYCE2(256126)[−4257], |
| | | | | RPS6P25(729389)[44] | KLF1(10661)[−7575] |
| 1299 | chr19 | 13003628 | 13007723 | GCDH(2639)[95], | SYCE2(256126)[−4170], |
| | | | | RPS6P25(729389)[95] | KLF1(10661)[−7611] |
| 1300 | chr19 | 13003628 | 13007724 | GCDH(2639)[96], | SYCE2(256126)[−4169], |
| | | | | RPS6P25(729389)[96] | KLF1(10661)[−7611] |
| 1301 | chr19 | 13003656 | 13007721 | GCDH(2639)[65], | SYCE2(256126)[−4172], |
| | | | | RPS6P25(729389)[65] | KLF1(10661)[−7639] |
| 1302 | chr19 | 13003709 | 13007737 | GCDH(2639)[28], | SYCE2(256126)[−4156], |
| | | | | RPS6P25(729389)[16] | KLF1(10661)[−7692] |
| 1303 | chr19 | 13004950 | 13008993 | GCDH(2639)[43], | SYCE2(256126)[−2900], |
| | | | | RPS6P25(729389)[−1225] | KLF1(10661)[−8933] |
| 1304 | chr19 | 42352612 | 42356638 | LYPD4(147719)[−6104] | DMRTC2(63946) |
| | | | | | [26], |
| | | | | | RPS19(6223)[−9349] |
| 1305 | chr19 | 42362166 | 42366188 | | RPS19(6223)[22], |
| | | | | | DMRTC2(63946) |
| | | | | | [−7769] |
| 1306 | chr19 | 42363512 | 42367555 | | RPS19(6223)[43], |
| | | | | | DMRTC2(63946) |
| | | | | | [−9115] |
| 1307 | chr19 | 42380107 | 42384140 | | CD79A(973)[33], |
| | | | | | ARHGEF1(9138)[−5126], |
| | | | | | RPS19(6223)[−6623] |
| 1308 | chr19 | 42383243 | 42387297 | | CD79A(973)[54], |
| | | | | | ARHGEF1(9138)[−1969], |
| | | | | | RPS19(6223)[−9759] |
| 1309 | chr19 | 42383246 | 42387297 | | CD79A(973)[51], |
| | | | | | ARHGEF1(9138)[−1969], |
| | | | | | RPS19(6223)[−9762] |
| 1310 | chr19 | 45404342 | 45408383 | | TOMM40(10452)[41], |
| | | | | | APOE(348)[−2655] |
| 1311 | chr19 | 45407050 | 45411093 | | APOE(348)[43], |
| | | | | | TOMM40(10452)[−2104], |
| | | | | | APOC1(341)[−8827] |
| 1312 | chr19 | 45409024 | 45413110 | | APOE(348)[86], |
| | | | | | TOMM40(10452)[−4078], |
| | | | | | APOC1(341)[−6810] |
| 1313 | chr19 | 45415968 | 45420010 | | APOC1(341)[42], |
| | | | | | APOE(348)[−5318] |
| 1314 | chr2 | 44029598 | 44033667 | DYNC2LI1(51626) | ABCG5(64240)[−7943] |
| | | | | [69] | |
| 1315 | chr2 | 44040998 | 44045059 | DYNC2LI1(51626) | ABCG5(64240)[61] |
| | | | | [−5849] | |
| 1316 | chr2 | 169785082 | 169789129 | | ABCB11(8647)[47] |
| 1317 | chr2 | 169788114 | 169792163 | | ABCB11(8647)[49] |
| 1318 | chr2 | 169788723 | 169792765 | | ABCB11(8647)[42] |
| 1319 | chr2 | 169790889 | 169794930 | | ABCB11(8647)[41] |
| 1320 | chr2 | 169839285 | 169844489 | | ABCB11(8647)[1204] |
| 1321 | chr2 | 169848770 | 169852832 | | ABCB11(8647)[62] |
| 1322 | chr2 | 169865485 | 169869527 | | ABCB11(8647)[42] |
| 1323 | chr2 | 169868529 | 169872559 | | ABCB11(8647)[30] |
| 1324 | chr2 | 169870120 | 169874160 | | ABCB11(8647)[40] |
| 1325 | chr2 | 169873117 | 169877140 | | ABCB11(8647)[23] |
| 1326 | chr2 | 169875389 | 169879439 | | ABCB11(8647)[50] |
| 1327 | chr3 | 178261224 | 178265269 | | KCNMB2(10242)[45] |
| 1328 | chr3 | 178264281 | 178268333 | | KCNMB2(10242)[52] |
| 1329 | chr3 | 178274610 | 178278697 | | KCNMB2(10242)[87] |
| 1330 | chr3 | 178300653 | 178304699 | | KCNMB2(10242)[46] |
| 1331 | chr3 | 178336337 | 178340376 | | KCNMB2(10242)[39] |
| 1332 | chr3 | 178347009 | 178351050 | | KCNMB2(10242)[41] |
| 1333 | chr3 | 178350682 | 178354734 | | KCNMB2(10242)[52] |
| 1334 | chr3 | 178377880 | 178381926 | | KCNMB2(10242)[46] |
| 1335 | chr3 | 178433281 | 178437329 | | KCNMB2(10242)[48] |
| 1336 | chr3 | 178433374 | 178437414 | | KCNMB2(10242)[40] |
| 1337 | chr3 | 178442669 | 178446699 | | KCNMB2(10242)[30] |
| 1338 | chr3 | 178492032 | 178496057 | | KCNMB2(10242)[25] |
| 1339 | chr3 | 178523989 | 178528013 | | KCNMB2(10242)[24] |
| 1340 | chr3 | 178541602 | 178545655 | | KCNMB2(10242)[53] |
| 1341 | chr3 | 178543455 | 178547505 | | KCNMB2(10242)[50] |
| 1342 | chr3 | 178545472 | 178549496 | | KCNMB2(10242)[24] |
| 1343 | chr3 | 178946110 | 178950155 | PIK3CA(5290)[45] | KCNMB3(27094) |
| | | | | | [−9381] |
| 1344 | chr3 | 178949985 | 178954031 | PIK3CA(5290)[46] | KCNMB3(27094) |
| | | | | | [−5505] |
| 1345 | chr3 | 178960168 | 178964189 | PIK3CA(5290)[−9671] | KCNMB3(27094) |
| | | | | | [21] |
| 1346 | chr4 | 74272911 | 74276950 | | ALB(213)[39] |
| 1347 | chr4 | 74277061 | 74281106 | | ALB(213)[45] |
| 1348 | chr5 | 149824395 | 149828437 | | RPS14(6208)[42] |
| 1349 | chr5 | 169796551 | 169800598 | KCNIP1(30820)[47] | KCNMB1(3779)[−6568] |
| 1350 | chr5 | 169803525 | 169807580 | KCNIP1(30820)[55] | KCNMB1(3779)[55] |
| 1351 | chr5 | 169806988 | 169811028 | KCNIP1(30820)[40] | KCNMB1(3779)[40] |
| 1352 | chr5 | 169810495 | 169814544 | KCNIP1(30820)[49] | KCNMB1(3779)[49] |
| 1353 | chr5 | 169818237 | 169822263 | KCNIP1(30820)[26] | KCNMB1(3779)[−3599] |
| 1354 | chr5 | 169818936 | 169823002 | KCNIP1(30820)[66] | KCNMB1(3779)[−4298] |
| 1355 | chr5 | 174151300 | 174155335 | | MSX2(4488)[35] |
| 1356 | chr5 | 174154181 | 174158222 | | MSX2(4488)[41] |
| 1357 | chr7 | 22759063 | 22763087 | LOC541472(541472) | IL6(3569)[−5678] |
| | | | | [−3926] | |
| 1358 | chr7 | 87025939 | 87030029 | CROT(54677)[90] | ABCB4(5244)[−3331] |
| 1359 | chr7 | 87026184 | 87030231 | CROT(54677)[47] | ABCB4(5244)[−3129] |
| 1360 | chr7 | 87034203 | 87038245 | CROT(54677)[−7091] | ABCB4(5244)[42] |
| 1361 | chr7 | 87076031 | 87080075 | | ABCB4(5244)[44] |
| 1362 | chr7 | 87079579 | 87083620 | | ABCB4(5244)[41] |
| 1363 | chr7 | 87091783 | 87095828 | | ABCB4(5244)[45] |
| 1364 | chr7 | 87100642 | 87104694 | | ABCB4(5244)[52] |
| 1365 | chr7 | 87102176 | 87106215 | | ABCB4(5244)[39] |
| 1366 | chr7 | 100316508 | 100320555 | | EPO(2056)[47] |
| 1367 | chr7 | 100318687 | 100322732 | | EPO(2056)[45] |
| 1368 | chr9 | 110245403 | 110249448 | | KLF4(9314)[45] |
| 1369 | chr9 | 110247091 | 110251137 | | KLF4(9314)[46] |
| 1370 | chr9 | 110247347 | 110251389 | | KLF4(9314)[42] |
| 1371 | chr9 | 110247600 | 110251645 | | KLF4(9314)[45] |
| 1372 | chr9 | 110247916 | 110251963 | | KLF4(9314)[47] |
| 1373 | chr9 | 110248072 | 110252116 | | KLF4(9314)[44] |
| 1374 | chr9 | 110248156 | 110252202 | | KLF4(9314)[46] |
| 1375 | chr9 | 110248276 | 110252317 | | KLF4(9314)[41] |
| 1376 | chr9 | 110249521 | 110253556 | | KLF4(9314)[35] |
| 1377 | chrX | 73012492 | 73016626 | | TSIX(9383)[134] |
| 1378 | chrX | 73012770 | 73016829 | | TSIX(9383)[59] |
| 1379 | chrX | 73014012 | 73018065 | | TSIX(9383)[53] |
| 1380 | chrX | 73059196 | 73063239 | | XIST(7503)[43] |
| 1381 | chrX | 73060157 | 73064198 | | XIST(7503)[41] |
| 1382 | chrX | 73060267 | 73064309 | | XIST(7503)[42] |
| 1383 | chrX | 73060553 | 73064579 | | XIST(7503)[26] |
| 1384 | chrX | 73060598 | 73064647 | | XIST(7503)[49] |
| 1385 | chrX | 73060720 | 73064761 | | XIST(7503)[41] |
| 1386 | chrX | 73060957 | 73064999 | | XIST(7503)[42] |
| 1387 | chrX | 73061227 | 73065267 | | XIST(7503)[40] |
| 1388 | chrX | 73066144 | 73070190 | | XIST(7503)[46] |
| 1389 | chrX | 73067499 | 73071548 | | XIST(7503)[49] |
| 1390 | chrX | 73067606 | 73071640 | | XIST(7503)[34] |
| 1391 | chrX | 73068004 | 73072069 | | XIST(7503)[65] |
| 1392 | chrX | 73068433 | 73072495 | | XIST(7503)[62] |
| 1393 | chrX | 73068781 | 73072815 | | XIST(7503)[34] |
| 1394 | chrX | 73068832 | 73072860 | | XIST(7503)[28] |
| 1395 | chrX | 73068912 | 73072962 | | XIST(7503)[50] |
| 1396 | chrX | 73069015 | 73073090 | | XIST(7503)[75] |
| 1397 | chrX | 73069149 | 73073228 | | XIST(7503)[79] |
| 1398 | chrX | 73069228 | 73073331 | | XIST(7503)[103] |
| 1399 | chrX | 73069368 | 73073406 | | XIST(7503)[38] |
| 1400 | chrX | 73069460 | 73073515 | | XIST(7503)[55] |
| 1401 | chrX | 73069652 | 73073695 | | XIST(7503)[43] |
| 1402 | chrX | 73070012 | 73074067 | | XIST(7503)[55] |
| 1403 | chrX | 73070088 | 73074154 | | XIST(7503)[66] |
| 1404 | chrX | 73070239 | 73074291 | | XIST(7503)[52] |
| 1405 | chrX | 73070532 | 73074581 | | XIST(7503)[49] |
| 1406 | chrX | 73071261 | 73075279 | | XIST(7503)[−673] |

[0273] Single Strand Oligonucleotides (Antisense Strand of Target Gene):

[0274] SEQ ID NOS: 1407 to 587247, 1098805 to 1674759

[0275] Single Strand Oligonucleotides (Sense Strand of Target Gene):

[0276] SEQ ID NOS: 587248 to 1098802, 1674760 to 2142811

[0277] This application contains a sequence listing, the entirety of which is incorporated herein by reference. File Name: R069370015WO00 Sequence Listing.txt. Created May 16, 2013. Size: 353,491,818 bytes.

[0278] The foregoing written specification is considered to be sufficient to enable one skilled in the art to practice the invention. The present invention is not to be limited in scope by examples provided, since the examples are intended as a single illustration of one aspect of the invention and other functionally equivalent embodiments are within the scope of the invention. Various modifications of the invention in addition to those shown and described herein will become apparent to those skilled in the art from the foregoing description and fall within the scope of the appended claims. The advantages and objects of the invention are not necessarily encompassed by each embodiment of the invention.

The application's sequence listing, which the Patent Office published only in electronic form, follows.

SEQUENCE LISTING (2142811 sequences)

SEQ ID NO: 1 - DNA, 152312 bp, Homo sapiens
ttttaagtgagtcaattgaaaatcaattaaatataataaagtacaggtgttccatggatatggcgaacatagtaaaagtggaagacaaatgattctaggaagcactgacaaaagcctgctgtgtttgaaaacaaaggcttatctcagaggcgtttgtcaaggctatctctgattgatctctattgatctcattatgtcttcaacaacagtaataatagtcataaataaagaggtctgttgacattctccccaaagcttaccctgcgcccccacccctactctggttgaatgcaccaaccccataaggaaggcaatgggagccaaagagttgttttatttttatttgtttatttgtttatttatttatttatttatttgagacagagtctcactctgttggccaggctggagtgcagtggcacgatcttggctcactgcaatctccgtctcccaggctcaagcaactctgccgcctcagcctccccagtagctgggattacaggcatatgccaccatgcctggctaatttttgtatttttagtagagatggccccgaagggttgttttattcctaccctaagaaatacagtttttcatcccgtatcacttacaggatacaaaccatggctgcatcttctatacggggcacgagtctctactctaaaaagtgagaatttccgaaaagtcttgatccaacatctttcagagggaaagcctaagtgctctggaaaagatttgtaacagccttgctgggattagctcctcagctcaggcccaagggtctgccattccctagctgcaacttggctgccaaaggttgaaagccagttataaccattttacagaaaggtttgttttgtctttgatgacagcgcttttgcttaagacagcctctccaggcattgttgggaaaccagtgttgacctgatgtgacctctagaaaagcaatatagccttctatgttatgggacttctatggccatgtctaaactttccctgaatctaatctagcagcttaaacagcagtcgaaagaaagataaagacgcatcactgatgaagaaaaaaggcccttcatgtgtttacttgaggtgctcctggtttaatgcagacgttttctgtcatcattttaatagcagcttccagacttttaaacctctctaaggtcacatagctaagtggcaaatatgagatcgcaacccagttttgtctggttccaaagaccgtggtattccacaatatcacaatactcacactcgaatctttatcaatgaagtgatatcgaggatcagcactttaaaaataatctactttcataaaagaataaagaggatcaaagtttttgcgtcgcctgcagggacagagccacttgcacaccattcatgggggatcctaggatgattgctgggtccactggggccctgttgcttccatggctatccttgtgattattaaaatgaccctgcggcatcccactggggtggagccggaaacgagatggcaggaatgaaggctgacacatgaggcagagctaaggatatggaccacttctccgttctccttcccagctccaacatgtgtgaagagaggaggacacagaggactggggatggtgtgagccagggaggagggaggcgatgtgcatctgtttgaagagagaggtctctcactcaagagaggtttctctccctttgacacatttagttgaaggaatctgacaacaaaccacagctttctttgtcaggctgagtaggcaagagccatgtgaaatattttcccacgctgcttccacctcctcacaaaatgctgcctaagtagtttccattttccttctgttttctccacgctccaggtcaaacagtaactgaaaaaccaacgtcatgttcggtcattgtttggttttgccgtttagtggataaattggaaaagtgcttctcctgataatttgtttgttgcaagattgtaccaggaggcaagctctgtacctgttattgaaagttattcaggcacatgcaagttccaggtctgtggagatttcacttcccagcctcctgatcacagattcctgcgggcaggggccaagtcttccttcaaaggaaggcagtgtaaggaagcacacacttccatacagtcactcaagttactatcattcatcttattcatagtaaatgcatcactacaaaggcatgtgctgagttaatctgggtccctaattctaaaaaattattattggcattagaacgtctctttccctatgtgttgttgttgttgttgttgttgttgttgttgttttgagacagagtctcgcttgtcgcccaggctggagtgcagtggctcaatctcagctcactgcaagctccgcctcccgggttcaccattctcctgcctcagcctcctgagtagctgggactacaggtgcccgccaccatgcccggctaattttttgtatttttagtagagacggggtttcactgtgtgttagccaggatggtctcgatctcctgacctcatgatccacccacctcggcctcccaaagtgctgggattacaggtgtgagccaccacaccaggcctccctttgttttttaagtttgtcattgggttgggttgcttgcttctggccatagccttttggaatgtccaactctcgatacacaaccacagctgagctcaggatgccctgagactcagagtgacagatctggccctgataatgaagcttctcaggtgttaccctactctgtactcagccggcacttcactgcggctcatgtgataacagcccagtctcacggtctgctatgcaacactccttggcaaccccctaaaactctgttatctggcaagtactttgcacttaatgcccagaaaatgtaaaatctctggactcccgtgggttttctgggtgtcaaatcggcaaaactctaaacagctttggaagtgagtgtattaaatgtgtttggaataacaacctgcctctcatttttgataacaacttgatttagctttttttttttttttttttttttgagacagtctcgctctgacatccaggctggagtgcagtggctcaatctcagctcactgcaagctccgcctcttgggttcccgccattctcctgcctcagcctcccaagtagctgggactacaggagcctgccaccacgcccggctaattttttttgtatttttagtagagacggggtttcaccatgttagccaggatggtctcgatctcctgacctcatgatctgcccgcctcggcctcccaaagtgctgggattacaggcatgagccaccgctcccggcccgatttagctttattctgctaaagcagagcccatcgctctggggtatatggactccaccctacccccgtgcctccctggactccacgaagacttcccaaaggtgcctggccaggtagtttatatgaatacattccccgatctttagtttccatatgtgtagtcaccccaaactgatctgccttcagcagagcttggggtgccagcagaagccccaaagcagctgaagattgagaagaaagttggttccactgcaggacacaaactcgaccttgcttttcctggggccaagagacctctgaacggatttagctgtcctaggccagaagaaaccgtacctgggaaaacaatttccagaaagcattgttattggtgctaattattgggttaaactgtcaagctgaactgaataacaatactctttatctgtcgtttgccaattaataaaatggatataatggtgagtgtatgtgtctgggtgagaagggagggggagttgtctgtgaataatttgtccccctaagatttctacacactgtctataagttttttttccattttagatgactgactaaactgcactttgctttagaaatgatcaaaggagagcaaagttaagatgaggcaatgaatctgcacataagatttctcattatctgacttaatctccttattgacctcctatgcaaatttaagttagaagtcatgaggatgagctccctcaactctcagcctccactccctcagtgaatcgtacttacttcctggcctcctttcctgcagtgtctgtggaatgcaaggagccccttcccctgcccagggctaatcccacctcctccacttcctcgggaaccccatcaaccatcccccagtaactttagcatctctctctcaaccagctgtctcccacacattaacgtggttcaatctctcctgtcttcagggaaaagacctcctggacccagtgttctcgttccctgcagctgctgtggccactggaaagagtagctcccatctccagggtcttgctcttcaaccctctgctgtcttgtttctgcctcccattaaaactgttctttcagaggtcagttgtcaaatccaatgggcagctttcagtctttatccttctaggcctttcttgagccatttagtactgcagactgatccttcctcctgaaacatcctctttctgtggctcccagggcacccctctttccagacttttctccatcatctctagctcatcctgctcagcctccctcactgggttctcttccttcacctgtttaaaaataaataaataaataacagactatgattgaagtatacatacagagaagtgcacaaatcgtaagttcacaggttgatcattttcacagacagaacactccacgtaactagcactgagatcaaaagatgatgtgtttccagcacgcttagaaatggtcttgtgccccttccagccaccagatcccccgaagagtaactaccatcttgacttcaagcattagagatgagttttttctgtgcttgaactttgtaaatgtaggctatgaatgctctgccaggcttcttttgctcagcattatgtatgggaaaattgtatttttgtagatgtggtttattcatgctcactgcagtgagagatttggctgagagaatataccataattcatttatccattcttctgtgacagatatttccaagttttgctgttagaagggatgttgtgatgaacacttgtgtacctgccttttaaataatcagttccctagatttccatcttagacctttccccctacatagtcccctggaatatttggaatatttggaggaactctggaatatttggaggaggtgatggacaaagattgtttagacataaaagcagtaactctcttctcattcccaagaaaaactcatgaaaatgttcaagtgagtattgtttttgcaaatagtactattttcataagctaaacttcaatatctacatgtcaatccaatagtaacaacaacctgaggtccaaaattattacaggcaaagtgaaattagtaccagctggagtgcaagatttttataggggaaattcaattagtaaaataaaatttatttctcagctgatgggcccaatgattccacaataccactgagtcctttagttctattagtttggtcattaatttctgctccacaataattagagatgaggggacctcttttgctgtgtaaattttcctagcaatgaaaggtagaaaattgggcatgccattcttgctacaatgaccagccaaatcaaagcaatatgcaatagctccaagccacatggcttactaataagaccatgtcaagtatgagaacagtcaagattgattaataagtaaaattgagctataggcattttaggtaaaagtaaagttctggaattacatttgcatcaagtttgtaaagtttttttaagtgttttgttattcaataattcagaaattattttcattttggtataattatcagaaaaaaagtatgaatttaaatttactgatatagttagtaagctacagttagatattaatcttattctgtcttgaggaggtagggggaaatgccttaccccaaatcttacaattttaagttttttctcctccaaagatattttaaaatatgggaattttggagatattttttctggaaaaattcctcttctctgtgccaaatggttttgaaatatccatcacttctctctgatggtaaactatgtgatattgcttctattttttaaaacaaaggaaaaatatttttacagttccactttgaggcgctttagaaagaattctggtaatgctgagtgaacaataaataaattttaaacaaaagtcgattcagaattggaaacaaatatttcacttgattcattggccatgaaaggatttggagaatcagatgatatcattttaatgtttttgtaacctatgaaagcacttccgttccagctagtaatgtgcaatggttgatgtattttgaacttgccacacatcttcctacttggcttgacactgcttagcaagttttgaaaacttgtaagccttttcttaagagatgcaggaattgctgatattgggtattttggatttcttttactttcttgaagatactcatgacagtacctctcttctttaaattctgctgcaactccattggattatgttagtatttataatacttatattattattgcaatcatggacctacccaggaattttattcatatactatggaagccaaatttgaactaatttaggcaaaaggaggttttattgaaaggattggagtgtcttactgctaatctgcctgaagaggagggaacagctgtctcccagggacagctggaaccagggactcagctacaactgggacctatgctctctacctcggcctctctgtgcattcccttcattctctgttactgcagatcagatttctcctagtggtggggaacacagcctcaggtcctctgctagcctatatggcatttttatgcaaattagaaaaggtgctcctctgggtggatgcagcctcgtggttgtatagtttggtgagcagaagacgcctttgtgaaaggaaaaaggtacctcctttgataggatgcagccctataccagggtcccgggcttgtttagcaaaaacaagtgaaatccagtccccagtctttgcttaggcccctacgtacacaaactgaacctagtgacccagcatggcctctaatttctcaacacttctgtacttctgtaatgattaacccatgcttctcacagatccatgccccaaatttctgtgaataggccctgactggcccagctaagatcatgtgactgcacatgaccagtccactttggcattaacaagcctactgcagactcttcccttggtgttggagtcactcctagaaaagagcaaatctttgtgagccaggcagtcaacctgctggcagcttccactcagccttggagttttttctatgtgtaactttcataaactgagccttatttatttattttttgcactatcatctcatgaaatattattgcgtaagctgaggaaacatgttattcatgatgactggagtttcaagttttaattgtacaatgatttagttttgagtttggtagaaataaaatcaaatttaaaaatcagatatttttcatcttacattatgatgtcccaaaactgcctttatgcttgtgacatagattcataatgtcttctcattccacctgtaatcactgtttgaaataaacatatgtctaatgatatatttggggacattctattttcttcagcttgttgcaagtgaattgatggtgatcttttggtattggtttcattatcaaatttatctccactccaaaattacagtaatttcaaagtaatttagtctatatatttttccatagcttttcttccaaatagaaactgtaaaaagttataaattacttctctccactactgaatttttgtttgcagaataactgatgtaagtagcagaatgcctcttcctagttcaaccctcaggaatagaagtgagaagatctttaaaacttcaccattttccttgacttgtttataattctgaatgtaaatgtgaattgatatggtctatcgcttaacaccacaactcttaatctatgtgcagggtcgtagctcaaaactactgccaggaccacatcaatttcatattcaccctgatcaatgtgtattaatggtgataactatgagaatgaaatgtacagttatcagtatcatttttgactcactaggtatatcctcagaaatatatgaaaaaactaaacacagcttttagtttgacataatttttaaacaactggagttaccttgggagaaaaatcctaccaaatatctataatattgaaagagtaaaaaagagttaaatgtccttaacatcattaatcattagggacatgcaaatcaaaaccacagtgaaataccatctcacaccctttaggatggtggtgataagaagaaaaacagagcataacaagtgttggccaggatgtggaaaagctggaaccattgtgcactgctgattggaaagtacaatggtgcagctgctaagggaaatagtatggtagttcttcaaaaaataaacagttataccatttgattcagcagtttcactcctaggtatataccccaaagaattgaaagcagaatctcaaatatttgtacacctatgttcatagcagcattactcacaatagccaaaaggtggaaacaacccgaatgaccctggatggacgaatggataaacaaaatgaggtctatactgacaataggatattaattgaccttaaaaaggaaagaaattctggccgggcacggtggctcacacctgtaataccagcactttgggaggccaaggcaggcagatcacctgaggttgggagtttgagaccagcctgaccaacatggagaaacctcatatctacttaaaatacaaaaaaaaaaattagccaagcatggtggcgcctgcctgtaatcccaggtactcagtaggctgaggcaggagaatcgcttgaacaggaagcagaggttgcaatgagctgagattgcaccatcacactccagcctgggcaacaagagtgaaactgcatctcaaaaaaaaaaaaaacaaaaaaaacaaaaaaagaaattctgacacatctgctatggtctaaattatgtgttcctctaaaattcataaattgaaatcctaacccccaaggtgatggtattaggaggtgaggctttgtggaggtgattaggtcatgagggtacaaccctcgtgaatgggactagtgccctcataaaaagaagcccaagagagaccccttttcccttccactggatgaggtcacaccaagaagttaccatctacatgtcaggaaataggccctcaccagacaccaaatctattggcaccttgatcttggacttcccagcctgcaaagctgtgagaaataagttcctgttgtttataaaccacccagtttatggtattttgttatagcagctcaaacagattaagatggcttgctacaacatagatgaactttaaagattatgcttttctatgattccacttagatggggtaccaagagtagtcaagttcattgagacagaaaatagagtggttggcaggggctagggggagggaactctggggagttagtgtttaatggatacagagtttcagttttgcaaaatgaaaaagttctgaagatggatggtgctgatggctgcacaatatgaatgtatcaacactactcaactgtacacttaaaataaggttcaaatgatacattttatttcatgtgtgtgtcaatctcaacaaacagatttgttcaggcaaggaaactggttagatgcgaataatactattagagcatcatcaattgaatattaacaaagtgctcatagtttaactttctagctcaaggaagaatggaccattttgaaactatgacagaacattacttatatagctgatgtctttgggaattggaaggaggcatattccttcaccagctgtggctccccttcagcaacctcatatactctccaagcttctctttcctgggtcacctgtttaatcactcccgggacttaatcttccacctatatgttgaccactcacaaatctatgtctccatctcacaagcttattcttgactccagacccaagtattcaactgcctgctgaatacgtgtggtcagatgtcatagaacttcagcttcagtatatcaaatgcaaacccctgttccccccaactgcctcctactccccactggccttcctctggcattccctcctcagttatgagcaccaccgtctcactagccagccagtcaagccccaaactccatctagctgacttctgcctcttcctcaccaccctcttccagtaactcatcaggcactgctgtgtctcattccttcctatccctccagtccctccccttctctccatcatggctgtcactgcatggttcaggctctctggctccccccaaaccacccccacattgctgccgaggtgaactgactactcttggcagccactggattaaaatctttcatcatcttcagcatgataaaacccatatcctttagcatgtaacaaggtcttaatgattctgccagagcttgcttgggggtagcctgcacttgtgggccactccagtcacttcacaggtgctcagtaaatctcagttgaatcagtcatcatcatcatcatcatcatcatcatcatcatcatcatcaatttttcagtctggttcctgtctccttttccagcatcctccattcatagcctcatagccttcactccagccatgtttcacttgtggttttcctgggcaagataagctattcctccctgtctttgcagagtttaaatgactcacttgttcaagtacccaccgttgccatgtgggaccgtgagcaaagtacttaatctcactaagcttcacgttcctcatctgtaaaacagcaaatatggacctcacaaaattgtagtgaggctaaaatgaaataacatatgcaaaagcagtttataaataataaacttactataaaatattattttgtaattctgcaagcttgtcttaaatgccatcacctccaaggagcctttttgccatcataagcagaaactatctctctcttcttggaagctccaccatgcacagcctatgggccctcatcacactccttgagttattcgagttcaagtcccgtgtttacaaccagaccgcaaactctatgaagtcagcatccattcctctctgtggttctccctccgccccatccaggtctcaagggtctagagtctttcaaagagaacacattctgagatttgaggaggcagagacaaaaagttccactgcgaagtgccagggaggcttctgtttggggtgtcccttgggatcacagatcccccacctggtgatgagtcaacccagcaccaccccattgcagggctggaatgacagtaatgggcccacctgctgcctctcctcatacccgcaccccagtcagacattgcaagtcagtcacggctctgtcctgctgggcctggagtgttccagtgccttttccatcacagcaccaagcagccactactagtcgatcaatttcagcacaagagataaacatcattaccctctgctaagctcagagataacccaactagctgaccataatgacttcagtcattacggagcaagataaaagactaaaagagggagggatcacttcagatctgccgagtgagtcgattggacttaaagggccagtcaaaccctgactgccggctcatggcaggctcttgccgaggacaaatgcccagcctatatttatgcaaagagattttgttccaaacttaaggtcaaagatacctaaagacatccccctcaggaacccctctcatggaggagagtgcctgagggtcttggtttcccattgcatcccccacctcaatttccctggtgcccagccacttgtgtctttagggttctctttctctccataaaagggagccaacacagtgtcggcctcctctccccaactaagggcttatgtgtaattaaaagggattatgctttgaaggggaaaagtagcctttaatcaccaggagaaggacacagcgtccggagccagaggcgctcttaacggcgtttatgtcctttgctgtctgaggggcctcagctctgaccaatctggtcttcgtgtggtcattagcatgggcttcgtgagacagatacagcttttgctctggaagaactggaccctgcggaaaaggcaaaaggtaacagttactgtctgtggtttaaaaatgaggtgtggagcaaataaacaggttggaagtgtggggtggggtggtggggtagggtggtggggcagggtggggggttgtgagcagtcagtgggcttgtcgccgattagcactgaagcagtgtttagctggacggcctttctgtgggcccctctgacagtgcccttcccaggaagatgtgtttctctgtcctcagccacatgaaaatcttttgcctaccgtgcctgtcaatccattgcctgcccgcccctcccccaccccccgttttacacctgcctgtccagtctaccgctctctagggcatccacgctgagcagtgggaagaactttaagccctgaagagcaggccaaaggcaagcaagaaccccctcgaacagcttcccagcttagtgaggccttatttcattgattctctgaggcacattgttttttcacatgttagcatttctgaaattgggatgcagctcacgatcaagtcacagtttaactggacacattatttttctttcttagtggtgcagaaaagtaacagtgtgtcttacaattgactgcgtcctagattctgtgagatgcaatacgttattaaccatcacgcacatttcctgaactctttcaatgagcagacaccagcctgggttagactggagccctaaaagcacgacacagattccaccctggactggcttctgttctgcctgggaaaacccaaagtacgtttggagaccaagagcaacataaagtagcataggtggaatagtccatgagaagtgcgagcaaaaggtgccggagatcagagaacaccaagactgtacttgtaaatgacaactggctttgtgcaattttttctgggaaaggataaggagtgactatagaactgtaaagaaagaatgcactttgctacagccttgcagagttgtgcaaatgccgatgactaaaggagctgaaagaggaaggaggggataagggatgggggctgggtaggggtgagattaggaccctgggagctgcaagccactggagagatcaggaggaaagggagggagacctgctttaggcgagaagagaacagtatttgttccaaatctcggttcagaataagttcatgtaggtgatggggccaactggaacaggtgaaggcctatgaatgagtgtctcagttagggtctccttagagtttaatatgaaaaggtgttagctaagtacagagctggtacctgagagagtaaaaggaaactctaaggtatcatggaggtagcaattgcaggacacagctcccacccctagggctgagagaaccaagggaagagacaggaattattaagacttggagcatagatgagaggtctgtggagctgacattaggacttgggaggaaggcgtgcatggaggctgctgctggatctctgaacctgacctcgggtctggacccctgaggagaaagccctggcaggttggtgcatgtggggccgagggacaatagcttaacaaccagcataaaagagagcagcatgggacacgcttcaaccatgcgcatggatggctccaaaacctgtgtgtggctggcccaggacgcagggaggctgcagggggaagagacaagttaaacctgacttgtctgggaagcaccattgtcctcaggtcactttcctctgtcaagcctggtgctgaagttatctgttgtctccaggggccaagtattaagagtaatcagaaactcagtcctttcttctaggagcttcccttcttgcatgaaaatcctgataaaactggaaaaaaaaacctcatgattaaattttttcatgtattcattctttccttctatcaaaaaataatctccaggcaccgtgctaggttcattggtatacaatggcaacaagacctcccagcccctgcctatgtgaggcatctgtggactgcggaggaaaatccaatatgccattgttctctctttcccataagaaattacaattctcagttcattttattctcactgtgctctttgtgaccctcaaagggggtcacatgataacaggactgtagctgctggcctaaaatgagcccattcctgtggcgctcatgtcgctgtgacagagaataaccctgttttcagaatgctctggtgccctccctctcaatctggcctttcgctggcatgggtgggcgactcctgctcagggactctgccttctccacagtgtgctcccagggagatggagccactcgggctgagggccttggccagggcacctcccagggctgggcctggtctgggctggcgttcactggatgccatcctgatggcctggaaattgagatttctgtctggcacgcctcccgatggctccccacctgctaccacattccaggagcttccaggatgtctgggtaagacagaggcacccccaacagattcagtagctctgagagggatctgtggctccttcctaagcttgcggttcttctggaaacttctgcctctagaagatggtccctctaagaaaagtacaaccacccagcccataattcagctcccaggttttccctcaaacctccatgtctcctgtaagcagagcaagagtaaaatcagataccaaatttcctcattcctcagctcccaatccctaagggcataagatgaaaatcttcagatctctgctttcctccctctttttttcttcctctgttaacatttgtcaagtgttactaagtgtctggcactgtactaagtgcatcacctccctgaactctccgaacagttccacgagagaggcctctctgtgatccccccggtactgatgaggtcactgaggctccagagaaggattagtaactggtggggttggacctgggattcacacccatgctgcgtgacccaggacaggcaggcatggccgttacaccacactgacccccgtggatcgagatctatccaatagtctggtcactgatatcactaagatagagtggccatataatttatcatccaatcagggcagttttgcaagtgaaagggagcactattaataattgcactgggacaataaatgtaaaccaacactggacctggaaaactgggacgtgtgtttgccctataccaaggtaagctagacacagccactgccttcatggagttcagaaccaggcaggggcggctcccacgtataattactgtgcagcacaacgtggagaccgtggagtagaaggaaacacggatgggaggtgaggaggaggtctgtgagctcagaggaggcaccggggctggagagggtgagagaagacttcccaaggagttcatcctgataacgtgcattcccaatgacgagcgctctctccactgcacaagacaagtatacatctgcccgtgttggctgtggacctggcgctgtgtcagggagggtttatgaagatcactaggtgggtctcttggtgtcatcccttcatcccagcttctgggttaggatggatatctgtgggggggcctgaggactcatgaaagtggggcgctaatcatgttttggacaccacaccctggagcacctgggacagctgtggcctttgtcctgggttcagcatcaagccgaggatgtggcaagtaaagagaggctgggcaccaactccagtgtacccaggctccgggtcatgtttgtccaggctaagaattctgtcctggttctcagtgcagaaggaagaatcatggggctcattttaggccttggctgccttctgttaaattgaaaacagagcaggaaggaagaaaatttaacaggctcagttctaaaacaacaagcacaactgtgcccttgccagaaacccctcctccccatgttgattgaatggtaaagagaggaggggaggtgagagggagagagagagagaggaagagagagagaaaggaaagaaaggaaagaagaagaaagaaagaaaaggaaagaaagaaagaaagaaagaaagaaagaaagaaagaaagaaagaaagaaagaaagagaaagaaagaaaggagggagggagggaaggggaaaagaaaagaaaagaaaaagaaaaaaagaaggaaataccagtttgggaaaaaagaattttccaccagcccttctgagccttggctgggcttaattaaagttacagacatgtgtaaagggcagggtagggggagtctgagctgctgagaaaacatgtttttaattatactgtggaatttctccctggggtatgcctgtacgcagttaagcgtcaaggacagggatgccgctctggggaggggaagctgagcatgattttggaagccggcagaagaggctattgtgaaaaccagacctgtcaggctaggaaaagaatggctggtggtctttgaccagggagtgacgcgtgaaatgcagcaaccgcccccgccccccgccaaaaacaaacacactctcacagagttagaacaacagtgacctctcaacaaatatttttcaaagattaccaaccaaccattacctagagcagcggttctcaaccttggctgcacggtggaactacctgagacgtgttaaaaagaagaaccctgatgtcccatgccccaagattctgatgtagttgatctggggtatgatctgagaccccggcatgttttcagcctgcagccacatgagaagtgctgacctaatcaacaggggtgatgatttgaggggcggggactataggcaaaaaaaaacagcctaattcaaggatgagaagagggcacaggtgaggtgggaacagtcctagggccagacaaagaaggaagggagaaaggaggtgctgatccctcccctactcctgagaggaggcctttaagtcaccgtgccttgtggagaccagattcttcaaaaatacaagaatgagtgagtgagggagtgggtggatgccaggagagtgcgtgacaagccttgcaagggaggatgacaatgcactagcttggtttggaaattttacccctggaacaggcaggccaagctggctggtcccctccctgatacacagccctccctctttatatatggagcaggggacggtgtgtggctggtttcttagcaagcaccatggttccaagttggcaactggggagttctgaatccaaaaaggagggagatgaacgtaagtggagggcaggcctacaaggttgcagataagcttaattctgtctccttactcttctgcctttgcaacaaccctgtgatcttgcgacaaccctgtaaggcaataacaaatggctcatgtttattgagtgttacctcatgccatattgtgctttcgtgtttaacacaattgtctcatttcaccctcacgactgctctgggaggtaggtcctggtatcacatccatttcacagatgagaccatttggcacggaagagttgagtgggctgcccaaggtcacatagctaagatggaacaggctggataggaaccccagtaacttgacctcagagtaaccttctcttaaccctgagtgtacactgtaggaaaaatgagcagtcccatttcagagaggacaaaactgagactcagaggttaagcaagccccaaagtggttgttaacccagatcttcccactaactcccaaatcagcatcagtgtttaacgtaccagacctctcccagatagatgttgccgcatggaagacagccgatctacgtgatagaaagccaatattgcaagcagtcgtctaaaggagtcaaatgtgttggatttgaactggatgtctcatttctttggtgaagacactggaaacaacttccaggtttcatcaattgctcctatcactcaacgttgctatcttactgaacttgttccccagccttacccactgatggaatgatccagaatggaagacaagacaccaatgtacatgaccctgggggaggctgtttcttaaatctacagactgttggtgacctgagccccatgtcaccaaaggctttcctggagaagcctcctagaccagtcttgacaaaggctcactcattccgtggatatttattgggcacctattatgagttctgccccatgtggggtgctggaatcacagtagtgacaacgacagatgaggttcctgtcctcaggaagcttactgcccttgagggcttcacttacttggaggagtgatgaacctgaagtgcggtgtgtgttaagaagcggaagtccagggccaggcgcggtggctcacgcctgtaatcccagcactttgggaggctgaggcaggcggatcaccaggtcaggagatcgagaccatcctggctaacatggtgaaaccccgtctctactaaaaatacaaaaaaattagccgggcatggtggtgggcacctgcagtcccagctactcaggaggctgaggcaggagagtggcgtgaacctgggaggcagagcttgcagtgagccaagatcgtgccactgcactccagcctgggcaacagagtgagactccgtctcaaaaagaaaaaaaaaagtgcctcacggagagtctattcttttcttcccatattgtgtgtgtgtgtgcgcgcttcctccaacacatcctccctatatatattttgagtaaaacatcttgtaaaaagttacagctacataatcaccacctgtccctaaatagtttttgctttttctttcttcaatgcacgatcattttcccccatcaatttattttttagtttcttataatcttgttgccagtaggctgttttttaaaaagcagaacatggtttgttcttactagcaggaaaggagcatttattgagcctctgctatggtgtcttttattttgctgagagcctatttacatttctttgagaggaaaacaacaaagggttacatgaaagaccatgtgaatagcccctagctgatctattaaacttgctattccccggccagctgcttcagatctccttcagatcttatgtgtttccttcctaaggtccctggagtaagggttgcatagacctattctactctccaactcacatgtccctctccctcttcctctccataattccacatctccaacccccacccctatgtgcaatgccacagggtgtggactgccacagccactggatctgcttttggaatcaagagtccttaagctccaaatggaaccgaaatttaaataccaactttcaaccatatgttaacatcagcagcctcttccaatgtaaaaacccatggcagtgtgccctgctttgtttctttaagcaatagaaacttgaaggaagcatgttggtaggccagatttttgttggctttgcaatggatcacagtcatttattcactcattcattcactgattcattaaatgaccacatttgcaagggcaaggtaatggggagggccagaaaggacactggccccagaaacaggaggctggattttggttctgatgctgccactgctgatgtgacactgcacaggtcacctgcctcctctgagcctctttccttaactgcagagtgagtggctacagagaaatctttactacctgttagatcagcattacctgggagcttgttagaaatgcaagctctggtggggccatactgaacccaaatctgcattcatgtgcatagtgacagctaaaatgcactgaagcagatgatcttgatgatcctttatgaaagtctcatgctaatgcagttttctaaaatagaggcagagtggaacccagatggacacaaaatctggttgatataataaaacaaggtagagggtgtatggtggggagggggtaaaggaaggaaactgtttaggtaaagataccacaaccaaagtcctactgcacacatgggatctgaggagggctgtgtctgctctggttacgttttctataatctcttagcaccactgaactttctctctttttgttttgtttttccagattcgctttgtggtggaactcgtgtggcctttatctttatttctggtcttgatctggttaaggaatgccaacccactctacagccatcatgaatgtaagcatagcagggtagcttgggcaagccctgaagagactttggtctgggccttttgtctagaaagatcttggggtgggagtgtggggatcagatctgcttatcatcatttcatgtctatgatgcatgtaacagatttatcaatgttacacaaattataatttttaaaaagtctttagagacagggtctcactctgttgccgaggctggagtacagtgttaggaccatggcacactgcagcttctatctcttgggctcaagtgatcctcctgcctgggcttccaaagtgctggaattataggcatgagccactgctcccagctaatttttttgttttttgtggagacagagtcactacattgcccgggctggtcttgaactcctggcctcaagtgatcctcccacctcagcgttctaaagcactgggattacaagcatgagccaccttgtccagcccaaattttcatgttttaatcctacacattctaagcaaatacttgtgtgtagttactaagggactgtgcacttatttttgtttgctttgttgttgctagtttttatttttttatacctaaactctctcgttttaaagagaacagatttgtagatgagttctcgaaaatatttcaggaatcaatatagagaatatgttatacatggtgccagagaaaaatgaggacaagagatgctatacaatcgtactgaagaaaaattttatttcttggacccctgaggtgtctgcagacctgaaaggaacctagtgagagcctcttttacactctgcccctgtgggaaagccttcacctggtttccggccctctatgtggtgaatgtggaagcctcaagcgttatgcaaatctgcccagtcctctattcttgatcttcaccttctcgttcatgagtttcaggccccagttctgaatcagcctcctgtccatcagactcttctttacctctccccgaggagcccataacctgcagccctactgcatgcttggggtaggtgctcagttcaccgtggttgaaggaatagacgagcgtctgctcaagcagcagcagcaactgcgtggagtcttcttgaactaacactcctatgcccctctcggcacaaaatgacgtgtccccccttgcttccccttcacatttccacccatgcctattacaacatccgtctgtctccccactacaccgggagcttgagagaagaggccatgtctctagcacccagcacagggactggcacacatgagatgctcctgcttcttaaatgctgagaatgaaggaggacatcagaggggcccgggccccttcccaaaaaggccaactcctaggtctgcatcctgcttggtctccatgactaatcccgtcttgtcctcattttctgttttaaaggccatttccccaacaaggcgatgccctcagcaggaatgctgccgtggctccaggggatcttctgcaatgtgaacaatccctgttttcaaagccccaccccaggagaatctcctggaattgtgtcaaactataacaactccatgtaagtgttgagatccctaccatgcaggggaggaagttgcacaccccttcacgtgctgaaatgcacacgtgcgtgcacggagcatggagcactgagtgttcttgtggctttgctgagcccctaacctcttaggagcagagcaggtttcctctctggaacattctgttaactgtcagggcacttggggagaaatctccaagctaaggccacgtgcacaaaatttcttggtccttatatccccagaatgtgacctggagtctgatggcagcccgctgcagagatgtgtccactgccttctggtcattgacctgcttgggtggagtgaatcattgtaggagaaaaactcagttccctcaccctgatcaacctggacagatctctcttcctttaaaagctttcttggacatctaagggctaggaaaaatgtcagggagcattgggaaggtaaatgaagtcaggtttacaaagtcaagtttacttcttgggagaaaaatacaatttccaaatcctctgttataattgccatcggccccctggagtggtgagatctcggaatatggctcgggtgcagtggctcttcactgtgggcctgcaggctattctgaaaagctgatgaaaaccaatgacccctcttccaagaaaaatggccacataccaaacattacactgtacatctgatttcagggaattgtagatgccaggttagtagcctcaggtctagggtcaaaattcaagtcgaatcccacaggaagagggtctgccttcggaattccctttcagagcattgggagaacatcatgggagcatattctagagacagaggcttagggtgtggacagggccatccctcacccactgtgctgaccttaagcagcaccttgtgcagcccatacctgaaggccaccagcaaaggcctgttggggagcaggctttacccgacctgtataaacaccaggctaggtgaaaactgagatacctggttactttagttttttccttgggggagctcagtatgattcttccaggagaagcctgcttttagactaaaaagaaaaaaagtttgataggtcaacctaatgattggaggtggccttccccactgtgaacaaactatggctgcatgtgccctacaatggcagagttgagtagttgtgatagagactgtatgatctgtaagcctgtaatttttatgtttgctgacccctggattaccagatgatagaagaggaaacatctgtcttcctagcaaagtcaaggaagtggcatttagcaggactcatattgctgcaagcactgccttgcagttttagtttacaactgcactttcagcttaagaaacacctgcccatccagagagatcgtgtggggtcacatggtgggatcagggaggcctgaagacagctcagtggaggctgcatggagctttggtgggaacggccctggcagtgtctatagatgttattgcggaaaactgaggggtgggagttggagaagggggctccagactctagctgtacttggcatttgaacccggaaagttgggtttcatgttttgcactcacattatgagtgaaatattggcttattcaaggttcttttgcttgcaaggcacggaaacccattcaagcaatcttaaaccccagaaggaaatctatgatttggatactagacattctcacagagccaagggcagcaaggcggggctcaggagaggcaggccaagacctggagagctgtcaggagctgcttcctcaactctcttccatctgggcctgccagccctggcctctgtatctactccattcacctctctccatggaccagtctcccctgctcctcaatgcctgggctgccattgttcatgcaattcacaatacctcggcctgggcaatcagaagctcatctctgaacaccatccaaattcctgggaacaaatcgggttgacccagctttattctccctgtcccatcagccttggcagaggcgtgcatgtgcatgcgtgccaatgtgtgtgtgcagggaggtccttgtggatgaagcatggctgtcagagcctacctgcgtgaatgggtggaagggcaggtctcagagaattgggtaaaaactggataaaccctccagtgatatccaccaatgtcaccctgtttaaggcttctctgggcaagagacacacagagcatgggaccgagaggcgagcagaccctgccaaaactgggagactgaatagatcgctcaccatccttgtcagttagcctatatgtacaaggaagtaaaattatctctttctcctgccttggcagtattgtaaggatactcaatgtagtagctaggccagacacatagtatctttaaatatagcatgagatggccaagcacggtggctcatgcctgtaatcccagcactttgggaggctgaggcgggtggatcacgaggtcaggagatcgagaccatcctggctaacacgatgaagccccgtctctactaaaaatataaaaaattagctgggtgtggtggcgggcgcctgtagtcccagctactcgggaggctgaggcaggagaatagcgtgaacccggggggcagagcttgcagtgagccgagatcacgccactgcactccagcctgggtgacagagcgagataaaaaaaaaaaatagcatgagatattattactgttataaaaataacagctatttccttattaatgaggctttgtccttacagcttggcaagggtatatcgagattttcaagaactcctcatgaatgcaccagagagccagcaccttggccgtatttggacagagctacacatcttgtcccaattcatggacaccctccggactcacccggagagaattgcaggtaagcatgactgcagtgctctcaagcatcatttccctcacctatggagagactgaagatataggaaagaacagggagagttggtgaaaaatatactagcggaggcaggaagggatggggtctggaggcggcttgaacatcaccttggtgaagatgcctcttcctccacagaagcctggaaggtaggaagttgggaaggaaggcaggaaaggtctcatccacgttaagtctagagacagaaagaatgctaagagagatggcactatgggaagtatgaggctaggtcaagggctagaagcaggggagacgagtttacagagtttcgtaaagatatagagcaactctcacagagttctagagcgagagctaaccaggaacatgaagcagcaaggccaactatcattaaggagccagggaggtcagagatcatgtattatcatgacataaatatgcataattgtactatttctcccagtaatatttagcacccaggccccgaggcagagcaagtggagagtgggtgatgcagggctgggggtgtgtatggaggcaccacagaaggtcaacaggcagcgggctgaaggcagggactggactacatgcatcaagtccaggctgcacgaggaaggatgagaaggcagatgagcacggaaatggactgggggaaatgaagaggcaagggaatagaagtctcagtgggtgccatgaccctgtttaagtgattgagaaaatgaacaagatgaaaaggttaatggctgtggtcagaaagtgaaatatgtgaattcaggatttcgaaggtagggtgggtgatgactggcccccagatgcggccatggtgaagtggggcaaaggtgcaggtgcatggtgaggggaaggaggaaatgggaggtgatgatgttggccccacacggacaccacggttgtgcaggaagatggcaggagctgggcaccagggtgggagccacctggagtcaggaagagtgaagagaaaggatgaagaggctccctctcctgtgtctctcctccccaggagaagaacaagaaacaatccgaaagtaataacaccaatgtgcctttacaaagtgtgagtgggtgttgtgtgctgtcacgtgtgtagtaggctcctctgtggatggctagagggactggacatggccactggatcccacttgcaagagcagaggaaaagagtggtcgtgaggaagtaaagccccccaaaatccaggggttgctgcagctttgggtgtggagcgtgccctctgaggaaaggctgctctgggggagattgcccaggaaacggggctcagaggccacgaaagcagctgttaggggcttctgggagatgtgtgctcctaggattagggagttgactctaaggatgaccttagaggttaacagggatgagaaaggggtcaccaaggggtctaccaggggaatgggagaggctgtattgatagaacagcttctgctgcaggttccaaacaagaaatgtgggagaatggttgaaatcagccccgggggcaccttcccgtgcatgcgtgcagctccttcaacattcagtcgaccttcagtgcctcctgtgagccaggcactgggctagtctctgggggtggagagatgagtcaggcaaatgccagccctcagagggctcacagggcagaaggtgagagatgagtgagcagaaaatgaccacagcgcgtgtggggcccagtggagggaaggaggggattcaggagcacaggagagtcaacaggggaaacttctccgaggagaatctgatcctcctcccatctggccaccttctgaagccctctctccccatccaagtgagaaaggacaggcgtatgaccagattggtgtatgaagatgctgaattacgttctcattgtttcaaactagtaaaccatagattttatgtagtaacttctacaaactgcattacaaacactccattctttgttgccctgggtagaagtttattttagtgagcccaagtttgaggaaccttatatggtatgagtacaattaccattttaatagtaagaaatcccccttcccctgtgtaccaaccagaaggtgtttttttcctaatttaaacaaacagatgcagacgtgggctgtccagctcctggcgggatgacatacctcatgcatccagtgggtttgatgatgaggcagacatttcacttaagtgcctgatcatcagattgagtcctgctgggaggaagtgtgaaggaagtaatttcaaaccacagtttctctgtggcttttacaatgtggatatgagaaccaaaatcactacttcttaaccccagagcaggactgattttgaattggtatgcaggcggttccttctgcaggcttcgggctgtgagaagtccctaacagagcaaatctggggacaagggctcaggaaaggttggccacggccccctaggaatgggggctctgcaagatccctggccttagaggctgtgagagggaacaggggtccatccccaagtaagggacacggtctttgaggaaatcccaggccagggcctgaagggcactgtcaggaacacaggctgtttcagtctgttgagattcaccggggcgctgctcactgtgagcacggactcctcaggccaatgtggcagaagagcccacctttgaaagcgagcgggtgggggtggcggggctggtgctggtgcgtgcttctgcacagccacctgggaaggtatgccgctggttgacccaggcagaggttttctttcatggcaaacctgcagtactgcattctcagcagggaggattaatggtaaaagaccaggcatggagcccccttccctctccctcgaagcaagctctgtggtctctcaatcatctttaaaacaccttcttcccgggagcctcctacattctcctggcttccctcccacccccaccctcagctcctggggcctcagcagccccacccccaagcctctaatcttcccagggaagggaacaagaagaaccacattttaaacgaaatttatttttctttcctcaggctcccagttcacatttctccctcaggagtctagggaagcttctgtctggtatcggcctcctcttcacctgggcccccgccctcctcaggtgtaccagaagccagcacactcccccttcccccccagagccacagcagccctgtctcctgggtggtcttgtgtgccaagcctgggcaacatcactcccagcttttcttgttttgccccttctccccagcaagatatttgtatgtaaggtcaggtgagtgagttaaagaataacgaagagataaacagtcaaatggagtcctgactgtcaggtcaagacaacagttatttactgaatgcctcatgtcattcaacagacatttattgagactctgattggatgtcagtctttaatgctgggtgtcagagagaggtgacttcaagggcttgcatctgtgcacccagcattgctaggtacaatgaggagtataataaaagcaggagccatagcccccaactctcaagagatctcccatgtgtgtatgtctgcatatgcgtgcgtgtgcatgtgtgcgcatgtgtgcatgtgtgtgtgcatgtgtgtgcatgcgtgtgtgtgtgcgtgtgttggggatggtgttggtggagtgagagtgtacaaggctgtgtatgaaggggtaattgggaaaagaacaatggagctggcacccagggacaggaggaaaagcaggagggctgggtttggaagacagccggatttatgtttttgaagagggaagactagaatataagggagcagcccttctcagagccctcctcctcccttcgggccctgtgtccagctttccccaaagtccttggatctttcctatgcaaaggggagtgacagtgggcaccactctcagggaacccattactgtgagagaagccactgtgccactgtgtggtcgaacttcaagaccggcttcccctgccccagctgcatggacaggcctgtggggttggcgcaagacccttccagaggaaactagctgcaacataaatccggatatggtgctgttcagggaaaggcacaacctggggatgagaagggtggctgtccagcacacaggggcaggcctcttggccactgggggaggggagaatttggagaggaagaggatgggatgccgtggaattgggaccaggaaagaatggggacatgtgatggttaaagctagttagagaagaactgggagataaacagtcacccatgcccctgaagcactcggggtgaagagattggcattttcacgcaccccagtgctttccctttgtgttgaagtcccttcgtagacatccaggcccataaggctcttctctggccagagcctcatgaactatagcactagcagggttgaggccaagcattggccctggaagccagccgaggaggagggtgcttgtgtgaatctcccaggaggggtaagaattatattaattcgatcataataagcatttattgagtgctgttttgaggcctgggagctaagcacttcacattccttaccccgcatcaacaatcctatgaggtagatgtggaaaatgcagacacggggacaggctcaatcacttgccccaaggtcaccttaactgttaggtgttctttatgcctccttataaagaaaccctgcttcccacaggtgttgagaggagctggagggagcttgactagggctcatcaggcaagccccggcatgtgcctggctctcctctttctacctggagcttttcctgcccttaatggccccaactcatttctcttagtccatgtcagtgccctgagcatctcagcccaagctgagatgatagaaacacccagaggggtcctctaccctgtgacagctgcggtgtgggaagagcacgtgtctcctccaatcctagaccagagtttctcagcctcagcatcactgacacttggggctagataatcctttgtgtgggggagggaggagtgtcttgggccttgcaggatgtttagcagcatctctggcctctacccaccagcacctccccagttgtgacacccagaaatgtctttagatcttgccaaatatttccaggaggatgaaattcccctgtttcagttccccagccccacctcaatgagaagcactgtcctagaccaaccccacaaagcatctgacacccccatccagccctggctaactttttccaccttcttactaaattgggcccagctgcttcagcagtcaatgtgttgggggcagcccactggcaagagcctcacctctaggggctcccagagaccccaagaacagaaccttcctctgagagttgagttacaagtgtttccaatcgactctggctgttttcctttttttgacccatttccccttcaacaccctgttctttctcttattcatatgtaggaagaggaatacgaataagggatatcttgaaagatgaagaaacactgacactatttctcattaaaaacatcggcctgtctgactcagtggtctaccttctgatcaactctcaagtccgtccagagcaggtagggggatgtcactggccagtggtccctggaggggagggaagcacccagcctgagaaaggcaagaaatatattggcttttttcttctttcttccttgtgttcacattcagaatccatcacttaatgccttgtatttagaaaaaaaccgggggatcacttgagatcgtgatcattttcaacataggattcgaagctgtacacatcctggtgaccttaaaacatctcaggtttttataactggaaggaaccttagagatcatggggcacaaccttctctttatagatgaggaaacagaaatctattcatttattactcaaatatttagggacagttgtaggtactagaacacagtgtgaaccagacaggcaaaaccccaggccagggagcttccattccagtggggccacaggcgatgctcaggtaagcagagactccgctgtgtgacttctggctgtgatgggtgctgcaaggaaaatccggtagagtcgagggttagagagggacggaggggcaggtttaagggggatgctcaggaaggccttcctgaggaggtggtatttgagcagagttgtctgtcagccacacagtaagtgagaggggagttccgggcttggaagctgccagcacagtgctggcaagtgctggggtggcgtcccgaggctacagaacctgagatgctgcagaagagcccacttctgctttcctggaccacttccttctcagcaccaggcaaactccttcttctatcccctggcacatttctgacctgtgtatacgcccccaatttatctaacccctttaaataatctcctctatttatgcagagcattcttaccactaactcacgacttgcacatcccttagctcccttactcctcacaacaatcctgagatgggtcagagaaggaggcttgcgcgtctggtgatggggtgatttgtgcacagttacagggctagaaattgtcagagccagatggaatccaggtcctctcaatcctaatccagtgtttcttacttcagtcctgtggctctcaaagcccagagaccagcagcatcagcgatgcctgggagcttgttaggaatgcaaattatcagggcccactccaggtgaactgggtccaaagccctgggataaggcctagcaatctgtgcttcacaagccctccaggtgattccgcaggctcaggtgtgagagctgcagctgtcctctgggccttctgggctccccgcccagcttcttcagtgtgatgaacacagcgagaatgctagatctgcagcagctgatatcccagacaccctcccgactccctcctggctgggtctgatcctcctccagactccaggagagaacgagacataaacagaacttcagagcctgtgttaaccctgagatcaaggtctgcacagggtgctgtctgagtccagaggagtgagggaccccaccccacctggtcagcaccagctcctggaagcaggttctcacactggttccctgcacaatgaaggagctcatacctgcttttctggcttctcagaccctgaggttttcaccgaaactagacaaggggaacctagggtcagcctggaggcagggtgagcttggcgcctgcagtgcccaggccctgggtggtgcggctccggccaggccctgtttagcttcctctcccacccccacagagggggtgctgtcggcaccgattgctcattttcccctttgctttctcttcagctcgtaaaactcaagtcctgacaatgccttgatgacttccagttggtaataaaagggagatgaagataaggacaggaatttcggggaaatttctttccagttccttactaatgtgacatttagatctctagtactgtgcttctggcatcagtgccaaggcctttcatgttggagaatggaggccggggtcaccaggttgtgcctttatttcatgttgctggctctgatgagctgatgctctgctgattagcaaacgctgagccatctgcgcttcgcagaggcacgttccagccaacccggccctccctgcccacttcccaggatgctttgccttgtgggctcacctgtcttctagctcctgatctgtatctccacctccatccagttccggggctccttatcagcactgttcccagaactgtccatcacgatggcaacgttctctctgggcgctgtccaacatgggagctcgcctctgtgttgtcactcatgctcattgaacatggatttgtgtcctttaccatcaggactggatacccctcctggtcctttctgcctggggtcttagcacagctcagaaggaacctcaccattccctctctccatctagggaattagaagatgacaggggcacagttctctggctcacccccagcccagtaaactcctggacatgcttcaaggcccagctcagatgttgcctcctcagtgaaataatttataaacccacccttctttgtcctgccttctccctcttccctactcactggagagttaacaggtgatggttaagctctgggttcaaatctcacaaggccacacacttagctatgtgacttcaggcaagttaattaaccactctgtgcctctcgtttcctcatttgtaaaatggaaatagtaaaagtgcctaccagcatggcagttgaagttaaaagaaataatatatgtgaacacttggaagggcgcctgacacatagtaaactctcagtaaatactagctgcttttagtggctattcttaacacaccctcttcagtgctctggtttcactatgttttatgggtccctgagatcgaaagtgtccacaccgactcatggtcagctgtaacctgtgcctcgtgtggggaccaggctgccatgtgtagtctggacagtgtaggaggtggcagagctcaggcctgttctgccctccagcccagagagccacgtcgttagatgtcatgggagactgtggtgccccgggaatctcacgaatttgcccacggtactcagtgtctgtccaatgctatgggagtccaggactctaggagccagttaaggtgctgggtggccacaggtccctggccaaggtccaggcctctcccctgccacctgatcctcgagaggccatcacgagggttgtacttcaagaaccactatccttgagctacctaggagctgcagaatgtgcactctgcagggcttagggcctgcagacaagatagatgcagggtgtctagttaaattcgaacttcagataaacaacaaataattttttcaaataattgtgttctattcggtccctatttgggacatatttgtactaaaaagtattcatttatctgaaattcagattcgactgggcatctggtgcttttgtttgctaaatccaagagcaaatttgttctagctacttctcaaccccaccttcagagaggaagccttgatggtactgtaacatcatgctgtaagaaggggatcccttgaattgtaaatggcactctgataagatgaggtatggggattgtattggtttcctgttgctgctgtcataaattaccacaaacttagtggcttcaaacaacacagatgcattatcttacagttctggaggtcacaagtctgaaagttagggcatcagcaggactgcattccttactgcggagttctagagaaaaatccattttcctgcctccttcagcctccagagacacgccacattctttggctagtggtctgcttccatctccaaggccagtgggggcttatcaagtctttctcacatcacatgactctgtttcttctgcctccctcttctacatttaagggacccttgtgattacacaggggcccacctagaaaagccaaaataatctccttattttaaaatcagctaatcagtggctttaatcccatctgcgatcttaattcctgtcgccatgtaacacaaggtattcccaggttctgtgggttaggacgtgggtgtctttcctaccacagggcagtttctagtgttgcctcttctccctgcagttcgctcatggagtcccggacctggcgctgaaggacatcgcctgcagcgaggccctcctggagcgcttcatcatcttcagccagagacgcggggcaaagacggtgcgctatgccctgtgctccctctcccagggcaccctacagtggatagaagacactctgtatgccaacgtggacttcttcaagctcttccgtgtggtaagggaggggtttggctgctcgccaattgcaaggtgattcctggggtagcagagcctcacgaattgaccttggggagggcgtgagcctggtgttctggacaatccttgcaaaagctccaggctcccagggctcaaaaaatcacaactgatagtatttctagaacagtggcccagggacccagaagtcactatgaggttcaccattaggtatgtggctgtggcatgtttgtgtccactctaaatgtggggataatcccctttacctcctctaacagagtggtaaaggaaggaggaggcctggtttgactccctgacctgctatttcctagccaggtgatcatggtaagatattgaaccttttctggtcccagtactcatctataaaacaaatataatactttacagagtggtaggaattatacaagaaaagtatacgcaaaacatttcataaattttaataaatgatggccccatgcttcttcctctggaaatggtctcaacctcaatggttggtgtttctagagagaaaaaacgacagagaaagtttcatagtctcaaaaatttggaaagccctgatctagctcaaccctttgttctagaactgcatcccagacagactgcttgggacctgaaaatatctcctcctttgctagaaggataagatgagaaggaattagataaaggaggtgtagagcagaggttttcacactgcaaagtgcataaaaaccatcagagggccgggcgcagtggctcacgcctgtaatcccagcactttgggaggccgaggcgggcggatcatgaggtcaggagatagagaccatcctggctaacacggtgaaaccccgtctctactaaaaaacacacacacacaaaaattagccaggtgtggtggcgggcgcctgtaatcccagctactgaggaggctgaggccggagaatggcgtgaacccgggaggcggagcttgcagtgagccgagattgcgccactgcactccagcctgggtgacagagcaagactccgtctcaataaaaacaaacaaacaaacaaaccaaaaaaacccatcagagaagttggtaaaagatgcaagtgctaaatccccacccccaatcactgtgattcagaagaaccaggccaggcccagaatctatcctgttaccttaggcgattctgatgaagaccattgtaggccacactttcagaaacactcaaaattagaatccttcagagaaggtggcatatataatatttctagcatggaattatgttttttttcttttgcctacattttaatttctagaactgtgttgtagggaatgtcagtcactaagaacttgattgaggaactgtgttttgtctgtttcatgactgctctctcaagtcccaggaaactcactttcagcttgtcttaaaaagcaagctgaaggcttttaaaaatgaagcaacatgaaataagacaccgcagtttctggcacggtccacgcttaatccccttcaatgtgtgactttccgtggaaagttactctacgattttcccagctcgtcagggtggggccccagagtgagtatgaagggtcagagcctagggatgccaccatcagtgagagcccaggaccccagaaaaggtctcttggctcaccacactgtaggaaaaataaaaagcaatgtagtccaaatgtctctatccaaagtttcaaaaagaacttgattttagacacgctccttgacttgttttcagaatcagacagaagagtgaggcaacaaaggtcccttattccaggcagctgaataccagcacagccaggagtccagtgctggtgtttgcagagccaccagaggctccctctcaggtgtccagggcccgcatgctttgtagaatgggcagaatgagcaatgtctgtgcacctgggctttgcaggcagggcctgggtacccaggttcgtgcaatcctctcgtcaccatgaagggagcagcatcattcttcccttcttgaagcaccttggccaccagtataggtaaatttacctcccaggacatgaccattgattctgggatgtcaatgccagagatagtagggtaaatcggcacctgggtaaaactttccattggagactagaaccaaaactcaggacactggcttccaaatgtttctttatcagacaagaaagaccaagtctttccttacgtcttcacatgctgccttggcaaatgctagcattcacaaaccctgggctaccttgacctgtcacccttgcagacctcagacgggtcctgggggcttgctttctcggtttctgtatgcaggcactcaaacctgcatcaggcacctgtgaagggccgggcactgtgctgaggccaaggctccaaatgtgaaccttccaccctcactgaactcacagccagaccagagacaagcaaacaggacatttcacagcagtgcagcctagaaagggccaacaccagcagcatttgtccccccgagcggtagcttttagaagcttccccagtgattcaatgtgtcctacaaatgcctggcccccactcccagagattctgagtcagctggcctagggtgcagccttgacttcactgtgttaaaaagcttcccagataagtccaatgtccggccaagattgagaatcactgacctagagtttaatttaccacctcagtctctatagaccacgcataataatagtaccccacacacctctgagggtccaaagaactttcatttgatcacccatgagaccaccgtggtgtggagatgctttctctctcctgttctcttaacaaagctggtgagcgacagagcctgcagtggaccgggagatggcccagaggagaaagctctgccgtagtcggcctcagttaaccacggagcaccacccctacctgctctcctctcactcctgcttccgtctcggtggagaaagatccaaccgaagcaggacacatctagtcttctggtgcctttaaaatgtacttttccatttgacaaatggattacactaaaaacaaaaatttacaaaaaaaaaaaaaaaacctgaaagaaattgcaggcattaaaatgggactttgcctttattgctcctgggcccatcctatttgggtttttagaaaaacaagcctgaggcaggcccagaaaggctcagggcagaccctccgatcctctgaaaggagcatcaggcaggcaggggttgctccggggccagggaaggggccccgctgggacgcggctgttattgcagctggttggcgcgcagccatgcttagctgcagtgcgggaatgctgggccttctgttctgggctgtttctcatacgcacgtaggccagtgtataaataaggttttattaaatgccaaatgagttctcattaacaaagaaagagggaaaatctcagtaaaccaccgtgacggcatctacccactttgagtcaggagctgggggtgtgagtgcaacctccgagacaagggaacctgtggagcccagagaatcggaggggggcgctggggttagcaccgactgagaccagctgtgttttctctcggttccttggagatcagaagtgagtgttgtcatcttcaaacaatccaaaggcagtacccatggccttactacatccctcccacaccatcccacccatccccgcgcgtacactcacacgctcatttgcacactatcgcacacgctcacttgcgtgcgcacacacagattggtgacctaggtggactgggagagaaataagagccaaatgactggattttctccaaggaaatttattaatagcccctcttggtttcacctgaaggagcttgtcttcacctgcggcctttgcaggcttaacgcccccagcttgaaacccagaagctcagacttgggcccaaggtattattagtgccaacactacctgaaatgtttcgcacctcataaaaatggtgtgtcagtttcgggtgagaggttgggacgcttcccatctgatttggcccaaggcatgcatgcccctccttctccttcccctcctcctccccctcttccccctaccatccttcctgttttctctccaactctggtgcacagctttgaaatcttgctgagaagcaaatctgtcccttctgctttgaatgtttatttgtggaagttcggcaggggaaccgaggcgggtgccaagacctgccatgctgctgggaagtctgagtctccctcccttccccctcctaaatgcttgttgatagagaaaagtcagcctcctcggcatttgggctcacggttttcctttgaaaatgcttccagtgtggcatgattcagctttcttttctgtcccccaaccactgctctgttgtcatttttacttttctgattgcattttatccgtgtctctttgactacggggtggctggacgttgagttccaggaagaaaagggcccaatcttggggttctgactacatgcgcccatcaatgtcctgtttcattcttggctctggctccctgaattcctgagtcactggggagaagcgtgggtggaccgccccctacccagtgagagttgccacagttgctgctctcctgggtcattggttgcagattgttaaacttcacctatgcatttcaactttcgggtggatattgctacgtcaagtgtctgggaaagcccccacagctacaggattttacagtgaggtcccactaatgacttgatgtcatgacttcctcattctttccaatttctcccacttctccataagggttttgggaaggggagaagagaaaggagtgattcctgagtgccagtaccagggaacagcagggctgttgggaggaaacaaaactaaatcaggaaggtttttgttgttgtttttggggggttttatgaaaatattcaagccacagcaaatatatttgatttatagcattagtattttttctgcctgcatctacaaaaatctttacctattaccatcaaaatatcctctgggtgaatggatttcaacaaagaagaaataaaaatgaaatagaagagaggccccttcgtgcacattgagcctactggctggattgtcacttgcctgccttgatgtcttttcagctccaggcaggcagtaggccagggcttattttcatgacagatcagatgttcttttatggatttacaaagaaagaaatactgagaagtcaaaactgaagtcacttaagacaagagcaggcccctgggaaggctgccattgaggataatgagtcctggggtcctggcctttgttcagtaaatacgcactaggcgcctacaatgtgtgcaccaatgtgtgaggcgtcaggttctctccagggtcagttggttttaagaaaggttttggcttctgatatgttttatctctacagaacagtagctcttaacctttcttatgggttaggattaccttcgagaatctgactacagctctagacctgttccctaaagaaaactaagttcacagggacacacaggatggggctcatggagcagctgaagccagaccccaggttaatagcctttacattaaaatgtttttctacctaccactaatatgcattctttagtaagcggtctcaatatacaccgattcttccttaactctgtttatgaagtattcagcatcctccctgcccccttcagcatcctccctgcccctgagcacaggatccaatggcgtgaggaccacaggcctgggcagctgctggggcatacaggcatctcttagtggctgagagactgggccctggctctatgttggctcctaacttgctgccatttaaaggaaatcttagcctcccatccgtaaaatcgagaaaataagacttgtcctacacagctcatgaaatagtaatgaaattcacattagagaagagatggaaaaacactttgaacaaaaagcattttgctcttataaaagcacagcctcttttgagaggccctttgctccccatttctccttcttcagacccccccagactaggagaaggtctgtctcatggagtgaccttttggctgcctctagattccaagctcagttttgctttcattaaccacagatactgggacggacagaaaaagacctagtttctgttgagccaaagagtctcataacttgtctgttcacatacccaagagcccaccctctagttgagacactcagttccctctcattctgggagactgcatgtctctgtgacctcctggtagagaccgtttgacatgtcccccaaccccccagtgattgagtctgaattctccactgatgacgcatttcctagcactcagggtgtcccctcctggttgccccctcaccactgaagcccgcttcctcccttttcatttgatgcttaacaactgtcagtttgcaagaaacatgcttcaaatccacattctcccagttgcctagcaacaacttccctcccggataaatgtgggtttcctgtagctcagcccaggactgaacacagcagcacacacttctgtccactgcttcaactgcttttcacctctggtctgcatgccttcaagactgcagctcatccctcccttcagaaccttccatagcctgcagaggccatgtctgccccaaaaagacacattgaacctgaggctacttatttacccttgtgttaggtatatcctcaacttagaaattaatactgtttccagattgtcttctttgaatcacagaaagtaaaacaacaaaacattcaatgcttaagacatttcatgtgcggttgggtgacatctgtttgatgaacacatttgatccaaagcatcagaaatactatgccaacaagactttttaggaggtgataaacatgtctgttctaccttaagaaaaaaatattacacagtcccaagggagagacatggttttgatcccagacaacccaagcagagacctcttagggccggaatcatcttggctgctgcctaggaccttatatcaatttcttaagcacaggatcaaggcctaaaggccccttagactgacctcagttagtagaggcagatcccttcacagccttatcttccttagaggtctagtctgaccttgaacttcggctggcagtgctgtcagttgtgatgtgtgacatggaagagttatttgttacttggaaaattaagagaacttatttggcataggaaattgtgtgtgtgtgtgtgtgtgtgtgtgtgtgtgtgtgtgtgtgtgtgtgagatgatgtttgccattttgatctgtgacttttttttccagaaatagtttctcagttccattccaactaaacttacagtctcttccggttctttgacagaaacaattcatgtgaatttgaacagataatagggaagggggaaccaaaagaagaggagagccctgggaaagttattttataatttatggcaacctcagtcaggcaactgtgaacaggtacatatggagggctccctcgggactaggcagtattcagagatgtaaggtgtgaggaccggaccctcatcatttaccattcccactaaaaagagctgggaaggaaattgtagctgtagcaccaggcacgtaactggagcttagtaactatttggtgaaggaatattattaaattattaacaagatggaaaaaagggtattaaccacacaaaaatacatctcaagctattgtttctctgttccctttcccccaaattcctagtcttgctcttatctggctgtctctctagtcactctttcttgctgactctcttcacgttcctttctccacctggaattcctgggccctccccttttactgacagacactgtcctcactctcacagtcatcagtttgtctctttacaaacctcagctcaagtgtcacttccccgtccccaggtgaaactgactgctccctccctgtaagtcaccatgatgactgctatatatagccctcatggaacctaaaacctcaacagacacagtctctttcctactctgttatagtttatttactcattaattaccacaacacgtattattgagcacctactgtgtaccatgcccagaagataaaagacaaacaaaataaaacctattcctatgcttaatgagtttacagtctagtggagagatagatacattaaaaaataacagcaaaccaaaataaaagtggtaaataaatgcactgagaaagacaggaatagctaggaggggcacctaatccctagggaaggaaagctggaagagcatggtgatgggggaagaaggctttctggagaaggtgaggtagtttgaaatgagttgactctggccagtaggggtagagtgagaatggggtgagacagggtgggttggtcattttgatccattagtcctcaaagtgataggactagtggctaaggactgcaggctttacagaagcctacaaaactatttgagatttgaagtttttttttttttttaattggctccaaaagaaaatgaaaaaactttagaattataatgaatgaatattaaatgaatatttaaggaaggtaattttattcaacttcattgttaaatttagttaaaacaagcccttgagtttcattcaacactgttttatcataccgttgatgagagaaaacaaaactgattcctggccagggccactgtcagcgtggggtttgcacatctttcccatgtctgcttgggttagctccaggtactcctgtttcccccacatccccaagatgtgcccattagtggaaacggtgtgtctgcatgattccaacgtgagtgagtgtgggtgtgggagtgagtgcccctgccatgggagggcatcctgtccaggttagattcctaccttgtgccctgagctgctgggatggaatccagccacccatgactctgaactgaaataattgggtgaataattatcttactttttaattaatctttgaaaatgtatgtatagttcacatgtatttcaatatttaatattagaagtattttagtctttattttgaagtttggtgatttattgtaaccagaaacaagctatagaaacttaattttgggccaagtgcagtggctcacacctataatcccagcattttgggaggccgaggcagacgcatcacttgaggtccggagttcaagatcagcctggccaacatggtaaaaccctgtctctactaaaaaatacaaaaattagccagatgtggtgggcacctgtagtcccagctacttgggtggctgaagcaggagaatcacttgaacccgggaggcggagcagtgagcagagatcgtgccactgcactcccacctaggcgacagtgtgacactccatctcaaaaaaaaaaaaaaatagaaaagaaagaaacttaattctggtttatatcaattagcctgtggtaaaattggtttcattatagccatttcacttagttgaagtttccaataacctgtggatgaattaagtgaggatttactatattcataaaatcttaaattccaaagcctgtttgcagttcaggtttttccactttacaaacacttctaagtattcacaatgattgcttaaaattcataccagataaatcattaaataagttgttcaaagtcaaataatttcataagtaaaaattaggagcttttagaaaactatacctacatagacctagacctatagatagacagagatctgaatagatatggacacagatgctttccaaagtgttcatgtgatgtgtggtggagtttcaagaccagagtgtgcctggggcctgcagaagtaaaggagaggggatggagagaagattgtccacatggccatgggcaatctcccacccacactcaagtgaggaagacaggaaacaaattcagaaagaagagaaaataatcaaaactgatgggagcttgtgactgatttacttatgcgcagcctccctggagacatgagtgtggctgttccttaggttgtgcctctgggctcctaccccctcttagatgccttcctattatctaggacctggttgctttttgtctgcatagcttctttggattccagtctttgatgccagcttcctcctaaagtagcctttcagatgtcccttggttaccctctgctatctaagggctcatcctaccccacactcattcccagcaccaatttctggatctccaggctggagatttagacaatgggatgggaagaacccatgatgggtcccagacagaaagtggtgccagccacagaaagggcacacaggcacagaagttggtttggggtaagacgatgtggtcagttcagaacacgctggatctaggcagatgcccagcagacagttggatatgtaagtctgaagctctggggagaggtctaggttggaggtacagatttagaagtcatcaacaaaaaggtagcagattaaatgataaaggaaatgagactatccggggagtgtgcagagtgagaggagcaagggaggcccttgggaacctcagcacttcaggggaaggtagaggtacagttgctggtgggaaaggcagagaagtagcaaagcaaaccaggcaaaagcagtgtcacagacgaccagggaggaaaaggacatgatcaaaatgttgagaaaagcagagaggtttgaaaatacaagaagcaaaaatgtccactagacttaaaaaccaggagaaaactggggggttcttgataaagcatcttagtaggatggtgagggtagaagccagggaagtgttggtgaggaagtgaagtcactgattacggactatgcttaaaagaatgtgggaatgaagggtggaagagagaaattagactgtagctagggagacataagcgatcagaggtagattctttctctcctgtgggagaatcttgcacgtatacacagcatgacgacagtgatggaagggctggcgaagcctcagggagactcttggaggtaaaccccatgaagggaggactttgtttcattcactgccgtgtccccagcacctggcacaatagcagacactcaatacatatttgtcaaatgtgggattttatcatttagaaactgcacctggctgtgagtaacaaaagtcagagaaaccgtgggtttcatttttctccccaggcagagtctggagctgggtcctccaagaggggtttggagcaccacaggtttcctcaagacccccaggctgccctgtgtttccctccttcatccccagcatatgcctgtcatctggtgacctccaaacacctgtgctgcctcctccagcacatccatgttgcaggcagggaccaggcaaagggcagaggggcctacttcaaaagaccatttccagaaaccccatcctatgacttctcctggtgtcttggttaccattgtgccataggctcaccctgtatgcatgggaggctgggccaggcattatgacttttagcaatattgcatagataagcatcaatctttgtcactgtgacgaagcctagtcactcagtgctaggcaaggttaatggaatgggttggtgtgtgcattattcttgaggtctttcttatgcttcatgttatacatttattaggacgtttaggcaacagggggataaaaatgaagaggagatgcatgctatgatctgaatgtttgcatcctccccaaaattcatatgttgaaatcttcatccccaagatgatggcattaggaggtggggcctttcggaggcaattaggtcatgactgggattagtgcccttgtaaaaccccagaaagccagcttgccgcttccaccatatgaagacacagagagaagatgccatctacgaatcaggaaatgagcccgcaccatgcaataaacctgctggagccttgatcttagacttcccagctgccagatctgtgggaaatagatttctgttgtttacccagcttatggtattttgttgtagcagccagagtgaactaagacagtgctgatctcgtattcttggagggaacccttagtctttagggaaagcaaagccaccatttggggcagggtgttctccaagtgctgccacatatgctgatgtggttaaactgcaaactatggtaaaaatgtggaggtctgtggaattgtcaatcaggaaaaagatataaaaagaagttaaagtcttcgtgcttctggaaggatatgtgccaaattgttaacattgattatccttgggtagagatgtggggaagtttgcagagacagttttgccttgtactttatataagtaaacagctactacttcgttgtcttaaaaaaaaaaaacagcctatgtgctcttcatgtgactcagaactacctaggcaatacgattaattgaattagtaaaattgagtgattatgaattttcaggaagtcattaatttaccacttctttattacatccacttctaacaggacttcaatataggggaatttgacttcaagataaaaagaccaaatttatttacccttttaaaaaaagacaacttaaaagcagacttgtcttacagaaccttccttagttggacatcgatgagtgtacagaaaatgcaatggataaaaagcttggtgatacaaagataaaaagtggggtcctgtccttaatgaacataccatttcatggagtatcaggtgtataaacaattataatcaatctgcttgttattctgataagatcatttactcacacatcaaatactgagtgcccaccacatgcccagcatacctagaagtcatccagtatgatttctgtctacatggagcatagagtcttacaggggagatagatgacaagtaaacaccagaataattaccaatggtgaagagcacaaggaaggaaacagaactcctaaagagagcgtggctgggcaggggtgagcaagaggcatagaaaaaggggcatctaaatctacttgggaggaagctgtttctcacataggtcatcatgttaggaatgagacttgagggatgagtagaagtttgccaggcaaagaaggaatgggggggaatagagagcagagctaggggcaggagacagctgacgtgtgagcagacataaaaagaagtccactgtggcagcagagaagcaggagagaaggcaagtgagggagccaggcaccagctcacagaggtcatgtgtgtcaaaacgtagtaatggccttctcttctggagacagtagggagccatggaagatgtttgagcagggaaagcgacatgactggattggcctgttgggtaactcagaccacaatgcattggaagggagggggctagaggcaaggggactggcaagaaggccagtcctttttctatgcctattttgatgaaatattctagaagggaagtgaacaaaggtagtcctagagaggaagaacaaaacagataggatacttccttagtatttgctcattcgacaatttatttttgcatatacactaaaaccttttttattattaaaacgttttattgtaggaaaaaagtatgaaagtagagtgaataataaaatgagctcccatggatctatcacccagcttcaactattatcaatatttggctgttcttgttttaactgttctccacctttttttcctgaagtttttttgaagcaaatcacagacaacatatcatttcaccatatgtacttccctctgtatctctaacatgtaagaacttgttttaacaaaatcaccatgctatgatcatacccaacaaaatttatcataatgtcttaataatacctaatacccatttcatgtccactttcccccaattgctacagctggtttgttcagatcagaatcaaaatccacctgtggccattttactgctatgtctctcaggtctcttttcatctctaataatctcaggggagacaggagggaggacgggcaggacttggggctaacttgcttatcgacacacagttttgcctacttgcttcctcccttcacacccactcttcttctcagccccacccttgtatggaaaaaacagaaattaaagtgctttgcccagcacccactgaagctatttcgaaggagtttgaagagtactcccggcaagacaaatgcctcggtccagtgctcaggtcaaagaggggagacgcttctcagtgatgtggtgtcaatagcagcttagttgttctttcctctggaaaattctacccatctgctttgtaactcccatacctaacaaggccttttatttcacaattagaaaataagcctgaaatatgaatgctgcctgagtgtacctacatttattctagagtttcagggtcaaaaagaatacaaggacctctgcatctacagccaagaggagaggggcaaagacacacagctacaaatgagaacctggctggtcaaagcctaactccacctgtttgtcagcactgatgcaagttaggtcagcccaatgatcatttaggagaactgtgctggcaaataaaaagcagaggcttttggtccccagatacttggatgagaattacaagtccagctggttaaaaggcacatgcccagtgctcacttcacacctactcaggaagcacacttgagttggaaaaccactgtctttacacttagaactcagtcctacatgactcctctaggatcagtgattccatcagttttgaaacatgaagcatgaagtcaaacaggacatgaccttggtttccagaaaaccagatgttcacatcagtctctggagcttggaggcagcacacctggggacttccacatcccctgccgaggtggcaaaagcaggagcagtggtgagttcacatgggctggggtttcctgaacactgctggcaattggagaatctgcaagggaacttctccgactcctaccagcagctgctttaaaataaaggtgatgtagctggtcaaatcctccatgagagagcagtgttgaatggaggaagagacacaacctgtctgaaaatggcacaaaggaagaaagatgtaaacaatgacgagaagactgcagtgtctacaaagctccgaggtgaacagatgggcaccccaggcccgcagcacttccttcagtctctgccagctgcactctgttttccttcctccaggaatcttgtttggtgtcactaaaacagcaattagaatcactttgaaatagtgatagtatttaatataactatgaaactatctgtgattgacaagtgcagcaaggagtcttggaatgagagcctttattttttcaattaaataaaagagttttttgtttctaaaagtaatcttgcagaaaagatcctgcgatcagaaagaaggagggggggagttttcaaacatataggagatcagactgtgcctatgtgtgtatatacctacaaacatatatatatttaaaaaattgttttactgtcaattacagcttcccacactcctagacagccgttctcaaggtatcaatctgagatcttggggaggaatattatctgatatgtcaccaagaattcaagaggtgagtagcctgatggtagtaattataatttcattatgtctttccaccatttaccccacttatgtcaaataatttaattgtatttcaaacctgttcaaggaaaagtacatttgatctttccatctagcaatttcaaagcacctgttcacatcccaaattatctgtgctcttaagtaagaggcagaaagaaaggaaccacccttctgatttcacatcaaaaaagaaatgccactggcaataagcaacttgcctggtgtggcataaatcatcagaagacttacagttgaatctaagtcttttcagtactgaggtggttcattattctgttacagtcttaaaattcacataaatatatactgccaataataatagcatacacctttatagcttacaggcactcttcttctaagtgttttacctatgttggcttatttcatcataaagaaaacaatggacttttgtgttgttttgtaaaaagatgcgcacattttaattaacatctgattgcacaagtctcctcccatatagaaatggattcttccacgcaatagataagaggtgctggggatatgatgatgaacacacagatttggtcatgaccctgtgggaaagagagatgggaaaaaaacaattctcttcaagtgtgatgagtgttacgaaagggagggaaaagttgaaacaggtttttttccaaacttttctccctccattattcgcagctgacttgggctccaccaacctggaaaactgcatggttggaatctgtctttataaaacgcatctcaacctgggccgagtatgcacactgatgtgggaaagttagagaagagcccattgtactaatgctcacctgctacagtgggagtctctgttaaacagtcttttcttcatagcattaaaaaaatttatatcactacaataaggttgaaattgatagagaatgtacaaacaatccccaaagtatatcaacactcttagttctgagtagaagttccagaaggcttcttgactgtctagatagcaagtctaatcatttgtgaactaagttaaagcagaaggcccagtttatatgaattggtattacaccatttgacctgagaacagccccttcatctctgagtgctttgactaaatgagcaacataataatagtaataaccccttacaagatgtcataagactcactgttgttgaagcaatttgagattttgactttattgaagcatagatggtgattataggcatgactcactgtgtggattctccctgggctcatcagtttcagagggcaagtgttggcatgtggacaaagagagggatgacacgtaaacatggcttattgcaatggggaaatattttcagtctcactgattgaatcctaatggttttataaattccccagtaccactgaaagcaaagcaagtaatcaggtgtgttttaggaataaaagcagcattattttaatttcgtattttcccctaaagcaaagccaaatggcattatgggagccaagctactggcagctccaccagccttctcctgagttctcggcattacagatctaccctcaaaggatgaggccagcaagcaccacagggtgcccacatggagaagagaaggccaccaacctcctcttagctggcacagaattgaaaaagtgtttttccaggaatggatacttcatctgttctgtatttgctagaattttaaaacgcacacacagacacacacaggcgtgcacacacacacgcacacacacacgagaaaaccacaaaccacacatttcaaggaaatggaagaattcattggtaaaattaagctaataagattattttccaaatataagaaactaaattttagactatttagccaaagaaatttgctctgatcttgcttttctacaacagaatcattccccaatcattttatttccctctttttctccccagtatccccatcttggtgggacaacagaacccaagaactggcttaacagtaaaatattttctgcatttgcccaaggacacattcccaacgaattcaaataaaggagactagaagaagagaggctatactacagtgctctaggggtcactctgtgatttgttgttgttgttgttgttgttttgagacggagtattgctcagtcgcccaggctggagtgcagtggcacgatgtctactcactgtaagctctgccccccaggttcacgccattctcctgcctcagcctcccgaatagctgggagtacaggggcccgccaccatgtccggctaatttttttgtatttttaatagagacggggtttcaccatgttcgccaggatggtctcgatctcctgacctcgtgatccgcccgcctcggcctcccaaagtgctaggattacaggcatgagccactgcgcccggccactctgtgattttctttaaggctcatcctagtattctcctagtccctaagtagatggcagtaggttttgttttttgtttttcgcagctggattaaggattgctgagaatatatggatgttttcttttaaatgtggaagtcaaaccaaacgttggagcattggcctcacagcagattatgactctagctgccttaaaataacctgaagactttgccttgccctagtttatccatcggccgagtatgcaggacttgctgtgggtgaccaggcccctcatgcagaatggtggtccagagacctttacaaagctgatgggcatcctgtctgacctcctgtgtggctaccccgagggaggtggctctcgggtgctctccttcaactggtatgaagacaataactataaggcctttctggggattgactccacaaggaaggatcctatctattcttatgacagaagaacaagtaagttttctgagtcctgcttataaattggcctctcatgttggttaagttgatggtttaacacttctaggtgaaaccaaacctggggttgcatctgtcttgtcttgctgagtggccttaggtaaagagacttctcccagaaagtccacttccccttgcagaaagggggcattgcttataagcaattctggacatgaaccacagaaagaactgaggcccacttggaaagggaacagaggggccatttcccactgatgtaattgaactagggctaagttcaagaggaagagaatgatccgcaaggaagcaacccagagttccaggtgaagctcaggtcagaagggccctggcaagtaaacacggctgtgggatgcttttacaaacacaatatcgtgaaaatctatgtgtgtagtactgaattacattccaaatggcaaattcctggcaaatcatcttccccacctttcactatttttttttttttggtcttctatggggtaaaggaggatggggtggggaagaaatgtaactggctgcccctctagttaaaaactgaaaagaggcagcaagggacatgccaaaagtagttggactctaagatagctacacacaacaaagcagctaagcagctaattgaagggaaattactgaggctcaagctgagattccaagcgggggccttgtttggcctctcagtccctttcatctgagaaaggcctcagttcctagcagtaatcagaggcaggcttctcagcctccttctcctaaagcagaataaaccacagggcaagtcgcatcctttgtttctctgatgaggccattactgagagtcactgtggcattttgctactaatgatgagcttgttattggtggggtacagcctattaatttaggttattcatcaaatcctccagcatggagttgaatgagacatgtgatgtggatacactaatgactatattgagttacaagcaatggggagtttctgtaaaatctgtcccttgtctcctggcagcatccttttgtaatgcattgatccagagcctggagtcaaatcctttaaccaaaatcgcttggagggcggcaaagcctttgctgatgggaaaaatcctgtacactcctgattcacctgcagcacgaaggatactgaagaatgtaagatcccagctgggcttgccttgtgtaccctggacctcccagaagtgtgtgtgtgtgtgtgtgtgtgtgagagagatgtgccttcctggtagcacatctcatgtttgttttttgctaagtggactcttgcgtttcctcccccatccacagtcatcactggaatgctttgcttcagtgcccctgcctgggccctcccctctctactgcagcctacaatgaggttttctttcccattgcttgaattatatccctaatggaagggttcacaattctctgaatcctggctactcagataaagacagggaggaagggaggaagggtattttctcccagggggtccaaatctagctttaacgagggaggttctgagaaaataatatcatcaatattacatggacttctgagatactaagaaattagattctgtcagcccaggaagttgggagatggtgaattgttctgggaaatagcaatagactgagaaaataaaaacacttccttgaaaagcctttccctaacactaagtgataggggcagaaaagacacaaccaaaagttctctctcacttttctctctgttcgtgtctctgtcttgatctctgtctggttttaggccaactcaacttttgaagaactggaacacgttaggaagttggtcaaagcctgggaagaagtagggccccagatctggtacttctttgacaacagcacacagatgaacatgatcagagtaaggggggttggaggatggggaggggaggggaggaggaagcggtgggggcaagaaagttccacttgtttccttttcccaggaaagagttaatcgctattggagttagatcaaaatacaacaagcaggccccaaaggccttcattccaagcagtcaccaagtggggtcactgactttggatgagaaatatgtttcttgaattctgggagaagtctaaaagctgccacaagaccagtggcttcctggagtttcctacttttatgaattcactcaagggcctcaaattcaaagaggcatctccccaaggggccagctctgtaactccaaagatggtggaatgtgtttgtctggtctcattttcagctttgcaaaatgaagacaagagttctatatatcagggacactcaaaagaaaacaaaaatatccataagcaaaagaaagctttttatacaccatattcaatgacccccatctggcccctcctttgcccctacacatcttccctctattctagagacccatggacttggggaaatgggatatagataggtatgtttcatagtggaacaagctcaccagctcttcagggagccttagcatctctatcctcaatcactaaaaattagaaatggctgaagaacaagaccaaagatcctatggaatttctaagcagagcagtgactgtatttcttcttcccaaggataccctggggaacccaacagtaaaagactttttgaataggcagcttggtgaagaaggtattactgctgaagccatcctaaacttcctctacaagggccctcgggaaagccaggctgacgacatggccaacttcgactggagggacatatttaacatcactgatcgcaccctccgcctggtcaatcaatacctggaggtaaggggctgcaagccccacagtgggccccttgaagatagccccatgagtggggccagagctcccttagcaagtcaagtggtcttgaatttaagctttcattttccccactgaagaaacaagaatccctacatcccctgtacagttctcattctctaacagcttatccatacttaaaacttatctatgctgaaaacggtttcctcttcacatctcctacttctcatgctgggcacctcctcctgtagccccctttaagcatctgtgtctgtcctcaaccctcttctgtctgacattgcttgagtggccatctatggccagtgtcccctcaaccccacagtccattgcttgctggacactcctgccctcaagttctacaagcacatcagcctcaacatgtcccctccaaaaactgtatgttctccttgcccatagaacatatccttctcctatatttcctatcctaattaacgtcctcagcatttgcccgaattctcaagtgagggatttcagggtcatccctaattttccttcttcaccctccacacagtagctgtcacttactgagtgttactttatgccaagtactgtgccaactgcttttacacacatatgcttcatttaattctcacagctccatgaggcttgcaccattatcattgccaatttgcagatgagaagccagggcttaaagaggttaaataagatcccacgcatgaccattaagaggagcgaacaggatccagctctgggggtgcctgagttcagagcctgcctttctgatttctcttaccaagctttgtctcctctccctcctaaatatctctcaactctgcctcttgcattccaggctctctgaggactagaggccttgtcatctctgcgccagcccattccaagggcttccttcctggaatccagggtccagcctctgttggcccaggcatttctctacactggcaccagagttacattccgcacacctgcttacgttgctctctcacttaaaatcttaatgactcgacccccaaataacacaggtcccttccaaatctgtcctaccccaccttcccagcccttgctcaactctgctacctggccctttcacgcctacaggcattcccattccatgacctcttgggattctaccctttgcaaatgctgttttcattgcccatttattagagcgcttttggtcacaagctttttgcttaaccaaaaagaaagcatttattggtggacataaataatgaagttcaggaggatccaagagttggaagccaccatgagacccctgtgtccttccacctcacttttctactcgcctctgctcagcttcatctctggccaggccctctcctctgctgatgccctagctgcttacagcccttagcagtcatctatacaccaaaaatccctttcccatagcagaagcaatgctcctagagagtttccctgttggtctggctcctgtacccacccctgtgtactctgattgggaggcctgggtcagctgcccaccatggggccatttctatgagcaggattactgtgaagtggaggaagatgtttccccaaaagaagaaacacaaggtagaaaagtgtatgtccaccaatgcctgaaatgactgtccctttcctcatctgctgagcttctactcattcattctttgagactcagcactcagctcttaaatgtcacttctgctttgatggaggtttagtcattcactcctctgtgcttcctggccctctcttcacacctctctcagacccctctcccagatagattagagttggctgttgacatgtccatctctggctgggcagctaaactggagttatttagaatcagggagcacatgtcagtcattttcaaattctcaacctcatactcccagtaaatgactccatctaagggtggaccactcttgcccatgggccaggtctgggtctgtgtcatctagaactgttggaaggtaggggcttctgtgagcagtaggagagggaataaactcgagggccctcgggagcatgccctcttgtctcagacttgtgagtcctgaggataacaaactagtgaagaaaagcctcgttctatctgtcacctggtgctcttgaggactttctgttgccctggtgccaccacaattttccagagtgtgtgaccctcgctctccaaactctggaagtggcagccgaggctccccagtggcctttcagaaggtgccagtcatgacagcagcaccaaactgcaggcaactactaagcgatcaccaacttgtctgaagataagaatgaccttgaatgcattttataaaacaggattttttttttaatttttagattttctttctttattttaccttaagttctgggatacaagtgcagaatgtgtaggtttgttacataggtatatgtgtgccatggtggtttgctgcacttgtcaacccatcatctaggttttaagccccacatgcattagctatttgtcctaatgctctccctcgcctcgcccctaccccaccccaacaggctccggtgtgtgatgttcccctccctgtgtccatgtgttctcattgttcagcttccacttacaagtgagaacatgtggtgtttagttttctgttcctgtgttagtttgctgaggatgatggcttccagcttcttccatgtccctgcaaaggacatgatctcattcctttttatggctgcatagtattctatggtgtatatgtaccatattttccttatccagcctatcactgatgggcatttggattggttccatgtctttgcaattgtaaacatacatgtgcatgtatttttatagtagaatgatttatattcctttggttatatacccagtaatgggattgcctggtcaaattgtatttctggttctagatccttgaggaatcacactatcttccacaatggttgaactaatttacattcccaccaacagtgtaaaagccttcctatttctcaacagcctcaccagcatctattgtttcttgacattttaataatcaccattctgactggcatgagatgatagatacccatttgtcagatgggtagattacaaaaattttctctcattctgcaggttgcctgttcacgctaatgatagtttcttttgctgtgcagaagctctttagcctaattagatccatttttcaattttggcttttgttgcaattgcttttggtgttttagtcatgaagtctttgcccatgcgtatgtcctgagtggtattgcctaggctttcttctagttttcatgattttagattttacatttaagtctttaatccagcttgagttaatttttgtataaggtgtaaggaagggatccagtttaagttttctacatatggctagccagttttcccaacaccatttattaaatagggaatcctttccccattgcttgtgtgtgtcaggtttggcaaagatcaggtggttgtagatgtgtggtgctatttctgaagcctctgttctgttccattggtctatgtgtctgtttacaaaacagattcttaagcatcaacccagatcgactggctcagaatttccagggaagaggcctggttatctgcatgtttacagacctattagatttgtgggacctgcagttcccttgtacagttagttactcaattaacatctccctcctctcatggtgcctctacctgctaagcccttattcccagccaggcccaccaccatccacccactgctgttataacataagcaggacctgtgcgagggggtgtggacggaggagagaggctctgttgcttcatttgtgcagcatggagttcagtggttctcacaatgtttttgcaaagtatataaagaatactccttgtctacttgacattcgtatcgtgacataaatgtcttgttttccagaaggattattttttccaagcagcttgttcctaatgcagccccaggcaccaaacagatacttaaaatatattaattgcttaaatggttaagaattcagtctctggacccacactgcctgggttcaaattcctattatctgtgcccagtttccaagtctataaaatagggatattaatagcacttacctaataggctcgttatgagaattaaatgagctaattcatgcaaagcactgacatatagtaagcacttaataaatattagctttttaacaaaatacaagccaaaaaacactgcttaggagaggaaatgatgttagtgcctcctgtaaataggcccagcctccaagctggtgctcctctaggaatcacaacgctgcaaatcacatcctccggggccgccaggacttcacgagggcctctgagcagaggggtatgatgggagcagaagcccagcagctgtgatgatgtggtttctgatcttcctgcccttggggtgggggaggaggaaagcaaggggcaatgaacagaaaggagaagatagcggggaggaaatgtgtgaggaagaaacacatcactgtggcttgtcctggatttttctgcttctgttctcgtgttttgggaagtctggaggagacttgaaaatcattcatgtccccaccctgaggatggcttagtagcagagaggccatgaaaactctttgctgatggctctgaaagcaaggatgttgcttcactgggctgctgaaggcctgcctgggggttctgagcagagagtacaggcccctcccaggagggcggcctaaccaccatgctggcatttctgtggaccatggtctgctgtctcagaccccctccacaatagggtctgcaatctcattcaccccataaatacattctgtctttcctctgatcccctcccattagcagggggaaataaatggaagtcagacggcccagttagaaggcaggcagtggagtaggaaaatagatgatggtggtttggggagcctcacatcactcatggggagacattcattcccatgggccttccaatcacccttttctccaaatctaaggacacaggacaaatgggtcctcatacaggcaaatatcttaaactggtatgtgtattcatttatagttctaatttatatgtgtctttattcacatatattttgcttctggagaaaagctcaattagaaaaattaatacattattcttcttattgcccttcagctaaaacaagcatacacacccctcccctttggattttttgtttagcaaaaggttaggcctggcacagatgaaatactattcagagttcacagtgtattttcatttcataatatatttgattttcaggtcttgaatttcacatcaggaagctgatataggaagctgaattcagccagattttaatacgaaaatacctctgatcaaggcataaaattgtactttaaccagtaaccactgtatttctctaagctgtgaaaaaacatgcattcattaactgctttttcctctgctgtcaacacagtcaatacatgtgcataactccttattgtctacatggtgattatcttgctgatgaattctcaaaggccagagatttggactattttttctctgtaaccttgcatgttcctggccacatgccaccaccacccaaacagaatgtacgcagggaatgtatttttcaggataacctaagaaaaaataggattaagaagataaagctgctgatcatgtaatgtactttagactcagatatataaatatttgtgaattatctgtcctatttctttcttctattaattcattgactctagatgtgcattggaaggctagggagaaatcaggggatcgtgagaaagagcacagaagtctgcatcacacaaacaatattatttcaagagccatgaactagatcctaagcaactcataggcaatgacctcatttcatacctctagtctctaagaaacatataactggcctgaggaaggaaaatgtgggcaaggggtagaccggggtcatgggtggaggtccaaatagtaatcaatggagctcatagggtggactgatattgaagctgctatgagccagccacatgctgggcactgttacatgtcatctcatgcaatactcccaattacctgcctagtaagcataattgtcattttatagaattaaaaacagactcaaagaggttgacagtctaatgtaacacaacagctaaatgggggatctggaattataatccagagctgcctggctctgatgagaaagctctttctgctgtcatatgcagcccacattaatagggggctcagaaagtattctctggataaattatataatgaatccaatgaaggaagacattattttataatatgcagcataataggcactattatgattggattttcctgcttgaaagtagctagattagagtaggaaaccaaaaagatgtgaattcattcagtcattcatgcatttgcatggattgagctacctacatttgaataaatgctgttaatccctgattccttggaagctcacattggagagataagcatgtcattaaataatgccataatagtggtatctcagaggactagcagaacataattcaatctgacagagtagaaacagattgtacaaatccaattcaaaacatcataaatcctctaagcactgtcaattcttcctccaaattatctctgaaattcctccttctttcccatttatggcctccatttacagaagcgtgtactgtctctcttagctgtttgccaggccgccagtctcttgctgttcagctctcaactgcttccagcaagatctttctaaaatcccaggcttgccaagacttagcgcccacagctccacagtgactcctcattgctgttaaggtaaaggccttcccagtctagcccttcatgcttcttccatgttctatgggactgccccaggcttcccacctggtaccactgagcctttccatccttcccccactcgactgccaggtcaacacccacacccacgcttcaggactcaggtcctatgtttcgggccttcttctgtgcaccattcccttccctgtagcccttgatcatgatttgtttatacgcctccgcaccttcatggccctgaacccctcaagggccgaaactgccttacttttctttttgacttcccaacttaccttagtggagctgtagtcacatagaatagacgctcataaatgcttctctgggctgtaaaggttgaattttccagctaagcaaggaagaaagacaatttcaggcaggaggaagggcataagcaaagtgcagagatgtgaagctcaagagaaatggatgggctgggcagaggtgtggctgcagcatcaggggagaagaagtagtgcctggagtcagcaggcacggcttgcaaaagcttcacctataggtgaaaggacaccatctcttgcaccaataggctctgtgattggaggcaactttgctgttttactgccagaaaactgaggatgataacccaaactgcagttcaagtggcattcactggtgtggctgaaatgggtgtttgtggccagaatgtggtctgattggtcagtgcccagctctgttgattagcagatgttttgaatatagtagcatccatgtgcccaagttgttgggatgattcaacaagaaactttaagagctcaagtgccctgcagttgtcagccaggtgattctcttcctttggacccagttagacgcaggcattacctcgtggctttgccccagtgtgaatctttgtcctccaacttgatctttttatttgtttcattattgtatttaagttgtttattttagagacagacattttttaacagctgtgcatttcctgtccctttgttttccagtcgtcatgtgtttccttactctctgtgggtgaacgtttcagatgtctgtttgcggtgcccagcgtgcaagataaaatttattgcagtgccttcggcctctaactcaccattccaaccaattcagatagcccaaggctgttttatccagtggatttttccatgtagtgggaaataaatcttgaatgttactgtttagattagccaggaaactcattctgggatgtttgcccacatccattggcatttctcaaaaggaaccccaggtgtctaccttgacaccagcagggccacttgagccctccgctggcattcatcgcccgctttgttctcagcctgagtttaggagttacagatgtgagaggcgggattatacagccaacatctctaagcgggcagtggctcccttaccctcgaagacctcactcctagcacgtcctggatgtattcgtcaaaatatgtcctcttatgccacgtcagcacagggttgctccccactttgatcatcaagtttaaacaaaaggaaagattttctttctttctctgcctctactggacatcatttcccacctaacagataatttaatgtatctgttactgaatgtgtttgaattacagacagagaggtcacagttaaagaaggaagcctgctgctactgcagcttgtcctcccaaggaggtgtttgatttagctgtgtaaacaaatgactgcattctccagaggtcctgaacacagctgcctgcgctggagagggctcaaacctcttccgccagggtgaactctgcttcctggtgagtgccagcaaaacaaccaacaaagagctgtaggacttgtgtggacttcaaatggtggtggtcctgccacttgggctcagccacagcagttaggaaactaaaggggaggaggaaagccctttccttgctttattgtcattggctgtcatagggcattacaatggttctctttgagattctgagctccggctataacatttgcccagaatctgcctctgaggccttaagacactgtgtttttattcagcaaagatgccctttgactccttttcccactagtggtgctaggtttgagcaccttacactggccccttacaatagccagttcttgtctacctacattcttccctaacattcatgattgcatagttactcttagtgtagaagcagacagcttttacacatagactccatggccgtagcctcatagaacctactatattctaacttgcaagctaatcagaccaaatatatcaaaatcaaaaacctctgctgagagtttattcattcatctctgtctcccaaacgtacttatgtacatacgtgcactaatatacatgtccattagccaagattttgatttcagggatcaaagcaagtaccaatagggaatgaggtcacttgctgcatggcaggtggcttccccatgagaatgcaaggccacctcatgactcatacttcagagggtgacccaggaacttctgattcatgtccaaagcagcttctacaattgctctaccttgatctagggaagatgtggggaggatgacattcgggattagctttataaggccttcctgtgggcagagttgtctgactttcacctagtgatcaacaagcagctagcaagcatcagtgtgtgaggccccacgccctctcagctcccctactgcccacctgggacatgggctttggcatctgtccatagcattgttctaaccaaatgaggtgttatggatcagctcaggatgggatatgttcccagacatattatttaaagaaaatagctcccttcctcccctgataaacagctgccatggctaaaaggtaacctggctggggcttaaaagtctgttgactttcaagatattttgcaaaaacagtcataaaaatggtatttatcagatcctaactatttgtgagacggtttggtataccatagtggttaaaaacacaggctctttccagaggaggtttactttgcttagtcgtgtctcctaagtgaacttggacctcataaggttgttgtgagaatgaaatgggtgaatatgagtaaagtccttggaccagttttggccgtatagtaagccttcagcaagcatctgcttttattcctacagggaggcaattgtaagcccttcacaaacagcgtctaatgtgatccttagaacaaacctatgagatagggcatatctcaattttgtaggtagggaaacagaagccacacaattaggaaatggcaacagatctgttagactcttaaacactatgctacaccaatttgcaaggcaaggaagacaaagcacctttgaaaatgggtcagatgttttagggtaaatgaacgtttgagaatcttttaagttttttttcccccagagattatcaaggtatcattgtagggggatgcatcaggaaacatgactatgaatcagctgcctgataaaccagccaggatggagcccacgtcatcacagcagtcagcaatgccactgaaaaacatcagctgcttattcccgtatagatttccccttaagacatgaaaagggagttcaaagagaatgggccagatatctctgagagtcatattactaaaatatatttatttttactagcttttttgttttaagaggtatactgtcattagcactgtagcaaaaattcacgttttattaatttctcctagtttatcatgtgattctagggtaggatgcagagttatattcaaaatacacaaatcaactcaactcagtaaacatatatcgaggccctatcatgacaaaatgctattctagagaccacggcgaacaagccacggccccagcctcaaagaatgtactatctttggaactgtgctggccaatacagtaaccagcagccacgcagggctatttaaatttaaattaattaaaagtaaaaacacaatgcctcagatgcattagccacattttaagtgttcaatagatatttgtggctcctgcctgccatattggacagggcagatatagaacaattccatcactgcagaaagttctactgaacaatgctgctctggagcagaagatcttcttgttcagggatgttacacccccgcttgtggctagagtgtggcttatcctcagagcaaggataggggaaccatggcactctgcaggctcagcactgaagacacggatgcaggctctgcttctgacctagattgaccttgggcaaggccctttgctcctctgatcccaatttcttcaccagccaagtaagaacatcagaccacaagccctctagggctctgtccaaatgccccatgactgagtgaactggtagaacattctatgtgtgtgtcacaacatgaagagcaaagactttcatctccccaaataattttgtttttcgttttaggaattaaatttcagattcactctaattgccaatactaaaattctctatatgcagttctaaacttgacaaaccaataaaaaaagattatttgactacttatctttgtacaacattgaggtctccctaaagcaaatttaaatgcatattttaaaaatgtattctagcagttcagttcagaagccccctggcccaagcatcacactgtcaatcctttgtcctcaagcagcatggttgggtgggttaagtactgacaaacactgggtgtcaggcccatggtcagggactgtgctaacagtctacatattagatgccacctacccccaccctcaacagacccaaactatttatccaatagcaaaccttgcattatttctgtccagaagaaacaaacatttattgacaacttttggtgtgtgacctgtttaagtcctacatctcatttaaggactggtcaatgttaggctaggcaatgcctgtttgtgagagaatcactgcctaaagaaaattctccatttcccttagctctatggtgggtgactacacatactggtatttcttaaagaaataccaattccatttccttttaacataattattaatatctcattagcatggtgtcactgaagcctgggcccaaagaaataccaattccatatcattttaagatcattattaatatctcatcagcgtggtgtcacttaagcctgggccctttagaatttttcatgtacctgtgttcctctgcccatatcagctggaacactaatagttttcttcctttttatctagaagactgagaacattacatgggacctgcccccagggcatggaggctgaggtgggacagtttagttcaggaggcccaagaagtgttgggtgtgcagccccttgttcaaacacagcctctgaatcgccagaggcttccggtgcatactctgaggcgcaggtgggactcgggagtgagaggtttcggcgaatgaattgggattgcctacttcttcccagtgcagtggagcttggttctgtggtcaggtccttacgccctgtctgcctttctcgtttctttatttctcgggtagtagttgtggaatcaaatgacctggggtttgatacctactctaccacgcctctgggggagtcactcagactcgttgaacctaagttccggggctgccaagtgaggataagtagtaattgctgatccacctacttgacaagatagtagtgagggccctgagcgccaggctgtggatccagcctttcccacggttcctggtgtggcaggaagaactctaggcctgaaggtgaaattggggagggagtcccagctctgccactgtctctctgggtgacctcaggcaggtctcctcaaaaaaataagatactttataaagctcagtttcctcttcagtaaaatgaggattccaggtaactcacagatagtttgtggggatgaatctgttccttaaagcctgcagtacatcaataacccagtcttcctgcttgctttcccccctctccactaccagtgatcatagtctgatcccataggtgatatcccagctcaaaaccctacattagcttctgtggctgtttaaggcctgcccagaactcccctggtcttagcactgaaagcacgtgtccggggaagccctgcattggtcgttcatactactgagtcccgcagggcaaaccgtccggtcccaccctcctttctagtgctgctgtcacactcacctcccttcaccctacactcccttctgtgccttgcaattacctagggagttttttacaagatatggatgccctggccctgccactagagattctgatttaattgcttggggtagggcctggcataggtatcttttaaagctccgcagtggttctaaagcacagccacagatgggaaccactgatctattcttgtaggtccccagatacctcatgtgctgttccctgtgcctgagctgacctttcccccactttcctctcctcggctaattcctgcttatcctcctactcaggaggctcttcctccaggcagccttccctgatccctccaggaagacttagctgcgtccctccgctgggcttccccaatacactgggcttgctttcattagaacctgatccttccacattatggttgttggtttgctccaatcctctccctcattagctctcaactttctttcaggaagagatgtttatctttccttcttgtattcctagagtcgaccaggctctggcacattgcagattctcagtatgcattcagggaacaacttaatcaagacaagaccatctgacttcttgtgagttacatgctaagaaagaaatgtcgacaccaatagccctcacaatgataggaacaggaggttaaagaaaaggaaatagatgcaaatagcaatataagtgctttaacaaatctatacaggaggacaaccatcatattcaaattttcaaacattcttagttctgctcttttgtgggtaatggtttttttttttcctcttccaggagaagaaaagaggcatattatagaaattcctcctcccccagcattacttgtcacagaattgtaattggaagtgatttccctgactaagttattttggctgtctgttattttctctcttcctccttgctcttccctcagctggccatcctgtgtgtttggagagagccagaaaggttcaaggctaggaatgtttctctctctctttaaagctctttaatcgtcaggctttctgatcttcaaagcaggctgtagccagtgtgaccccactccctcgcctccccatgctggagagtaaaagcctggagtatttttgtcattttgaagacttgcatatttggacagccttggacatctggaaagtgtggtcctcactagctctgcagggataagagcacgtcagcacttccaagctctctggcgcccctacatctggacacgttgaaaaattaacaccagactctggagttaagcaaacattaagtttataggcctccttgcatttgaccatttcctgggacagcagcccttatcctgtgactttctgtgtgtagagttgagtctttgcagttggtcctcctcacactctctcaactttgtgactctctgcagtgcttggtcctggataagtttgaaagctacaatgatgaaactcagctcacccaacgtgccctctctctactggaggaaaacatgttctgggccggagtggtattccctgacatgtatccctggaccagctctctaccaccccacgtgaagtataagatccgaatggacatagacgtggtggagaaaaccaataagattaaagacaggtgatgtttcaggaagggctcgctgcatttctccaaagtcagtgggaaattacatttggtagagagaaagggattgagactggactcataaatcaataaaattaagttaaataagaaaaaataagatattttataaagctcaacaaagagtccttgaatgaaagcaattacagagtcacattgtggctaatattcaaaactgagatttaaactgaggactaggaaatagaattggatccttttgaagcgtttaggagaaagattttaagagaatgagttccgagtcaccctgtggtcgggaggtgtgagtgagctatccaagcccgttcccatcctttgtccctctgtgtcttctcaggtattgggattctggtcccagagctgatcccgtggaagatttccggtacatctggggcgggtttgcctatctgcaggacatggttgaacaggggatcacaaggagccaggtgcaggcggaggctccagttggaatctacctccagcagatgccctacccctgcttcgtggacgattcgtgagtctgaagttcgcgatcctcctccatgacacgctaatgggggtgctggagtgggctggggtgggctgggggtgccctcaaggcttccatgtctttagagagagccccagggaccagagccaaattggagagcatggagctctgactgaggaacctgcttctcccaagctccaggcaggcacagatgagtcagtgcagtggtgggaaagggaaaagagttgatgttgtagctggaaaagggaaggggaaaattaaagcaaggaaagtgaggctgggggaggggacaaattccccactatgtagtatgtttggtatgtggaagggttctggtcagaatgtttgcccaatgattgccacatcagcattcattttggactctgtatggccagtaggtctggttcctgggagccctggaataatgcagccccttccctaactaacatttccatgatgtatgctcaatgacaaggcagaggaatgtgttggatgagctcaggacctgcctccctggacactcccatcccaggcctgtatatctgttgaccaggaataagccaagcaagcagcctactgtttgactgaatatggatttggggggtggtagagaaagggccggggtggagggttgggaggctcatttgtcattatagatggggtcagacacactaccaaaacagcagcagagatctacaattgagttcacctaaaactcagtgtggacacaggaaaccctcttttaataactgtccaatgggttttccagcctcagctctacagaaaacttgagataacagtggccagtctgcagttagtttgggttcggacaataggcagagctgggaaatggagccaggggcgaaagcccaggtccactttaggatcaggacgggagtggctggtggggaagtgaggtgggtgtggggaggcaatagggagctgggtcatttggtatgggagagtcctctggtggctagtcccagaagtgcatgctttacgaacatatgcttctctccctagggccaccttgagtgaaaccctcccatgctggaattgggccctttcagtgacaacacacaacagttttcaatagataataatcccaagggctttactagcacatgaaacacagggaaaacgtgtaaagttcacaagaaagtcgttccagtgtatcaaatctatcctgtttgccaggtggatataccagggtctcctccacctgtgcatggctggtggtgggtccagtggctgttggataactgatgtattgatggatcattcgccttctgaaagtgccaaactgattagttattttgtgtgtctttttgtgtaactagggtttgaccttccagggcagactgtgctggggcggctgaccccttggggagccaagttattgctcttaccaccaccacttgcccttgtcagtcctccaccctcttgggtttcagtgtcagcatgtagctgtctactcagatcccatccacatcatcaagtctgcagttttttccttgcaaggccttacagggaagatctttgacatagaggatataattttattgacacattttacttgcagagcattcacccgggctaaccagaaagccagcactctgctataaacaaaaaataatgcttcagggctaacatggaatgtgttaaaagattccagcccattaaatgtccaggggaggttttcctgttttcctttccctccatctgggctttgttctcaacacattcattcaacaaacatttattctgcctctaccaggtacagagcactctactattctgcttctctccttttgctttagtttcatgatcatcctgaaccgctgtttccctatcttcatggtgctggcatggatctactctgtctccatgactgtgaagagcatcgtcttggagaaggagttgcgactgaaggagaccttgaaaaatcagggtgtctccaatgcagtgatttggtgtacctggttcctggacagcttctccatcatgtcgatgagcatcttcctcctgacgatattcatcatggtaagccaaatggagaaggcccagaaaatcttgaatactttggttcctttcccctttcctcctgttcatgtgcctggattagtcatgtggccaccaaggagagcgtgacatctagcttcccagcccttccttttagccaacgtgggagacactcaaagagacgaaatctcctgaaggagccactgtatcacagcatcctcccatctcccacttcctgcccaggggtccatggtccacacagacttcccagtcccattccgtgaccatctggagaagctgctattagcagagccctgcacagggtgatagtgtaattaaagtggtcttctctttccaaacacagaaaaaatcagttcagggagtgttttcctgggcttacaattttaactactggctagagttgaaatggggaaagccttttgccttttcagtagcagtaggggaggagatctggattatttacttatcatcatcatggtcacctcctacatggcttcaccaaaaaacattctgctgcctgaaaaagctccaacacctctctctcttttaaaggatggaatttggagtccatccttcctcagtgataaggagtttttatagccacaggcagcatctattggtctgtcctctgcaaacttgcaactcctctgagagctagacttggaaatgaaacattattttgcaatgcgctgctatccttcatttttagctcctccaccgtagatgatagtttgtacttgttaaatgataaggatataaatttaggtcattttttatattttattgggtggaatttggtataatttttagacttcaggctttacaggctcctgagatggactgattgagcttgttctacttcttccccatcatgataggaagtgctgtaccacactaggcagtgtgtgtagtgaccacagactggctgagtgtctcccatcccatgctggcccatatctggtacccacctgatccacaaatgttccatcagatcctgttcaaacaacacatctccagttaagccaaatcttgccctttctccttacggtaaaatgtactaaatctgaaggttttgtctttttaatgttgctccatgatccagtgatctgtggccttggttatgctctgtgctagagtcctaacaagacaaatgctaaggtagaggtcattctgctcaaacaacctgaccccacctggatgtgggcttacatttgcaaagggcaccaaagttctaagagatgaggggaggagctgagccccttgtccttatctaggtttcccttgttctttcccatccctcagtctgcttcttttcccagtaccaacatgtttgtgtcctcagaattaaaggagtaaaaatgtgtaaacatctgactagcaacagccatgagattttgcctggcttgttgataagcagcattgagatctgccctcctaagaatgggccattaggtcttcaaagcttttacgatgtgaggtaaagaatgttcaccaggagtttcatgcacaaaagggtttctctttgtgggaactagaacattgttccagtgatgacggaaacagggctttccataccaaaacagggttttcctttgaatgactctcccacctttcccttgtctcttcctccccacctcaacaacacaggaaagaagctggaagcagggacaatgggaaggtccctttgttactcgagctattagaaacaaaaagaaaagtggccatctgaggaagccacagctggtgaaactgtagggtcacagagtgaattacacctctggcttaagtcagtgaaaagtcctagaagtttgtggtcctagaagtcctaaaagtttatgggactttgttttgagcaaggataagaaattgatttcaggctgggcgtggtggctcacgcctgtaaccctaatactttgggagacagaggcaggtggatcacttcaggtcaggagttccagagcagtctggccaacatggcgaaaccctgcctctcctaaaaatacaaaaattagccaggtgcggtggcacatgcctgtagtcccggctactcaggagactgagcaaggagaatcccttgaacccaggaggtggaggtctcagtgagctgatatcatatcactgcactctagcctgggcaacagagcaagactctgtctaaaaaaataaataaataaaaaagaaattgatttcattcttctgagaactgcaacaactaccttaaagtgattccatccaaaacccacatgttcagccatggacttgcttttatggagctgcgtgtgggtgacacacaaaatcaggagctctgagtcctaatttagacttttatttagatttcctcaaatttgggttccagttaagcgtgggtctcttctgtgccccgctcccctttgccatttgttttatctgttcttcagtctgttctgtcagtacccacaggcaggagagcagaaaggagaaatggcagccacagcagacaaatggcacattcgttccactcagctctcgcatgcccatcacagatacagctcattggtctcttttctatgagaggaagccagagctccagggaactactgccaactgatcagaactcatttaggacatggacctatttgttcctttatgttcctgggaagagcacaggatgaattctatgtactcatttacgtgttcagagagtaaagtgcctcataggatgcctccagcaaaagataaccaagaaggtctaatacctttgacaatctcagtttatcctatagtgtaattggatagcagttcccctagcaaaagttgctagtttggtcctattttctacatagccaaagtgattgattcattggttaatgtgaaagttactgagtactgccagcaggttctaggaaatatatttgtgtgatattcatggatggggaggatcaatccacttccaagtgatttggattaattactggtattttcacctgtgtgggtagcaaacctcagaaaatcaagtatagatgacggcataggacaggccaggccccaggcaaaatgttgaagctcctctggagttccctcccatctccctcttttgttttccatatacctggtttatccagggccctggagatgctccaagaccccctacccaggtcttcctcccttgtcccagctatatttctccatattaccactcttctcaccgaggatttgcttacttaacacataataaatactattaaaagagaaacttaggcacattaaaatgttagagttgattccagcaaacagtgattcacaggaggctccagatcacaagtggttcagggccccactgaggggtagggaagcaagacaaagaaaaacaaagcaaatatttgattggttcaagtggaaagtccctgattacaggttagtgggcagtttgtgattagttaagtttctctaagttgggttttggtttgctgatgtaggaacacagaatgctggggccgtttcaacctaatggtctcccaattaatttttttaacattactgatgactgttaggagtctaatgtgctactcctcccagggaaaatggcattcctaggattaaaggaactcagcacatggagtgtgcgtagaaatttagacactaactgcaggctggtgggagagagccctttagggcagaatgagaaggcgtccggccaagggcaggagttactgacgcatggcctcttggtttcagcatggaagaatcctacattacagcgacccattcatcctcttcctgttcttgttggctttctccactgccaccatcatgctgtgctttctgctcagcaccttcttctccaaggccagtctggcagcagcctgtagtggtgtcatctatttcaccctctacctgccacacatcctgtgcttcgcctggcaggaccgcatgaccgctgagctgaagaaggctgtggtgaggcccttgggctggcccctgtcctacaacacgtttccttggaagggtccgtagcagtcctggaggcccagcctgccctctgagggggtccactttgcctttgacctaaggttaaaaagttcacgtgaggctaaaatgtacaggggcaaaagtgggagcagtcctcaccccgagcgatgcaacagtgactcctcaccacgcctgcttgattcatctgccctggaaagtcattaaaaaaccagttcaactcatgggtccctttatttactcacaagagagagccagcagcccatttcactagttttcctttcctactctttgagaagaatcagaagggagggagcttgccactttactatctgtctaaagagatgtttccattaattaaaggtttttgttttgcttcaaaaaaacttgaattggagtatttccacaagtatctttaacatgctctaccaatgtttgcagaaagaagtgcagaaatgagactgtccacagagtcaggctcgctggccaggagaggactcccgaagctgacttctgatggcctgagaaacttcctagttcacaattcccagacccagacaaagagcactgtcttttctctaattgttttcaaatgggccatttccaccctctaatcagcctctggccctggagggtgcagttccccttgtcctccggagtctccctgtctctgtgctgtagagtcaagaagggacaaccacctgccctcactgggaaaagacagaaagtctgacttgttctcacgactcacacttattaggctccagaggtgtcagggcatctgcctttcatttcttaggttaaataagaaatcaattgctgccatttgtagtacccaattttctaaaatgatcacaatggataagtggcaagaaatccttatgactcatctgtgggcagagttgggctattttggtaatccttgagtaggcagatggaatttgaggccatcttcttgggtacatagatcactaggaagctataggtctagcaactgtggattagggctgggctgagaattgtttcatgttttttgtgactgtatagctagagactctcttgtttgcagagagacactctgaactccccctggccgtcaagggaaagactgccttcaccctcctgagctgaccttacactgagagacaatggggaccctcttttggccctcccctctacctcgagggcatctgggtgctgttgcattggataaaaggcactgctctttttctgtgccctctccgcctcactgcagagcttactgtctccggtggcatttggatttggcactgagtacctggttcgctttgaagagcaaggcctggggctgcagtggagcaacatcgggaacagtcccacggaaggggacgaattcagcttcctgctgtccatgcagatgatgctccttgatgctgctgtctatggcttactcgcttggtaccttgatcaggtgtttccaggtaagcatcctcctctatagggtaaaggtaattgagttcttcagatccccagccctctccattcatctagtttaaatttcatttcttccaagctctttgtcagaaccagcatttgaagtttaaatctagaagttaaaaatccaccagcaaatcctactggctctacttgagaaacaaatccagaatctgatctcttgtcaccacctccaccacaaccttcccaatgccagtctcttccttccactaccacctcccatcagtccattctgcacactgtattcagggagatcctttcagaatcaaggtcatgtggtgtcagccctctctgtcaaatgcttgcactggcttttcctctctttcagagtaaaacccagtgtctcaaccctggcctccaagctgcttcattatccggcctccaactctcttcttcatcttacgattttccctactcctccatgttcctctgctccagccacgtcggcctccttactgactgtttaatacaccgagcgcatttcctcttcagggcctttccacctgctgttctcatgccagaagcacatttctctccccacaacctgcaacccgcccctcatatctgcaggcttgcttccttactttgttaaggtctctgttcaaatgtcccattatcacagggatctttccagactgaagagatctacataactatggctctgtaaacaacattcctccagggttcctgtccccttaccctactttattttggggaacattcttcaccatctgatacaatgatgtatcttatgcatgtatttactgactctctgcccttagtagaatatgagcccagagagcatgcatgtggtctattttgttaactgtgacagtcccagtgcccagaatagtgcctgacctttggtgggcactgaataaatatctaagtaatctgtagcatggaaaatcagcttctgaaaattggctgtttgcacggtcgtgtatttgcttggtagaaaatcaaattttccttcaaattagcattttctggtaactagagctgccccatcttcctctgagtggtctccaagtcagccaatagccttgtgctgtggcagccatgcctggctcttgatgctgtagccaaaagcaggcaggggatggtgaggctggtccagtccatggggagggacaaactcacagctctcagatcatctcagggcagcctttgttggcagaaataggtaggcagccaccctgaataggaggaaggcttctagactgggtcaggaggcctgggtttgcatcctagtggcaagcgtgcattcatttactagggctgccataacaaaataccactaactgggcagcttagacaacagccatttatatctcacagctctgaaggctggaagtccaaaatcaaggtgttggcagggccatgctccctctgaaacctgtaggtgcttgggcactccttgacttgtagatgcttcctgctgatccttcgtctgcacatggcattctgcctgtcttacatggccatcttataaggataccaactggattggattaggtgcctaccttgctcccatgtgacctcatctcaactaatcacatctgcaatgaccctgttcctaaacaaggccacattatgaggtacctggggttagcactctggtatcttttttcttgacagcacttctgacaccaaatgtgtgttttggttttttgttgttgttgttttggcaccaaccaattctcctatattaatgggttgtccaagaattcaattgaattctgacactatccagaattcacacagactccacgggttcagtcccacaaggcttccccgtcttcagatgccagctggaaatgtggtgcccaggctacccacacttttgccaaaatcctgtacttacaatcacagctttaaaatgaaggatgcagctcaggaactgccacatggaagagaagcacagtatggggtcgggggaagagtttctatgctctctctagacgcaccactctcccagcacctcaaagtgttcagcaacccaaaagctctccaaatcttgttgttcgagagtttttataaccctatctccagctccatactcccccattggaggttgagggttgggactgaaagttccattcttcacatgtgtggtgtttctggtgaccagtccccagaaactgcagctatcttggggctctaccctgagtcacatcattagcataaactcagatgtggtagaggaaggggcttattatgaataaaaaaagacactcctttctgccaggaaattccaagggttttaggagatctgtgccctgcacaggagctggggacaaagaccaagtatattttgtgttatgccacagaccccaacatgtctttttggagggagaccaaattcaacccatgacagtgactttgaacaagacatttgaacttagtctgttttttctatcctactagattgttggaaacagatataatagatgaaaattagttgattaaaattgaaatttgtgcataattcaaaagttttattttagccaagctaaagctttcatttattcaacagctatttactgagcagcacctgtgcatgaggctcagcagggccaggttctgggaacagagcggtggagataaagatccagacctgccccgaggaatagacagtccagtggcagcaaaggccatgaaacatacggcaactcttaaaaaaagccgagaccatgattttacaaaatcaacattttgtagggagcagaactttcaaagagaactggactagaaatttgggagtctttttcttggaaccctggtagatccagtagaatgagggatgggggtgtagggttaaaaacactgacattagaactggattacctgtgttggaattcctacatttctgtttcactatctgtgacggggggcagatggctgaatctcagtgtgcctctgtttcctttctcacaagaataatattactacctatctcctggggttgttttgaggtttagattatttaacacatggaaagcactcacagcaatgcctgccacagaaagaatatccagtacatcttagtgatgatcaccattattattatctgactcctggaaaaggacttgatttaattctctcatgaaacgttttcttggaaaactgatgtcaaccaagattattggtcttgctgttgcttataacaccccaaaaacatgactgtgtggataaaaatatgttggaaggggtagtctttctgggagcctgagaatagccatgtaataataactgcaaatatctatagttacaatttgaggttcaggtaaataaactctagatcttatagaactgcggtaaggtaggatagggagactccttcgactttctctgtttatttgtctctatttttaggagactatggaaccccacttccttggtactttcttctacaagagtcgtattggcttggcggtgaaggtgagtcctttaaaacacaaatcttaatgtttgaaatcaactccttgggctctgtgcaagatgtatatggatcacagaggtggccctctatgtaaacggtgtgattcctgatgagtcagctgcctcctggggctctgccccttgatgggcattgcagcgtctgggggaccacctttcacaagttgctgggccctgtgtgatcatgaatggctgatcatggatgaagccctgggtcctgtacaccttgtccagtagactaaattgccctatttaaaaaaggccaagccacttcagggttcaaagaacttttgcagcttttcagtataaagcagaaatccagggaatcatgaaggaacctttgcattcatctcccattgccttccttgtgcctttttattcttctctgccttttcaaaatataaattagtttattctcccaagatgaagactcctcctggggctgaggcagagctgttatcttcagggcaatacctcagattctcctggtgttgatctttcttaggggtggggaaaaaggctgaaagggcatttgcccacaacacatcttaggtaaaaggcacctttactactgaaccaaacaggaggcctagctagagaaagttctagaagcagggaaaagcacagactcttttgtgaggtctgagaaagcaaagaaattccagggtgaaagcgggggactcccctagagctgaagtactctcccatctgtttgttgctcacctacctattctttactttgtattattgggcctgggccaggacttatcctgcaagcactgagatggatgtttgttttctctgggggattagtctttttttttctttttttcttttgttttttgcttttgttttcactgggtcaaacaaacaacactttaacagctcaggattttttcattgtattgacttgtctacctgtaaacttgttaattttttactataataaaattatcatataataaatgaaaaatttcaacacagggcttgtgggcattttatttttctctacaatcccaacagatactctgcctcttaagaaaaaaagaaatcataaggaaaatatgctccttcaaaagtgaatcacaaatatgtttgccaacggaaggcaaatatttttcacctgtctcataggctggactgaaatggatttctaaaactctctaaaaccagaaaagagctgagtgtctccacccaacctccctcctttcacagattaaaaaataaaaaatggagcccaggagacatccagtatcttcccctattggtcacctgggacaaaatctggaacatgcacatgcattgcctggcaggaactcattccagtgattaaactcttcaggaggatgtttcctcttgctatttcattacctatttgtgcagtttgatagctagtaaagtgatcaaaggaactgtggggcatagattcaaaagtccttcaggaagcagaaatagaagaacagtactagaggcagcaggtccctgaccagcaggcccactacctgctgctccagcacacatcctgcacattttcagagggtgggggacagaggggccctgggtggctgttgcattgagaaatctcgccctgctcctgtatgtgcacttgaggccgagagcccttggatgcctggtgacagtggtttcctcctgcccctgccttcctctctggcagactgactggcccttctgctcctcttccccttccaggatgtcctgatatctttttaaaccaaatgccaagtttgccaaaaagtgtctgtttgtgtgtgtgtgtgtgtgtgtgttcaatgcgtgtgtttataccacacttcacaatttgtccaggcttgtattaataccatcaccaggctcaaccctggtgttaattccaagatacttaaatgcccatctaggtgaatttctcaggtaaaccatatattcaagctgtagtttaagctggctgcccgtcatagcactttgaatagactttgtttttgtttttgttttttgagacagagtctcactctgtcggccaggctggagtgcagtggcactatctcggctcactgcaacctccgcctcccgggttcaagcgattctcctgcctcagcctcctaagtagctgggattacaggtgagcgccaccccacccggctaatttttgtatttttagtagatacggggtttcaccatgttggtcagactggtctcgaactcctgacctcatgatacgcctacattggcctcccaaagtgctgggattacaggcgtgagccaccacatccggcccctgaatagacttttactcaaggttcaccatgactttcacatgttttgtattggagtaaaatgtgccagtggtgggctaaagaaaattaactcatttcaaattcaaacctggttttcttaatttttttaaaatcacagtttctgaaactgtgggctcctcatggcacattgagaggaggaggtgaaactctccaagtctgaagctcctgttataaatcttcctctggcaaagattgtgtgatcaggcttgagtacctcacagtcctagagcaggtcaaaggctggctaggaaactcatttgctccctgtacctctcccctcctttcctgcctttgctcgttctcagctcccggtggtagagtaacactggcttctgattggtgcagggtgttcaaccagagaagaaagagccctggaaaagaccgagcccctaacagaggaaacggaggatccagagcacccagaaggaatacacggtaaaaccccgataaagaatacacagcagaggcgaggaaaaggctctaagcactgcagagggccagagcaaaacatctcatggcaagggtggaaagaagcctaggaaactgactctctctgtggacaagtgttaaaccagatcccttctcagaggtccatctgcatgtgtgtggaatgaatggttcagcccagacattagcgcatatttcctggagaaagcaaataccaactatgtagtgtgcctgtgcccttgttaggcaaatcccaagtgagttgcacaaatgtgctgacttccgaggatttagcaagaacaataactttggtcactgggacttaaagcggatatgagctataaggaaagacaaaaataaatgcttctgtgtccagggggaaagagactccaggggagctgactacacttcacttacggcttacaaatctagaaggccattcattgaaaccatcagaagcctttcctgacagtggaagttacctaataatccctaaactgacgacccagatttacaagttttgttttcctggcttttgctgccctcatcttctctcttaaactagttctgtatttctcccaaggcttttcattccctaagcatacgcatttctctgtggccaaaatgctctgggtttagacaggcagcacagcccctgggctctgcctgacagggcaggagagggtctggcctttatccctccagcccaccccaggggccatttcataaaactaaagccagagacctgcagcccctcccagagttagactgcagtacaccatgcctctggcaagatcctcctcccacagtggaaagtctaagccaaatcaggaggctggggactggttccacctcagttgcaggcaaggccaggaggcacggatagaagaaacagtggactttttccccctagggaaagaaatgcttagagctacagtattaagatgacaaattaagctgtgccatatagggtgaaatgaagcagggatagatgggaggtcagggagaagtgagagcactcggtgagggtctgcactggagggggcatgggaggaagaaggaggggagtggggtttgagggatggtgatgaggaagcgtggactgccctacccacctattggaaaacctgggagttctgaggagcaagaagccttagtcaaagtcaactcaaagattcaagccaaggtgactaagagaatggcggtccagaaaaggtcatgggagaatctgaaggcagatgttgttttgggaagatgaagaacctaagccgcttccagaaattcatgaggaaatgccccgtggactgttggcaatgagggcctaggaccaaggttgagcttggggccaactctccctatagacagtgagtgcattctgacaagcatgggctctgggttcaaatcccaactctgccactcatgcctatgtgtccttaataggacgcttgatgtctctgtgtctaaggtttcctggactatggaaatgagcctaataaatgtctaccccttaggaccattgtaagagtacattgaggtaatttgtgtaaagcagtcgaagcagtgcctggcatataggaggtgctgtataaacgtttgatgctagtattactattattattctggagtcttccttgcaacggtgatagccgaagccacaggggcaggtgacgttataggcagaatacaagggcctggagacagagccctggggccatgtaattaggcattatgtttacatcatgttcattttttttcctccaagactccttctttgaacgtgagcatccagggtgggttcctggggtatgcgtgaagaatctggtaaagatttttgagccctgtggccggccagctgtggaccgtctgaacatcaccttctacgagaaccagatcaccgcattcctgggccacaatggagctgggaaaaccaccaccttgtgagtcttccagcagagaagctggctgccatgctagcctgtcatttcctggcttagtctttccctatcagcggctgtctactctttcccacaaattttagtgacaaatatttgcggccccaaaaatgtgtaaaagctttctgcagtattcaaagatcactaatatgtattctcttgatggggaggtagaatacgtttattgccccttttgtgtgccggggaagtggacattcattcagagagttgaagtgactttcctgaagccaccaagttgtcatggctcagcgggggcaaaagccaggcaccacagttgcctcttgtttctcacaccttgagtctttccccccatctcaacagtccatggtggtgatcaagtcatggccactgtcatcatgtgcatggaagctatagagtcctcctatttcctttctcttttcttttctttttttttttttttttttttgagatagtaaccattacccatgctggagggcagtggtgcgatcttggctcactgcaacctccgcctcccaggatcaagcgattctcccacctcagcctcccaagtaggtgggactacaggtgcataccaccatgcccagctaatttttgtattttttttttttttttttttttttagtacagacagggtttcaccatgttggccaggctggtctcgaactcctgacctcaggtgatctgcccgcctcagcttcccaaagtgctgggattacaggcgtgagcgaccgcaccaggccgagtcctgctattttcaaggaacattccttttcctaccaatcattaggcaggcttcaacatcagctgatgagggttagtggtcgttctggagaaagtgaaaaaagaatcagtctctagaggggcttgtggagtaaccgcctggtaacagaaggtcagggcagggaaggcaaaggggctctgcgcggatctctcagctccgcaggcgccccactctcctccaagggacccgagcgccatctgctgagaggagaacacggcccgccatggtttcccaaggagcagcagacacggacctcgcagggggcagcgaacccacgtgacacagtcttcaagtcctttggagagccccaggaaggaacaacagcgtgtacaccctgtgatggaatgttctctagggcggttcagtgtgaatggaatgtggggccggtgccattctaattggttctgtttccctctagtggttgatcgcggagatttcggcttctccatcaggacaagttcagatagcctgagatggtatcagaactcagggacagagctgggtgtggcggccctgcatccatctgctttctctccatgctaactgatatggtcagagagctggaagcaaattccaggaccccagggctccgcaaaggcaaacacattacttcatcggctgctgacatgcaacttcccccaggggttaaaacaatgtttaatactaacagtaataatatttttgagttttactttatgctggcgctgttctaatgttgtaagtgtattaactcatttaagccttacaacaacctaaggacatgggagtcatagttcccatttaaaaaaaaaaaaaaaaaaagcccaccattgctctgaggctttttatgttttggatccaaagctaatattggtggtggtaattcccatgcctggcttcgatcaattaatcagcaaatgcctaggactgcttagggttctggccttcatcaagaccttacccgggctttatgatgatgacacctggcttttcaatagccatgactgctcacccaggaggcaacgcctcgagtcatgcaccgaacaccttttattgatcctctccaacaccaggctccgtgatggctgagctggggacacctgtgactgcacgtgaacattttgaggctgggaatcccaaaggccctcggcgttggcctgggagcaccatgaaacaagtagaagcagagaaggatggcagaggtggccctctgcattagggcctggatgtatacactggtgctaagggggccccacagctaataggggtttgagtttgactgacagccccaggcaggaatctgtgagagttctcactgaacctggtgtgggggtggccctcctaaggcatgttgctaaaggccatctcttctgccactgacgcctgtgttctgcaggtccatcctgacgggtctgttgccaccaacctctgggactgtgctcgttgggggaagggacattgaaaccagcctggatgcagtccggcagagccttggcatgtgtccacagcacaacatcctgttccaccagtaagcgacacaggaactgagaccgccccatcccctctcctcacctctgcccccagcacacttctctagagcccagctcaggggtgccaggcctgggcacaggcagagatacagactcttatttggtttcccctatgtttaaagtcctttgtcctacttgcagtgagaattgtccctgagaatatgggactctgcctctgctgctcagagctgagggctcctccctcagaagggtgaggctgccttcgctctgacagagcagctgatcgatccccgagccccttgtgcagccctgaagtacttcctctctgggaccaaagacaggagaaccattgttcctttttcctgttgaagccacggcctgaaaggcaaacttttcagggggcttttcagttactttttttccccaataagatatcttttatttcttatctaagaagctacgcatagtcattgtgaaagaaaaaaaaggaagggaggaaggaagggaggaaggaaggaaggaaggaaggaaggaaagaagggagggagggaggggagaaggaagcgagggagggagggaggggagaaggaagggaacaggagggaggaaaagggaaggggaaggaggaaggaaagggaaggagggaggaagtaaatataggtaaacaaaaaattgaaaataaaagtcacctgtaatttcactactcagagataaccgctgagttataacattggtatataattttttagaactttctcctatacatgtatagatagataaacacatatacttcaaaatgataaagaatagtaaaactatgcatacaattttataacctgacttttttttcaaaaaaaaggattgcttttttaaacataagatatcaggaacatctttcatgtcattacatattcttctataaaataatatttaatgtttacagattattccattgtatgcatgaactatgtaagccatcctcttattagatatttaagcagggtctgctatttttgtattgtatcataaacaccaccacagtgagcatcttgattgccaaatcaagaatacttgtcctcaattatttctgtaagatcagctgctggaagtggaagtgctaagccactgcttttctcgttgtcccatcctcctagcctcacggtggctgagcacatgctgttctatgcccagctgaaaggaaagtcccaggaggaggcccagctggagatggaagccatgttggaggacacaggcctccaccacaagcggaatgaagaggctcaggacctatcaggtgctcagagctggatggagacagggccacagatggcaaatccatggctccccagtgcacccaggaggcaggggaggcttggagcaggagagcttctaagggtgggaacacctctgtgaagttacaccaaaaatctaagagcagcccccagatcattttccctgcagagcactgtctcacagcagcctgggttttatttgtcctgagattgatgtgcttgaacagtcttcaaagggtctgatccgaggaggtgagggttgccctttctgcatttacaaagcctgaacagtattagggctttgaacgctataaacatctaagaggcagcaccaaaccactgctgggttaaggtacccccacaatgccacttgccctgggcctttctcttcctcaccctccacagccccttaactctcccgtccttcttgtgcctccaggtggcatgcagagaaagctgtcggttgccattgcctttgtgggagatgccaaggtggtgattctggacgaacccacctctggggtggacccttactcgagacgctcaatctgggatctgctcctgaagtatcgctcaggtaacagctgctgctcagtctcctgggctgggctctcactgcagccctagctgtggtccccactctctcacctgccattttgtagctgagtacaggaaccacaatgactacactcagaagggggtttatcagtgacttggtgaatctaagttccagctaaagcctcctgaggtttttacaaatataaacagagaatcactgatgatgcaacctacttcccaaaatattttagaaaattctcttgacctgcagcccttctgtctggaataatggatgctactctaggtgaatgtcttctctgaccatggggacccaggtcacctgcaaacatacctagaagctccatagctgtcagatgaccactcaggaccagtgtgagggtgacctgctgggcattcagtgctccagagggtggccacagatggaagtggctcctctgtcatggcacctctcagacaaggggctcagatcagaagagacagcaagcagagctgagtgcccatagaggtaacagcacggttcaaccccgtggtcaagccagagctttcccccttgctctactcacacagcgttgccccgtgcctttctctgagggtttgtcatcctgaaatcctcattgctattttctttctttcttttcttttttttttttttttttttttgagacagaatctcgctctgtcgcgcaggctggagtgcagtggcgcaatctccactcactgcaagctccgcctcctgggttcgagccattctcctgcctcagcctcctgagtagctgggactacaggtgcccgccaccacgcctagctaattgtttttgtatttttagtagagacggggtttcaccgtgttagccaggatggtctcgatctcccgacctcaggtgatcctcccgccttgtcctcccaaagtgctgggattacaggcatgagccaccgtgcccggcctgctgttttctgttaatgacatctccagttagtgagagtatgcacgtgtgtgttctttatgaagagtataaatccagagcttaatgatccagaaaatgtacatatgaaactccctagatgctgaccataatacatgagcccctaatatagagatttatttgaatcagatcctatgctggatacagagacactgtgtgtggcaatgctttacagtatgtaggaagctatgaaatgttagttattattgtcctaatatgctggaatttgctgctgaattagttcccttgggtttttttttttagttaactcctgatttttgcaactatatagccaggaaattgctgtacaccctttaccaacaatgcccaacccagggcaggcctggtgattgccctggcccctaccttgcaggcagaaccatcatcatgtccactcaccacatggacgaggccgacctccttggggaccgcattgccatcattgcccagggaaggctctactgctcaggcaccccactcttcctgaagaactgctttggcacaggcttgtacttaaccttggtgcgcaagatgaaaaacatccagagccaaaggaaaggcagtgaggtaggtgtctgcccagggaaggaccctggcctgggtgagaaggagcacacagcacggggctgccactccagacatggctactcacacaggctctcgccaccagaatcagtgtctttgttctgggaccatttgcagaagatttcgatgaacacattctgaagcctcctcctacagagatgctttagccaaaatgaaacaactagctttaaatggtctgcaagtattacatgccagattacacaccagtttggtgcggtttggtgcaacatagaagtgagtgtcttattctgtaaggttaggctgttttaagagcaattggttgagcttcatttcaacattaatattccctaattaaacctgaatttcagtggtaagtgaaaactaagaagaggcctccttgggtgctataacataaaaatgatgaaggcaaaaagtaccaaccagcagagaccacttcagcacatcaggagacccagttttatgtctgtgctgcgaagtgaacaaactgtgtcatcctaggcaaattatttaattcctccttttttttagtatttttttcttcttcacatggaacatgaagctaatgacctctgcttctatttcttagggatgtgaagataagtgagataaagtattataaatgtgctctgggcttcttaagaacaggcattgctcacattcaaatggtcatgattatgatatggcagcattatttatgcctctggtttaagtgtctggctgccgctggggtttcctatgtccatccacggggagggaggcacagaatgtctcccacaggcagaacctacagctgccacataattgatgacaagccaaagggacccttggaggttctgctcctctctgtgtgtgactcacacactctctaggataaaatcaagcgactacaccctcaaaatgctcagatgaattaacagattaaacagtgaagaaaaaaatgtgttgactacacttggcagtgagaaataaataaagcgggcggtgacagcagctggcatcagggagaggctgtcatggaagggatgtgcatcttgtcagtcatcccatccatctgttgcaggggacctgcagctgctcgtctaagggtttctccaccacgtgtccagcccacgtcgatgacctaactccagaacaagtcctggatggtaaggactggacgggccatacttgggttccgtctggcagccatctcccagtattgctgggtgtgtcctgttgtgatgcattttaatgggagcaaagagaacactgggtacttctgcaggtcacacagttgttcttttgctttgagcttctttctcctcttccttcttccttcattcccaaagggattttaaaagtcatgcacctaaaggccctctccctttaatgaggaatacactctgtgctcttacccttagtaagccatcattcctggggtccccctgccctggctccaggccacattccttagtgtctggggagagcttcttctacatgtgtgccgtggcgccctctagtggaagcatggtgatgcacggctcttccagtgaattcgtggagtcagagattgcacatgtggatggcaagtctggaaatagcatacacccctgttatactcctgattctcccctcagcttcccaatttcccagtgattctccctttaattaggatgcactgaagctctcaggggtgcccccatctccaaggagctgcagtggagaggctatcccctctctatgtgagagaatgtgtgagaagcgtattcccacacaggagcaaaactaaacttacgtactgatgcaggttaatgaatggggaaagtatctgcttatcaaagaaaaggcatatttttctatttagcacaaactttttcaaatgttaagaatttactaactgaaatctggtgaagcaagagaaccgggcaatatttgcgttgtctgatcattacaactggagggaacatgctcagagaggcatcatcactgttcatgcacctgccctctctttacactgagagaccctgtgatgaacagaaaacatctttttaggatgacatctctgggtctttctcctagcctgccttgctgtgggtacctatctccctgctctctgaaccttggtcaagaagtttatatttgttttaaattgatactaatatgttaagttactgtgatttgccaaaatcagattggaaacagggcctgcatggctgaatgattcttttttttaaattactttatttctaaataaaggttttctttgtatagaatcgggatgctgtgaatggtgggaaatgcactaaatagttatgccccaaataagaaagggaaaatcatttgaatccccagttagctccttgaaagtcttttcacttaaacacacccacataccacacacacactcacagacctccctcccagatgcccaaagccctgctgacctacagagctacttctggaaaggctgacacatgcctaagacacaattcctgggaatccagcagctttgggttcaatttccttcctaaaagaacaatgaatatgacccctggagagctattagggcagagctgcttccttaacgtaaaggactctccagcctccgtatgaagtcatctcagagctaaagacaatcaagtccaacttgcagatttgacataaagcaagacttccaatccggctaggcagaaggattttggttgaaaaccatgaaatcccttcatatggatcattttttaaacaacaaaaaaagaaaagaacctactgggtgtccacaactctgagagctgctttctgaagagtcatgttttgagtcctggaatccctctccctttgacctgcctctcaagacaatgtgcgagagaactctctcttcaagtgcatgcaagtgaggttttcacagttagatttttaattttaaagtaatacacatttgtacataaaattcaattctgactgtatacatgtgtcagataaacagttgatacctgacacttgttcacagtctatgatacgcaccgcatatcctaccctctcccccagcctctctccatggcttctcaaccccccctctgcatttcctgtgacctgaggattcagttttgtttgtggaggcaggtgcaatcccaagagaaactgtgcaatcttctgagaagttagagtaggcatgtgtgtgtgatttagggaaggtacttctcactcagcttggtcaccggttccaggtttgtgtcttgggcaagtcccccatagctggtgacagaccagaaaaatgaaaacaactttgacttagccctcaagttttcagtgaatgagaatgaaaaacaaccatgagtaagagatttcttaccgagatgatgtaaaggataataatagcagccagcactcacctatgtgccaggtatttctctaactgctttgtgtagtttgactcatccagtcctcaaaaacaacaatgaagtggataccagtattttccccttttcacagatgaggaaagtctaatgtgacccacccaacataacatagtttgaggggacagagcatttcgttgaacagaggaggaactggcacaggaaagttgcatgacccccccaccaacctccgcccccaggttgcacagctagctagtcgggaggactttgcttccgtttccctctgcctctcaatgatgatctcagggccaactaagctaaaagcagacttgatggagcatcagtcctctgaaagagtcactgccgagatacaaaatacctcttcttcaaaggggaagtggagagaagtaggaaatctgggtaacctcacagtcttccagtttctggaaaacagagctggcatcagtcttttttcttgtcctaggggatgtaaatgagctgatggatgtagttctccaccatgttccagaggcaaagctggtggagtgcattggtcaagaacttatcttccttcttccaaataagaacttcaagcacagagcatatgccagccttttcagagagctggaggagacgctggctgaccttggtctcagcagttttggaatttctgacactcccctggaagaggtaaagtagagattccagctggtttctgtcaagtgccagaagtggcggttctttgaaaaagtctaacattagagcaaagttttgtaaaagcaaaaagccatcgttccccacccaagcatagcaactatctttatttttggcatagttcccccatctctgcatgcatacaaattttatgtacttgtggttactgtgtgcttacgtttttgtatttatagaagatgatgttctcagatagagtcgtaatggattttcttcccattatgaagcaatacccaacaaaacagagcttgggttagatttttctgagaataagaatgactaaacaaaattctctctttttttcttcttgacagatttttctgaaggtcacggaggattctgattcaggacctctgtttgcgggtatggtgctggagccagtggcttgttcccttccttgcctccctcccaagttccatctcgaaagtctaaggggctgggcacagtggctcatgcctgtaatcccagcaatttgggaggccaaggcagatggaccacctgagttcgagaccagcctggccaacatggtgaaaccccatctgtactaaaaatacaaaaattagctaggtgtggtggcgcgcacctgtaattccagctactcgggaggctgaggcaggagaatcacttgaacctgggaggcagaggttgcagtgagcagagattgtgccactgcactgcagcctgagcgacaagagcaaaatccatctcaaaaaaaaaaaaaagtctaaggaaaaagtcatgaaacaacaaagcaggcaaatactcctccatagtatctgactccccagtagtaggcattttgcatcctagatggctttgagtgacaaaggaataacagactgagttaggtctagatggggacactttggatgaatgaggattcttacggaggtcaggttggtagcttcatccctcagctcctcatgctgtatccccagtctctcggcctgccatgtcatcatcctcatctcctcctgtcatctccaccaggcctctgatccatctctgtctgcatgagtgacagctggcagagtccttaatgtttatcaaatacaactcagacgtcagtctcctggcccctttgagatcaacataaaatcattttgaacccttatttagtggtctatgggctttgaaaacatggggaccaaaattcctgtggattctagaagtctctcttctacatgtgtcagcctgggcaccaactagctccttccatgaacttttatcaaacccacagccacacaaagcatgtgtgagtgtagcagagtttacagcagagggtggagggtggggagatagatgtgtggaagggttacctgccacacaaacagaaaccacttctgatagaacacgaggtgtccacccacactgtaaaatcctctcctggtacaggcaaagctttgcagcgattctcctttgctgcccctgggctcctaacacctcctaaaccaccagttacctccttctttccagtgtggcatatttcagtgttttcctgttggagtgtttcctttctatgtggattctggaatcagctcttaagataacttggttttcatctttcttcataatgatcccaaacatctatctactatgcctagaactaccaatggacacatataccagcccagatatgcttcagcccatcccagtacatcgcatggtgaccaaaagatgtagtcgtcctggcacagtgggtgtggggcaggaagcagtcctctccaggggacagcagcaattcaccacagaacccaagtttctttcaagctctgctgacacagaaattgaataatctcagctcacccaatgtcaaagactcatattaaccaagaccagaatgaaaatatgctaatttatatcagaagctttgctggattcaagagttagggccttttacctgtgcagaatattccttcttgataaataggccctctcaggagaataaattacacatcagaggactgtttagtcagcataggcatagaacaggatgttccaaagatacagtcaaggggagtgggtaagagtgtagcctctggagtgaggccgaccaaatatcaaacctgagcttcataatttgcaaactaactggctttgggtaagtacatagcctctttgtacctgtttccccatctgcaaaatggagataataatagcatctacctgtagcattgttgagagaattaagtgagttaatgcttgccgacttataacacagtatacgatcactgattaagacttagcaactctaaactaaatgtttacaaaccatctcttacctcaaagcacttaacatccattgtcttatttgattatcactgtaatcttatgaagcaggcagggcaggggtctgccccatctggggggaactgagctcacagaggttggagggtttgcctaaagtcacccaggccactgggtctcactctctggtcttagctctgtaatctaggatgctcaatgccacactctcagccacttttcagatggctaagtacatttgttttgagttagctcagtctcagaggatgacattttctgatcttgtctccagtgtttaaatgaacctgtagctgtgcattggggtcacacaatgcgtggcatggagagggtctgtggctgactgccacggttactacgtgaaaccatcattacagcagttactactgttactgcctgagaacatcattacaagactgaacgaagggatcaacatggaaatgataacaaaaaaaccaaagtaactgttttaaggaaaggctagcatcgggaagaagaagagagaagaagagaagaagaaaagggctccctgcttctaatgagtaaaggcagctccctaagcttctgcagcccttcattatttattgggtaacaggaggaaggagcaggaggtaatgattgggtcagctgcttaaatgatcacgggttcatgttgttactgacagatttcaattatgcctaatcataagaaacatttgtgcagcctccaacaagggtcaatgccacttctgaaggggtgactcatagtcagtaactagaaagcagcagatagctagggacaaactggcgattctgaataggcctggaacccttagctctggccaggtcagtgggctccagtcaggatggagccttcagggagagatcaaagctcagaggtttgagatgatatcagccagcaaagaggaggggcagtagggatcctcccagagggagggccagccatagaagacatcaaatctgagcccggatcaggagaaggagcctgcagaactggggctctggcaccgagaacctgcagaacttcgcccctctgagtgcaggtgccagggctggggctgccacccagccttcgcatcccaggcctggcacgtcataggtaaatgtagttgaaaggatgactgagctgatccaattccctttacaactgtccttgtcctgggggacttgaggagggttaagaaagcagctggggaccaaccaacagtcctctaggctctccatgtccagcaatagttgttcagcaaatgagcattaatcagtgactataaactgtagcttcaacataaccgacaacttgcaatggtttctagagcatgctcccatgtgttatctcatttaaatttccaaaccaatcctgtgaaatgttctttttttttttcttttttttttttttgagatagagttttgctctgtcacccaggctggaatacagcggctcgatcatagctcactgcagccttgacctcctgggcccaaggggtcctcccacctcagcctcccaagtagctgggactacaggcacacgccaccgtgcctggctaatttcttttctagttgtttgtagagacagggtctccctatgttgtacaggctgatctgaaactcctggggtcaatcaatcctcctggcttggcctcccaaagtgctgggattacaggcatgagccaccatgccttcattttacagataagaagtctgagaaaactcagatttaggcagattgagtcacttccccaaatttatgtatcttgtaagaatccatattcaaacctcagtcccctaactcttagttcattactttttctaccacttctcagtatcctctaagaattcagaaagaaccacatcgactctgatttttcatttgtttaagtacacaggtaataggtgaatgtattttgttgtttaaaaattcatataatacacaaaaggctaaagtctcgcttcccacttcctctcccctttctacccaactctgcctccccagggagagcttctgctgacagtcggtggacattctttcagagttttacaattatgtgtgtgtgtgtacataagatgtcagtttttctttgtgtaggatacatgaacatgaattttaaacataaatgtgagtgtattacacatattgaccagcaccttagtttttttgtttgtttgtttggttttctttgtgctgtttgagaaggagtcttgctctgtcacccaggctggagtgcagtcttgcaatctcggcttacgcaacctccacctcctgggttcaagtgattctcctgcctcagcctcccgagtagttgggattacaggtgcctgccaccatgcctggctaatttttgtatttttgtagagagggggtttcactatgtaggtcaagctggtctcaaactgctgacctcaaatgatccatccacctcagcctcccaaagtgctgagatgacaggcgtgagcctccgtgcccagccagttttgtttttttattaaccaagttacgtattttaaacttctccatgtcaatgcttttagagctattttgttctctttaatgttaatagagaattttaaggcaatttcaggtgaatctatacaatttctctgtataagtaatttacactagaaatagatttttataaagatgattaagctaccagcctggtatttcattgctgacttaaatgaagaggaaaatcaatgctgtaagggaaaaaaaaaatggcattagagatccagaccttataggcattttccaaattattaattcaatctctcaaaacaggtggcgctcagcagaaaagagaaaacgtcaacccccgacacccctgcttgggtcccagagagaaggctggacagacaccccaggactccaatgtctgctccccaggggcgccggctgctcacccagagggccagcctcccccagagccagagtgcccaggcccgcagctcaacacggggacacagctggtcctccagcatgtgcaggcgctgctggtcaagagattccaacacaccatccgcagccacaaggacttcctggcgcaggtactattgtcggtcggtgtttagctgagctcagtggctcctctcccagccttcccctcctctcctgagtgttccttcaggcatgggttataactcagcaaggagcaccctctttagattctgctggttttgtttcctgctttccaaacccttatcttgattcttggtaacatgaatcttctttgtaagttggacctcccctagcaaagaaaatagaataatagtgaaaatgttaatattgtttttatttttacagtgagggataaagtcatgttttcattcatttttgcagtgaccctacatatcaaaatcattgccctcttttttcttttaatgttgtttaatttagaaaaagaagctctggtttaaagaacagtgagtcacgtgacttgctctttgaaatgccctttgaagtctggctgaacactgggctgcattcagattcttcagtggccaccagaacattctgttttcttctgcacatcttacctttgcacaccctgcttattatgttcccccagaagcccaaccctctccaccaggggctgattaggaggctgcaggataaatgtttaaaagaatgaagatgtgtgtgcacgcgcacgtgtgacatctccatgccacagtcatgtttattccacgtctattctcccacagatcgtgctcccggctacctttgtgtttttggctctgatgctttctattgttatccctccttttggcgaataccccgctttgacccttcacccctggatatatgggcagcagtacaccttcttcaggtgcgcggactcggggtcaccattctcctctgtgggtttggggcacctgggtcacatgctgcttagaagggccctgaccttcccacttcactgggaccttcaccaatgagagaggggaggggtctttgggctgcctgcagaaaggaacttaatgtatctgccactgcttggaaaggcgatcctagtggacaggcaggactgcttgggaaggccgaatggggaaaggaatgcaaagcttaggtgaatgggttgaagcgccatctttttgaggcataggtgacatgccatcagaccactgcgagtgttcaggcagcctaccgcactcccaggagagctagcgccatcccaaggcagcattcggtgcctccaatacatacctggcacacagcagctatccagtaaaggctctgagttgcatgatgttggcacgcgcctgctctgtcccagtcacatgtctcactctgtctagcatggatgaaccaggcagtgagcagttcacggtacttgcagacgtcctcctgaataagccaggctttggcaaccgctgcctgaaggaagggtggcttccgtaagtgcctacgcgcccctgtcctaagaagactagctcccctgggaggacccaacggtgggttcaagatggcaggcgttggggaggccccactcaatcctgctctgctggtcacttccatgtctctgaccagcactcccccaacctctccttccacacttgtgtgcagggacattcactacctcctaggaagcccccacaccactggacagctctatatttctcagcatagaagttctatgttgagttgacagatgattccccataacttatttgaaaggcctctgagcagggagggagggaaatagggttatgctattgtgtgattgggccttgaatggcgtgagtgacacagtggccagtactttgtgatagttgtgagtctggagaagggagttagcgaaggccattgacatccaccaggaatcctaaaagttcaatataattttaacttttctccctcagtctttttcaaagctgtcaataaggaccaaaacagactaatttcaaattcctcttctggttgctgtgtctctcaacagctagagctgctaggaataaaaagggagacaaaacgatccacaagctagagatggttattccccagccccacacctagtcagtcacaaaaccctagttttgatattgcttgagcagaaaccagcctccaagagaataagaagaaagggcctgggtctaaagaggaggaggaaagggttgggcacaatttcttatgcctagggatttgtcagcaactttgaggctgattatggaatattttcttgtcttccatgagggagtacccctgtggcaactcaacaccctggaagactccttctgtgtccccaaacatcacccagctgttccagaagcagaaatggacacaggtcaacccttcaccatcctgcaggtgcagcaccagggagaagctcaccatgctgccagagtgccccgagggtgccgggggcctcccgcccccccaggtacctgacctccaaacaacggggccccaggtctgcctgccacagagggactaggggagtccctggtatctcctgagtctctcacaaactaacatttcaaactggcagttgagtaggggactaaaccaaactccctgcaccctctgggaggggctccccacagggcgctgtggctgccaactggaggaagccactcaccaaaagcttcattttccaccagatacttcctatttgatctagtagaaaaaatgtgtttaagcactaaaaaaaattaagtcatatgtgctcattatagaaaaattagaaaacacaggtaagtcagaaggaaaaaaaatcatcgcttggatataaacacagataatgtttggtttgcagccacccaaacagattatattccaaatattgtcttaaaatctgatttactgcataatttactaggaacatgcatccatgtcaataaatagacatctgcatcacttttaatatctgtatattatcccattgtttgaatttcttttttttttttttttttttttttgagacagagtctctctctgtcacccaggttggagtgcagcggtgtgatctcggctcactgcaacctctgcctcccaggttcaattcttgtgcctcagcccccccgagtagtggggattacaggcatgcaccatcatgcccgcctaatttttttggtagttttagtacagatggggttttaccatgttggccaggctggtgttgaactcctggcctcaagtgatctacccacttctgcctaccagagtgctaggattacaagcgtcagccactgctcctggcctaaagttactttaaattaactgatctcccattattcgccacttaggttttttagttttcaccattataagcaatgctatgatgtacattcaaatggaaatgtgtttacacacttattaacagtcttaattaagaagctctccatgtgctgtgtctctaacatctgcaggtatgtacacaaatacatgcacagccagcatccatcttttgcagggacattaatgatcttggctctgagcagcaccctgtcctgggagttctaaagtccagaacagattacagtgagcatctcctgggggatttagagacatcaaagaaggctgtgtccgtggttgataatgggcctcccagctgacttgccagggctgggccttagacagccctgtccaatgatttgtcaatgaataaactgttcccaaacaggctatgcagttcagtgggaaagcacaggtatgggacacggagagccccaggtggactacttgacctctctgagccttaattttatcacctgtgaattgggaataactgcttatttcataatattattatgaggatttaatgaaatcatgtgggcaaggaattatttagaattagattcaactcaagtgatgacaaccccaaactaacagcagataaaacaagacacaacttgtttctcactcatctaaaagtctacgtgggtggtgcacgatgttctattctctttctcctccacactaaacaggcctcagcctcatcagccaataaggcaggagctgccttccaggcagcggaatggaagaaggatgaagcaaaacagagggcagagtgtgcacatgtgctatgtttagggaaggttttctgaagttcccacatagtacttccacttacaaacccaacaaaaaaggctatggctaaggcagcagggaggagcaaataatgggagcaactagattttgccacagcacctatcacagtctggtttataaatggttctaggccaagaacacccgatccctgctcttttttatattctaaagcatgtatctttatatttctcaagcaatattttctctctttgaatcacagctcatctgctgcatcatagggatcccaaaagaaggacccaaggaacttgtctcagtcctctgtgccccaagaggaagctttgcttgtttgctttgctgtcaatgctgagggctcctgtggctgcctccactcaaaaccctccagcatcaggacgtcaaggctgtgatactgtaccctgagctcttggccagggcgagggaggggaggccaagcctacctacatggtgtttcatttcctaaacgaacccttacttccacgcggtctgtccagcttagaaacttattttcagtagtgttggtccttggtccctggacaaaatgtaacagccaaagtcctagaaaaaggcaagccagttcctgccattttctttcacttctgcatttcctcactattatacgtgccttccattggagcaaaactgaatgccacgcatatgcacaggagctgtgcgcgctctgtctctctcactcactctttttctctctctctctttctctctcaatctctctgtctctatctatctcttactctttatctctcactctctcactctttctcactctttctctcaatctctttctcattctctctctatctttctctctctctctctttctcacacacacacactcacaaacccacactcttattcacatctgctcaccctagccactcaaacacaatccctcattcagcctggaataagtccagagggcgtgggcctgattcagagacaatcagttgttctcatctgggaaatggggcaatgtggtcatctctagggaccctccctgctctaacattctttgaatgtggtgggtcctgaggtggaagcactctgtccctgacttctagtatatgtggagatagggttacacaaatattttattgggcagaacttttataaaacaatttatcataagctatcgcagccagcagcaatttttccaacctggattccaccaggggagcttggccggtgtctgagtgccactttcagcttgagaagcaggtgactcagtgaaaagagcaaggaggagacagaggcagattcagttcctaggccctgggccacccacctgcaagtttgcagcccagtcagtgcaagtcagctaactgttctgaacctcagtttctctgtctgtaaattaagctaaaaattcttctttcaaagagtgtcaggatgaagtgagatcgtgtatgtagggcatttaacatagtgcccgacacacagggagcattcggtaggtgccagctctcctcctggcaggagagagagaaacaaggtgaaaagagtgaattaaagaagaggaaagtcaaatgggaaaacagggggaggagatagaaagtgtatgaaaaggaaagaatggtgcgcaataacggcggtgtaatgccaccaaaatcccctcaactacttctgggcagcacccttgacagagtgaatgcttttatgagaatgtaagcggaatgtgttcccagatttgcagtaatattgccacctggtggacaaacccatgcacctttgaattttccaaaatatttcgatgaactagcttccagtcctagatgtattttgaaagtgatttgtaaattgtaaggaactattcaaattctttcattaatgtcacaaatcaactgtgtcatctgtatgccacccactattctgggtgctggggacacaacagctcacaaatcaggcaaagtccctgctctcaccaaaatgatatcctacgggggattacagatacaaatacgtaaacagatccatcgggaggaaactctcagatggaaatgagagctatgaagataacacaacagtacatgacaatacagagtgactggaaccaggaacatttctccgaggaataaaatttgaagcgagccatgagagggtctacaggtagagttcccaggcagagtgaacagccaagcacaaagctgcaccaggagagagaggtgctcgccgagagacagggaggggagtgtggcaggtgagctcagagaggggcagggccacacacatcggccacatgggccttggtagtgagtcgagatttgatcccagggtttattggagtggataagtaagcaaggtgactgaggtgctcgggtttacatttttatagttcaagctggctgctgggtggaaaacggaagttggcagaccaaggacagaatcaggcagacccatgtggaagtttctctagtggtctaggtggtggcttgggtagcgtggcagtattggagctggagaaacgcagatggattggagatttgttttggagtgacgccattctgtcttgtcaatggattggcgaaaaaagaggcatcaaagatgagttacacatcattgaagtgagaactagggagatgccagtactttatttagtattttctcagcagctcaatccataaataatttttggaagacaacaagcagtttcacaaactacttataagtcctcaagttccaaggtaattaacgtgggtgtctcattgcctcagagaacacagcgcagcacggaaattctacaagacctgacggacaggaacatctccgacttcttggtaaaaacgtatcctgctcttataagaagcaggtaagaagaaatccttttatgctttttatcctggctccctgtagaagatattaactagggacagaagataattttctctctcaatttatgtatgatcagggcagtagatttttttcttttttatctgatttgagggccccattcaacataaaaagcaattgaggcacatacaagtaaaatgtaacttaagattaattctttttttgttgtttgtttgtttgtttttacatttagggcaagcagtcttaaattttaacccacgtattattaaaagttatatcagaagaccatagaagttattcaaaaatgcagccacatattttaactagttaaaagagagagtaaaaatttggagggaggtggaggagtataggggaaaaggtagaagaaaaagagaaaataagtaagtggcaaaaaagagaaaggaaaaagatagggtgggaaagaggcagcgggacagtgtctgagtccagcacacgccagggcgagccaggtcaactgcagctgtcatattctaactgtgaattatcatctttgatcactgccctttgagatgccaatgaacttttcaagaaatatctagttctcttggctctccagctgttcttatcagccccatccaggatggaacagctttggcagcccgtatcagaacaagcagcttgacaggggcatgccatgccaggagagaggatcctaaggaagcgtggtccagtccgcacaggctctggggctttaagataaaacctcctgtctaactttagtaggactttctgttgcttcacctgccagagccctgaacgagggataaattgacttaattaactagaacacactgcaaatggtgaaagcatttagcaaaacaaagaatgccatccaagccccaaaataaaagcagaataaatagaatgcaataaacagcaaccatcccaaactgagttctcagcagcaaatctccagtatgaaattttggattttgtgcgtgtgtgcttaaaggtggatgacaatgacagttcatgggattgagctctggggtccagagttggcatctgttcatttcccattttgtcattttacccttgattgactgaatgtcagtgccttaactttgggctgtggagtgagtcggaactcccccgaggtgtgcaggtggttgttagagtctcatttttgcagggtggaagacaggagggctgcagccttcattccacactgacatggtcattgccgtgtgttctgggtccagatcaggcatattgacctgacatatgacctgacaacaggaccactcagaaagtccagcatgcgggatatgatttggagagccagtgggggaaatcataggtcctttctctgcatgtgtattcaggcaatgtcccagggctgggcggcttccgcattgcttggatatcggaaaatgcaaaaatgcccctgaagactgagacttcagtcttcaaaatgaatgtttgggaaagaaagttaacggcactgctgtacttgtggtattcattgcattattttattttggctttcagcttaaagagcaaattctgggtcaatgaacagaggtaagaaactatttttatcagaattaaaatctcagattgattcattgttgaaataattgcacacttttaaaaggcacacctcacagccatgaggaggggctgttctgtaggtgctcaggaagtcacaagacacgtcctgaagaatatgtggctagggacatcccagactcagaagacactcagtggtgcctcttcttggaggacataagtgggggtggcattccctgatgtggcgtttcagagcattctcacccaaaaaaagcttctaaaacctccaagtatataacagtttataatactccaacaagagggccttgtagcctaaacccgggacactccttggcccattccttttaagcttcagggagtgtgggccagccccagactcaccccattcctgaggcatcctggaggttgaaatatttccagaggtttagaacctcaccaagtgggactctaggagcctgctgcctcccagcctccctcaggaactgcacctccagaacaggtgcggggctgacatgtatgtgctttcctgggcagattctagaccgtacacatgaaatctggctttcaggattgctctccagagggacctgtggggcctcggctgagacagagagtaggagtgaggcagtgattcaaggccctgagaaagagctcctcctctgcttggtataaccagctaattcattctgttctgttgactttggcttctgccctgcctttgaagggtttgaggccagggagtgatgcactcagactggtgtttccacacagtcacttcagacttccagggcagtacaggagatagatcccagggccagtgaagaagcagagcacaagtccaggcaggagaggctaagggcctccctgaacaggtgtgaggcacagaagccccgagaggtagggatgacaggatgaagatgggtcctgtgctgctagaagtacctgcaaagcacagaggtggcacagaaaaggagtccttggctgggatgggaggagatgacatgtgacatgtgaaagaggacctggagttggctcgatgctcccaaaagggaaaggtgccgaggggagctagcagccatgcaaaggcagagacatgcaggcagtctgggccatgaggagctctggaagtgactcgatatgtccagaataggccactccagggaagggctgaggaaggatgaagttggagaggggcacagaccagatgcagaagggcctcagaggccaggatgagggtttggactccttcctggaggcagcagcagtgggaaaagagttaaaagctggtttgtaaagtggagccatgttgctcgctggtccaggcaattcccccgaaagttcatgtttccctacaaaacccgagagagctactagtaggcgtgaagttcgtggccctggtctgaggatttcctgtttccttgtcaggtatggaggaatttccattggaggaaagctcccagtcgtccccatcacgggggaagcacttgttgggtttttaagcgaccttggccggatcatgaatgtgagcggggtatgtaaacagactggagatttgagtaggatttttgacttgcttaactaccatgaatgagaaactctcatgagtgataacaggaaaaaaaaattaaaaccgtcttgtttgtttgtttacatggtttttagggccctatcactagagaggcctctaaagaaatacctgatttccttaaacatctagaaactgaagacaacattaaggtacttgacctatgtataatctgctctggagctaaaaatttacctgagctggttattttatttttactttcctaccttcattaaattccatccctcctcctgctgaaatctagcaaggaatgtcttccagctaccaaacccttcctgcttctcaaatttcctttccttcactgatttctgctttaactagctgttagtgcagcgtctcagatgtcctctccaccctctaggtgtggtttaataacaaaggctggcatgccctggtcagctttctcaatgtggcccacaacgccatcttacgggccagcctgcctaaggacaggagccccgaggagtatggaatcaccgtcattagccaacccctgaacctgaccaaggagcagctctcagagattacagtgtaagccaccacagccccagcctcaccactttcttgtcaccttctccactctttgaacatcctgagaggattctcaccaccgcgaagtgctgatttggatggtaatgctgtttagtcaggcacatatgaacatccgactttcaaataagtgcctcacacttcacataccagacctcttggtcattctttctccccaacatttatgtggcaagtaagtttacatttggttccattcccttttggcttttgatagcaagttgctcctggagcttatacaattattatctttgctatgtgcaaagcagctgccaggaactggcaaagttcagtaaacctttcagctccctcggagtaattatcttagattccaggaatttcctcagaagagcatactttggagatgtcgacagagctttgctaccctcaagctgaggctcttcttgcacagtttcagccagtggagacagtggccttgtgcgttttgtagtatgttcactctatttgaggcctacatggaggaggggttggtaggagcacctttgttagtgcaaacttcagcaacgttgtggggtcctgattttactatcctagcacacgctgagtgccagtgaacatgcccagggtcatccactaaaacctgggccttggctccttggtgtcttcctctggacaccctagggccctagactgtcctctgttaattctcactcagccacactttcgtgtgtctccttccagtcatttgttctaagcttactacgtgtatggatgatatgatctgtagttttatcaaggtagtgactaccacataggatacctttgtggaaattagtaaaaatgctcttttctgcaggtggacactgtcccatgccaggggttatggcttgtacataaagttcaggctggctttagccccaacttacccctcagccagatgccttctatttgtccgaggaaagaataaatagagccaagtccctgtacaacttgcctgccctcttttcacttaaatttacatcatgaacatttccttgtgttacgatgtacttcttgaaaatgtgatttaacaagatgattattaacaaaagataaatctcacagaccgtatgtctgtcaacatagaaaattcaagagactctatagacagattattagagctaatgagagcattgcagtacataagattaatataaacatctatttctatacaccataaaaataattagagaatataataaaaagaaaggttgtctagaaatattcacatgaaatagaaaggcaacccgcaaatacccatttaaccttggtccatatggattaagacagtttagtggagtgacagcttcaaggtagagaagaggaacctggaggccacacctgggcgggtgtaaggccttcccaaagcctgactttgtatcttctcctccttctgctcttccctcttcatcgccctctccctgtgtctctggccctgctgcaggctgaccacttcagtggatgctgtggttgccatctgcgtgattttctccatgtccttcgtcccagccagctttgtcctttatttgatccaggagcgggtgaacaaatccaagcacctccagtttatcagtggagtgagccccaccacctactgggtgaccaacttcctctgggacatcgtaagtgtcagtttacagcgcctccctcccctccgtgggcccaaggtggagcttgtgtgtgctctgaaggaccagaccaagaggggaggggttctcacggtgccagggctgctgaaaggcactgggccaagggccttgtgtatctgctgtcccttgacatcttctcagaaaggcacagaactaggagcccgaagctaggaaaggctgtggggtgcagcttaacaactggtgaacgggggctctctatgtcctgcactgaggggtcttctgacccatcaaataatcactgcaccgcaggcatgagtctggccttcctggcatcagtctggcgctgagaaggtaatatgaaggggtctttcaccccaagtccccttctcaaatcctgccccaccttcaaaagggtaaaggtaaaactttccctgtggtagggtcaccagataaatacaggacacccagttaaatttaatttcagatgatgaataatttttagtataagcatatgctacttcaaatattgcacaggacatatctacactaaaaaaaaaaaaaaaaaaaaaaaaaacctggttgtttatctgaaactcaaatttcactaggcatcctagatttttatttgccaaatctggcaaccccagccagtggccaaaataataagaccttcacttattagattaaccaccgctacagggaaaaatgaagaaaaaatatttattaaatcaatagcacactaccaccttcctgacaaccaaggttggtgggggtagggaggggtcaggatagcgtaccctattacaggctgcagggtcaaaggaattggtagtaaaggcctagttataatgtaacagggatcattatgacatcaaccccaatttattctaggtgtcttgagtagtaaaatctcaacattttaagaccaacatgagcctccatttcatgtgatgataagatataccaactgatggagaccaacacaaatgaccttctcatccatggttttttaaaatgatggtgaatattggaattcctgaagatatgatttctatcttactcagcttagtaagcagctatcacttaacaatacaaaaccagagattatcagtagcaactaaattatttcctctctcttctgtctacacgaggaaacactcataaatgcacggggaggaggtcagaacctgaaagcctttctttggataagagcatcaactgcaggtaccacattggccctgtgatgctaatataaaaggagctaggcccaccggtaccgaaaagttacttagaaaagtgcggaggcttttaattttactttttttaaaagataagaaatagaatttacacacttggggctggcccacgtgtttctgtgtgtgtgtatgtgtgcacgcacgcgcgtgtgcgcttacagggatctctgagcctatggagagagatgtagctaggatagagtggacatctgaggtgggaggtgatactagctggcagtccaatgaaggggtagaagatggtaggcatcatgttagcaggctttctgatgctccagaattttaaagctggcctggaatctcacctccgcgatccatcattttggaacttaggaccaccattagccagtggcaaaaaaaaagttgaatgaaggaacaaacaattattgcttatgtaattcacttagcacatatatgatgttttaaattcttatatgtgtcatctatttttctttactttaaaattttgcaacagttacagacttatggaaaagtcacaagtacagttgaaacctttttttcttagtcatttgaaagtaacttctcagcaagatgccccttctcatttatttctctcttcctgtctctctctctcacacccctcagcacgtccgatgtatacttcctacaaacgaggatacaccccatacaaccacaacacaaactgtcaacatgaggaaaccagcactgatgtgtcatcaccacctaatcctcacaccccactcctctttcgcccattgccccagtgatgtctttcagaaaaaaggatctagctcagaatcatgcatgacatttgattgtgctgtttctttagtctcgttcagcctggaagagttccacagtcttttgttaacactcatggtcttgacactttgaggactgcaggctggttattttgcagaatgtcccttggtctgagcttgtctgaggtttcctcttgcccaggttgagggtgtgcatcttggcagcagtatcagcaaacagatgctgtgttctcactgcatcctatcaggtggcttctgatttcaatttgctctgttactgatgatgttcaattcggtcacttaagaaggtgtctgctgagcttcttcactgtaaaattactcttttcccctttataataaatacaaatttcaggtagaggcacttcaaagatatataaatatcctattcattatacaattttccatttattcatccatttatttatctctgtatgcagtcatggttcatgtgttaatcaatggactatgatccaagactatcattatttattttgatattcacattatccccactgtggtcagtggggggccgttgaagctggcttctgtatcgtcttgacttgggtcctcatgcccctggacctcctccatgctcaatggcacagcaagatattccaggctcatccttccattatccccattcctaccctctccccaagaagccctggttcctgccagtgggaagtggccctcagaagccaaggtctgagtgctagatatgttcattgcctctggagcaccattggtcccaggccttctcagtgatagaactagggaagatatggatgtacacacacaggtatgcacacacctctatctatagttctctatctacctatacagtgaacactatgagctctccaaaaccaactccacagggctcattctagttttttttctttccacatctgtaactcccttctccaacagtgagacgctggcttctctcactcccaactcatttatctaccggacctatacacctgaacagtgcccaactctgccaccatcccctccccatgtggatgccgtcctctccctgctccagctgcctctgctgcatgcaggtcctcctcgttctgctctggctctgataccctgcaccagatcagcctcctgtaaggatatctttctcatcccgttgaggcctccacaccccacggcaggttgccccctgaggaagcccgtctctggttcttgccctgctcctgatcaccatggctcctcccctaaccccactgttgccgtcccctttctgtgcccagtatagtggctgtaggactaaattgtttaaaaagggtatcattatttatttgagctttgtgaagccaagaactaggctttaagtttttctgaattctgaagacatgcttagaaagaagaatcaacaaaactttatgaccaaatagaaagagtgagagaccaggcagaattttgtaattgatcctttcaaaagatacaaactaaaggttcccttggcagggaggtagggcatggggtggggtaggaggactagtgacagcttaacatatgtttgccaaccaagaactgtttaaaaagcaagtcgaatcagaatcccagaccctacgagctggaggagcctggccccacccctcattttgcagagctggcagcaggtctgagaggttaagtgacttgctctcctcttctctttccgagatgaattattccgtgagtgctgggctggtggtgggcatcttcatcgggtttcagaagaaagcctacacttctccagaaaaccttcctgcccttgtggcactgctcctgctgtatgggtaagccgtttgggccattagctaatgcctctgaagagaagcctggtggtgggggtgggggatcatctcctgacagaaaacctgggctgtcctgtggtggtagcacccacaagtttagcttccggccccaggtagggtctgaagctgataaccagggatctgtctggcttctgattctgactccactgacagaggtatctctgaggcctggtcctgtcagtgacaatgagagaagtcccacatgatctgaatctcctactcaaactgaggccttgaccaaagcctgggggcagccattccccaacccctcacccagctctgactctcactcatctgtggccaatctgtccacctcagtgtccccatgtgaactggccaagagttaccgcccacagtagaagactccggccaaaaagctcctcctgagtcagggacagaggatgacacaggggttacatcagcagagttacagggcccagcatgcaactttctttcccacgtgtgtaaatttgaatgagtaattcatccatctcggcctcagtttcctcatctgtaaaagaaaatagtgatcctggtccttcctctgtgggccagtagagccttgccaaagcattgttctccacatctttctcttggaaatagagaatttgggaaccaacctgactataagctgtgaagatgagctcactgggctcatctgagatgacctcagctgggctttgctgacccaggctagagtgggaggtgttgcaggctggagaaccctcctatgaattgtacagggctttgtagtttacagagtatatacacagctagcagcccatttgctcctcacaaaaccccatgaagtggtcaaggcaggcatcattatctccatttaaagttgaggcacagagaccaacaaatggagtatctctctggtcccctgggactctggccagttcacacacatcacctcaggtgtaaggggagtgcattatatccagacgtattgtaggtggaatggaatgtggaactccatcactctgagttgtctcatttcacacagatgggcggtcattcccatgatgtacccagcatccttcctgtttgatgtccccagcacagcctatgtggctttatcttgtgctaatctgttcatcggcatcaacagcagtgctattaccttcatcttggaattatttgagaataaccgggtgagcataactttcttggcttttttgtttgattagtaggatagtagagtatgtgttggtcgagcagagccaggggcaagcatcgtacatgtagcagctgtatgcggatgagtgccactttcttcctccctacccccgaccctgcctcctttccttccttccttcctcccatccttccttcctctttccttcttctcctccctcctccctccttcccccgtccctccttccttcctttttcattgcttccttccttccttcgtccctccttcccttcctctttccttctgccctctctccctttttcctttcatcctccctccatccctccctccatccttccttctttcttccttctttccttcctataagcacctttttcatttctgtgctctgaatgaaatggttttctgtgtttattctgcaagcaaaacttgattcttgcaataaactttaagctttgcttactctttcagaaaggttttctcagggactttgggtgttgggttttacacacacacacatcaatacatttgggtaatttcaaaatctaaaaggaacaaaaaggcatacaatgaaaaaatctccttcctacccctgtttcccactcatgcagttctcttctccagaggcaaactcttacttgagtttcctgtgtgctctggagacacatcagcagatccctatacggtctttctcccgctttcttatggaaattgtaacactctgacatatactattccttgggcaagttaatcttgatgaagagactgggtgttctccatgctgaatgcctcacttttatgagctgccaagcccagttgtcccttccacctgacctccccctgtccagagacagatggccaaactgaatcataaaaagagggggaaaaaaagaaggcagtcgctgcagggctgtctttactccacactccacactcccagtccccaccgctgtgtctgagtcctggctgtggctgtccttggaacatttgcctcaccacgtgcctgtgtccccaggcgcctcaacctttcctctcctcattagctcttcccagttcagagggtgggaccggccagcacatctgcactgctgccctgccacacccacctccacctgcctctgggccccactggggaacacaggacaaatctgtgcggaggccccaccatgaaccgcccagacccgtggacccctgagactgactctttccagatcttgttagggtttcgtggctgctaggcaagtaacgaagcctcatctgtcccatgaatgataagaaattcagcatgtcagagtcagactctggaaaggcggggggataagaacacagccccagcagatggccagagcacccaggtgactgaaagtgctgctttgcagagctgtgtttgccacaggctcacagcccactaagtcttaagacagttttccttcagaataattaaatagccagcttaaagcaactcagaacattttcccctctgaggctgcacccatttagccaacatttgctaagcacccgccttcaaaaacctggtattttcatgtaaattatccgatacacagctgctatggaaacccccagtatcccacaggaagctccccagctcccagcagctgccggcccgtgtgagatcaggaggtctttaccagctgaacaccacgtgccgggtgtgtgctgatataaacaagcgtggcccactcgtcctgccctccagaggctcccgttccagtcggaaaaggacctgcccacgaagtttgcaacgatataagccacagtgtatgatcctccataatacagcgtgtgacagagcagcagaggagcgaggcagataacatgctgcaggccagaggcagcgggaagagccaggctgcaggggctgggggagccgtggtggaggaagttcaatttcagcctgtagatttctattagcccatttaataaataatgaagtgcctactctgagctaatcattgtgcaggtatttaggaaggacaaaaaaataattaggactcagtgcccaccctccaggggcccactgactagtagagaaagtaggcagatttttaaaaaattaatcatgggaatgtgataagtgctgggagagaggaatggatactttctcatgggaatcttggaaggcttgtaagggaaggcactctctgagccagctgtctaaagaagaacaggaatctttaagaaagcagaagggaaaagagcattctttcctgcttggagcaataggtaacagcctgcacatgcccaggcctagaggccaaagagcacagtgattccagaaagagtggggagaaagggtaggcagggaaggatgaggtaatgtgggcgcaggtgtggaggctggagagggaggaggttgtgggactgggaggagccagatggaatggacagcagtggcccagccaggagctatgctggcctcgtacgcctcgatgtcccttctattttctcaggggaggctctgcccaacatgccaagtccgaccacttgaaaacaagtccctggcttaacacagaccccagagagagtctccaaccctcctctccctagacaatggtagttgccctgtgaggggctgaaaagcagagctggagatggctcagggcctggtgttaacaaatgccttgagggctcctgttgtttcaaagtgagtctgcagggagagctccctaagtggacagcaggagggctgcagcttctctgcacattcctgctgtcacccccagagtcacctaggggaggggtaaggacagtaatgcaggttcctcacagttagcctcggtgcccacatggtactgagcatagtaaatgtttagaagatgctgcctggctagacaaaggggaagctcccgcccactagaaacttgcagggagccccagtccttgattggtcatttaattgattagctccttggcctggccttgaggcactgcttgtaagtacttcatgacctccattgcaaacccatgatgctctgctggacaaatccctccagtggccagtctggctgcaaggactctctgtctgcaggccttgccctgtgctgtcctgtgagagcatctgggccccacctgctgaagagagggggggtggggtttgccccgtttccaacagtcctacttctctgtttcagacgctgctcaggttcaacgccgtgctgaggaagctgctcattgtcttcccccacttctgcctgggccggggcctcattgaccttgcactgagccaggctgtgacagatgtctatgcccggtttggtgggtggtagccgaggcccatggagcatgggccctgggtccaaagctgggagggttaccgggggggctcctgcatcagactgtggcaggggctggtgctaggaggggaccttgttgggctggaggtgtcctgccagctggagaggattagggtgcctctgtttccatggctggggagccacaggagggatggagggcagcccttatgaggcgggtgtttggctcttgctcagttcccacataaggcctggtctagtgggccctgtgctgtggccaggtctgtggggtgagctggggcggctgaagtggactcaattcctgttgatgcccaggtgaggagcactctgcaaatccgttccactgggacctgattgggaagaacctgtttgccatggtggtggaaggggtggtgtacttcctcctgaccctgctggtccagcgccacttcttcctctcccaatggtacgtccatgccacaccctgggccagtgggcagctcagggcatccagaactggaccttatacccacatggtcatttctttcctcaggagccccactccacaatgttttttctacattctcaaagcctggcttttctccaataatacaagtagaggatcgggttaaaataggcacattcaaatatgtgaagagcatccactttaaaatatttaaaatgcagtgctattaatttcaattgctgatatttaatccttctcatttaattaccaaatgtgtattttgattagatgatagtattgcaaataacaatggttacagggtatccaaagtactaggaaatagactaatgtatttatgagagaaaggacacagcaggcccctttgctaattagagatttgggagcatgggagtaatatgggagccatgtggaggggtgcgggcagtgatcacgaccccccactcctggaggaaggtgggtagctgccaaccctgacttttgaccagggcttctcaaatgccaggttagctggcaattgccattcttccgcaggctcttcctgaagctgggtgggcccctgcctcactcccctctgcaatccagtcctacctttattgtcctcacccaggggcctgaattgccaagcagcagcccttcctagcaagctttccccaatagtgttttgtttcttaacttttcctcctctcaggctgagtgtggtcacctgtaaatagattccaaggacttggttttatgttttgatccacagggaattgatttattggaaatgaatctgcctttctactcacaggactgtgagaggtgaatgagatcacaggtgtcaacacacgcctgatgaaacaggatacacaagcagttctagttatgggagacagtgtcaggaattgttgtccttggcaccctcagcccctgcagaccctttctgcagccttggccataccttttagaggcttttgtgtgggagagagcaggtcaggaggttgactacccaaattgactcattagcttcaaactctgatgtcaacacatttgaatgagtcctgcctgctttagggcctaaagaggaccagagaagtacaccatagtccctggcttccagaaggtcagggagggtttcaaagaagaggctgtgtctttaagaatggggaagattccatttggtggggcaggaggaggagaacattgagggactggaaacacatgcggaggctgggagacgggaatgaccaataggactgggaaccagggggagatgccaattgctgacagaggagttagtgcaagaggtaagtgagaagggtaggtggggctggattgcagggctgtaactacagctgcagagggagggcttcaacctacagctgatggggaacaacagaaggttttgaggcatgaggtggcctgatgacaactctgttttggaaaggtggagttggcagggcagactggaggaagtgggaggctcggaggttagtaactaccccttactgagtgcttgctgtagaggaagcattttagtcctgacggtgatcccaggccctgagtctttactctgtgccaggcactgtgctgagttcatcttcagcacaatcctatgagacaggtattgttaccctcctcctcatcacatggttgaagtaggcaaggttcagagaggtccaatgcccaagatcacacatgaggaggccaggactggaacccaaggctgactctggacatgagcacctgacctctctacctaatgcctaatgcctctcctgctgggagccctttttagaatttaagtcttaaaggatggaagcccagaaggaagcagaagcaaggaagtggaagagaggtcccatggaaaggacagtgccaaggacactgtacagccagcccaatcctgaccccttttcttcatctaggattgccgagcccactaaggagcccattgttgatgaagatgatgatgtggctgaagaaagacaaagaattattactggtggaaataaaactgacatcttaaggctacatgaactaaccaaggtaagggaatgggtatgagtttggaggtgctggttagatccacagttggcatgatgttgccattttccttctatagaacaattgatatgcttatgcaagcaatttggttcccagttttatgtagggtcatcatccctgtgttataactcgtcttccaagagcatctaattccaatgtgtgttccctgctattcatctcgggcactgacacagggcctcagtgagaatcactccagctgagcatcattcccttttctgtgttctgtttctgcagagcatgggtcagcctcgagatgtctcagtactcaccacacctctgtgcctgcccatgtcaatatgtaacctcctagtgctggtagttttctcctaaaccatcctttgctctttgttccctcttcccctccttgctctcaccctgtctcagttctcagtccggtttcttcgtatcttgcagatttatccaggcacctccagcccagcagtggacaggctgtgtgtcggagttcgccctggagaggtgggtactctgcagaccacgtgtgaaaggcttccgaacatcagctcttgtgcctgcctctcctccccataaggcagagctattcaataggaacataatgccataatgcaagtcacatatgtaattttaaatcttccactagccacatgagaaaagtaaaaagaaaataggtaaaattaatttcattagtattttttattttactcaatataaccaaaatattatttcaaaatgtaattaatagaaaaccttattaatgaaatatttgacaatttctcgttgtttttaagtctttgaatctttacactcagggcccgtgtcaactgggacttagatgtgtttcaagtgcttagtagccacatatggctcgtggcctctgatggcagcccaggtctaaaattcctcccccagctcacacacacacttaccctggggcctgacattttagaccttcttgatctctagggccaggctagctctgtgttttctcctagtgctttggcctcctgggagtgaatggtgccggcaaaacaaccacattcaagatgctcactggggacaccacagtgacctcaggggatgccaccgtagcaggcaagaggtgagtatcctgctcctcctgtctcagggagtctctcacaggtcctgtgagaagaataggaagggtgatcatcagaccctatagtagggtggctctgaggccctgaaagatctgtacagagaaggaggcctcccagagagcatggcccaaaaagcccaacacatagacccaatggaaaagtgaactgaattgtgatagttaagagattcctctgttgggatggattcttggaaagacctgggaagcactaagtgtgtggttcttaatctcttagaggtcacggaaccttttaagcatctgatgaatatttgtagcctattcctataaaaatgcaccattgcttcccattacctccctccacacatttttacaaaacgtttcagggagtttactgagccccaggtcacatttatgatcctgcaggagctcttgaatcccaggttaagaacccctgtgatgaatgaagaatccttcctctgggttgagtttctagataggggctcatgcatgggcctttggggtagcctaacctgcattggctatttgtaggctgatatttggctttgccagaccaaggagcatagagggaaaactggcgtgtgcccttggattctggagggtgactgctgctctctgtaataaaatgtgtttaaacagactggtcccctatgggcaggacagagaggatgagctctcactcatctgcctctttcctggctgcaggaaaagcttgaacagtaaaacttcagcacacacaatagaggtgcccagaggaagcctctgccctggtttataagtggagttaggtgctgctgacatctgtccagcatctgcttgactggggcctcttcctctctcctgaaagccatcctcagcatggcccaatgcccagtgggcaggacgagtcctgagcacgcttcactggctcagacaggatgaatttgattctttggcctccatagccagccctactgggtttacagaaaagggacaggcaggggtgaagccaggtcatggctgagtccatctcaacagatccagcttcacctgcaagtgaccacgcaggtgacttcctcatggtgacaaaaggagtcatggcagggtagagatatcataccatggcaggggaaagatatcatagaattttccatgagcacatttatgagacatcaagttacaactgtgtccaagtgaggcacagtctgacatccagaaggtaaaactgagctggacgctagaaagaaactataggcttaagacacagaattgggattatatggtagggtagctcccactaatttggaaacgtaccctacttgcttccctgagtagttttaattggcccagccatgcctttggtggcttttgtcattgtggggaactgtaatggtctctctgtaccatcctatatcatccatcctttattcatagaccctaagctataagaagaaaaggatgagattagactaaatgtctatgtatagtttattttccatcttggcaatatattttttagtgggggtgaatatattagccaaagggagttggtggaacccaactcactctacccctgctccctgcaggcctctcgctgtgggtagttatctgactggctcctctttcattgctatctttgccaataaatacagatagagaagtttacttccatcgggacacatgcatcttttctagttacttcccaaatgtctgaaaattattgataaatcatgaatcattttcttaaacctgatcttccctctgtttttaaactcacatgtgaggtgatctgatccaaaatgaaagctgacttttggcgtaacagggattcaattaatcctagacatggaaacatggaagaatctgacaggattcagtttctaaccgaagggcccctgttttgattcccaaatatcccatgcatttctgaagccaaataggagaagagaagaagcagcttccttttcccgttggcagaagcttctccagccctagctctatggtcatccctccactccttgaaggatactcagtaattgctttttttcttgcagtattttaaccaatatttctgaagtccatcaaaatatgggctactgtcctcagtttgatgcaattgatgagctgctcacaggacgagaacatctttacctttatgcccggcttcgaggtgtaccagcagaagaaatcgaaaaggtgaaaaatgttttgttgtggccacataggagtctggttaattacaagcctgtttcatgagagtgcattctcttggagatgagaaactgaagcgtgctattcattcattcattccaacaaatgtttactatgtgtctactgtgtgccaagtactgttctagaaaccaggagtatagcagtgaacaagacagacaaaaaaaaatccccactctcatatctaacaaaatgttgtatgcatttatcctctgactcagcaatcacacgtctaagagtttatcctgaagatgcatctcccacagtgcaaaatgaatatgtataaggtgatccattgcatttgtaattgcaaaatgctggaagttacctaaatgtttagtcattgtagattggctgaataatttatggtacagacacacaataaagtcttacgcaactataaaaaagaagaagaaaagtctcagtaaactgatatggagatatttccagtaaatactgttaaatgataaaaagcaaagtggaaaacagaacatagagaacgctactttgtatgtaagaaagaaggaaaaacaagaaagtaaacgtatgtctgcttacctttgcaaatagaacgtagaaaggataaaccagaaaacaatgaatttggtgatcaacaagaagaaaatgggaagaaagaaaaatgggaggaaacagtacttctggggatatatttttgtatagttttaatttttggaagcatgttaatgttccacatattcaaaaaaaatcagtaagaatgggaagtaggcaaaaatgaaaacaaaaagaaaacctaacactgacagcaaactaaataaagtaacccaattttatttcaaataaatatcataatcttgcaaaagggggatagagctaacacaaacaactgctgaacacagtgtttgactctatatcctcattcttgggcagggtggagcgggggagaagaactacaaataatttctgagttctttttagtttgttttttatagtggtataggcaaagtgattctgaaaattttagatgtgttacaggattaaataaattaataaatgttttgatgttattgggacccagaattctcaccgtggaagaagggacttacaaatatggaaaagggaaaagcaagaaagaactgtgaggtcatggataggaaccggaggtagcactgggaattcaggaatatttatatgcttgtgtttgtgggtgcatgcagatgtgttcatgtttcatgcacataggcatgtatatatagacatatatttgcatgtgtgtatctgtcttccgaaaggctcaagaagcaaaaacaccccagtagccatgagcacacttagcactcaggcttttgtcttaataacattccccactaaaagtaaccctgattcctccaataaatgataagttccagggctggaatggcataggtataaaatgaacctggaatatcttatgccagaaagtaaggaagtgcttttaaaaaaaaaataaggggctgggcatggtggctcacacctgtaatcgcagcactttgggaggccaaggtaggaagatcgcttgagcccaggagttccagattagcctgtgcaacatagggagaccctgtctctacaaaaaattagcaaacaaattagctgggcctggtggtgcacgcctatagtcccagctactcaggtggctgaggtgggaggaatgcttgagcccaggaggttgaggctgcagtgagctgtgatcaagccactgctctccagcctgggaaacagagcaagactctgtctcttaaaataataataatataattttaaagaaataaaagtaactctgtacagattgcttattggttacatgggagaaacataataattttacaatggagaaattagacagcaccttaactgggtgatcaaaattaaccataaggggcagatggacatctcatgccccgagatgtgataccctgtgaaggacacaatttcacttatgtagaatccagattggagatatgtaacctgaatcttatcatgaggaaacatctgacaagctccaaagaaggaatattccttaaaaaaaaaaaaaggagactgtattcttcaaaaacataagagtcataaaagacaaagaaagagctatggaaatatctctgatcgcaggaggctaaacaggcataatgactgaatagcagacaatagactacatcttgtgcagaagagaaaaaaaatgatagaaggatattattggaccaactgacaaaactgaactatgaacagtagattaggtaaatgtatcataacattaagtttactgacattgataatgtactgtggttatgtaagagaagatctctattcttaggaaatatgccctgaagtatttaggagtgaagggctgtgatgagtaatttaccctcaaatgggtcacaaaaaattgtgtgtgagagagagaagggttttattagttaataattctatgaactatttttattcctatatgtttgtgtgagtttgaaactatttccaaataaaaagttaaaaatggagattacattctagtgggagggatagacgatctgtagataaataggtaaaatatccagtacattagagagtgaaaagtcctcagggaaaagtaacgcagggaggaactgctggggcagggtttgcattttgaggtagggtggcccagggagagcctgcagaggagagaacctgaatgaagaactagaggtgagagaaggagccacgtgcacacctagggaggaacattccaggcacgggggactagtatagaaggcagaagcatggtgagcttgtctccagtggcttccctagatcccctcctgcgcatgtgcacacacacctggtgtctctgtcatcgttccctcacagcactgtcacgatctgccagtattctgtttattttgactgccacctccccgcagtctgaggatagcagcaatggctgtgttcacattgttctccagtgcctggttcagtgcctggcgtatggtcagtgctccataggtatgtgtcggatgcacaaggctttgggtgtaaccctcttgacgggtgggatcaacaggtctgggactcaccatcttctcaaacagagccttcctcctccactgctagccatggtccaggacgctgggcgagacccactgtcttgctctttgtaaggctgaagtccatttcccaggcggctacacccaacagatgctgagcaggctgggccaccctgggatccaagacacagagagaaagagcccctgtctggcgcctgaagcacatgccagaggacaggagccagcaggagcctgtttcagcctagctggggatttcattctggaggcgtgagatctgggagcccaaggctttgaactgggggaggtttggggtgtttgcttgtcttctccaaatggcatttctttctcttccctaggttgcaaactggagtattaagagcctgggcctgactgtctacgccgactgcctggctggcacgtacagtgggggcaacaagcggaaactctccacagccatcgcactcattggctgcccaccgctggtgctgctggtaactgcgggcttgggccgcaccaagggcttaaaccaagtgctgggtctcttgggttggggaaataggttctgggtcggcagatttagaaactgcagcagtttggctttagtctggactgtttcctgtgttgctcattttgagcgatcagcccagtgtttggttcacacagctccggagaaaaacaagtcacggcacagccttgacttgggactgcgcacatcctgcgttcccaggatgtctcctgtggggccatcggctcacagccgggaagttcagcccactctgcggcctgtcggtgtctggtccccatacaggagcactgagctgggtcaaaggctcctgagctgagccaggccaggcctgaggccatgcccacgcagcccaaggatcatgagggcacaggacatagcgggaaccaaggaagtgacctgagtgacctccctgccttctgacaaatgtatttgcaggattttctttttttgaggagaattctgtcattgccttaatccactttaatcccctcgtgggctgaaatgggcccaggatggacgccacgcttctttactcttggatccacctcctgccttccctaccctacaccagggtacccctgtcttgctcaagtgaggggagtgactgtgtgcgccttctgtcagctcatcctccacaggggagccagcccagggggaagcagtaatcagaagggccagctcccagcctgtgcccccaaccttctctccaccccccaggatgagcccaccacagggatggacccccaggcacgccgcatgctgtggaacgtcatcgtgagcatcatcagagaagggagggctgtggtcctcacatcccacaggcaagagattcccagggctggggaaggtgggtgggaatcctctcctgctcacctcctctctcctgccccacagcatggaagaatgtgaggcactgtgtacccggctggccatcatggtaaagggcgcctttcgatgtatgggcaccattcagcatctcaagtccaagtaagcagatggtggggcgtgccccttgttgccttctgtggatccacctggatcctgtgttctccattgacacttggaagagtcctgctgctccgtcatcccctggggcagaggcaggtggtggctgggcctcattctccagcagcagatggagaaggccatcatgctgataagaaactcctctatattggcctaatttcctgtggtcgaagactcgcccaagtctctggatggggcatctgatcaggatgcatgcagagcctggctgggatgagggagggctgctaccactgcctcaatatttcaccacttatctcaacagatccgggacctgtggcctatttactaagagtccactccaatgtaggaatggttaggagaccaactgacttgaggacccatctttgtttttagaatattgtatgcttttgagtttgaaaaaagaccatatgttatatgacaaaccaacaatggcagtaatcttgaataggattatccttatcctgtacccacacattgtaaactattgtagataattccttattattaagagtttgcatgccaaagctaacagtttaagattatcagcatattgccgtgctcattcacgttctgatatgctttataacctagaaaagagcagagttacaattactcatttatttaacaaacacttattaagagctcagaatataagtcactaagctggttggtgggaggaacagcacataacccaccttatctatgctgaggtgcataatcctgatgcacccacaggagggtgttacacagaagatgtcatcctttcatatgtgtcagagcagataaataattgagagaaaggtctaatagattagctgcttgtggcaagtggacgtttgacccatgatttattgagcaactacaacttggacactgcatagatatctatagaaatagcagcatgtcaggtcaccagacctgtgtcagcaacttcctgtgtccaactgctggagaaagggaagtctcctattcctttccctccagctccttaatatctccatgatagagggggtgagaggggagtgttccctgtgtggagggatggtgagttttctggagctgaaaggtaaacagcctttctcctctgcatcttactgcagaggagaacagccctagactgtggaggaagctttggagtcagttatgactgacacaggataccagggcatagggtactgacacccgctagccgtgcacacactctctggtggaccatcactcatccaagagagggtaaccagccatcctgctgaaggagaaagaaagcaccaatggcccaagccctagcagctccattgtttcaggaagcttcctcagggaagtgctgccttcccgagcctttgctcccacctggcccatcagcccttaccaccactcagtatgcactggtccacgtgtctttatgggcagtcttgggatccccacactgggctaaaactacctttgacggccaggtgcagtggcttacacctgtaatcctatcactttgggaagctgaggcaggtggatcacttgaggtcaggagttcgagaccagcctggccaacacggtgaaaccctgtctctactaaaaatacaaaaattagatgggcatggtggtatgcacctgtaatcccacctactcgggaaactgaggcacaagaattgcttgaactcagaaggcagaggttgcagtgaatcgagatcacaccactgcactccagcctgggtgaaacagcaagactctgtctcaaaaaataaaataggctgggcgtggtggctcatgcctgtaatcccagcactttgggaggccaaggcgggcggatcacttgaggtcaggagtttaagaccagcctggccaacatagtgaaaccctgtctctactaaaaatacaaaaaaaaaaaaaaaaattagccgagtgtggtggcaggtgcctgtagttccagcctctcaggagactgaggcaggagaattgcttgaacccaggaggcggaggttgcagtgagccaagatcatgccactgtactccagcctgggcaacggtgagactgtctcaaataaaataaaataaaataaaataaaataaaataaaataaaataaataaaataaaataaataaaactacctttgacttcagcaagtacgattatcccacattaccatgcagacatttgatctctaaaaactggtatcaaatgatttctccagggactaccatggtttttctctcctagttttcagtatgtacacaggtctatggtatgggcctttaatccccagtatttctttttttgttgttcttgtttgggtttgtttcttgtttttcggtttttttgagacagggtctcactctgtcacccaggctggagtgcagtggcatgatcatggctcactgtagccttgacctcctatgctcaagtgatcctcccgcctcagcctcccaagtagctgggaccacaggcatgtgccaccatgccctgctaattttcgtagagacagggtctttcttgttgcccaggcttatcttacattcctgagctcaagtgatcctcccacctctacctcccaaattgctgggatttcaggtgtgagccaccaagctgagcttaatccccaaaatttctgatgagtctactccttattttgggattaccttaggcccaaccactaacagaggcctgtcctgcactgtgtgcatcccctagatttggagatggctatatcgtcacaatgaagatcaaatccccgaaggacgacctgcttcctgacctgaaccctgtggagcagttcttccaggggaacttcccaggcagtgtgcagagggagaggcactacaacatgctccagttccaggtctcctcctcctccctggcgaggatcttccagctcctcctctcccacaaggacagcctgctcatcgaggagtactcagtcacacagaccacactggaccaggcaagttggccctggggcaccgagagctgagcaaagactggtccagaacacccagtgtgggttggaattgccataagagggaggcataacattcccgatttttaacaaactcttgccctctgtttattggggtaaaagctgatatatcagaaattgttttctaacaatattttttagtcatcaggaaacttcattgattcttttttttacattttccttccctgtgatgctatggtgtgttatttcattcttgctcgtttgtggtggtggtttttccttcaaatcagctttattgatgtgtaattaacatacgatgaaacacaggttctttgggaggccaaggcaggaggatcacttgagcccaggagtttaagacaggcccatgtaacaaagtgagactttgtctctacagaaaaaaaaaaaaaaaatcagaaaattagccaggcgtggtggtgcatgcctgtggtcccatctacatgggaggttgaggaaggaagattgctggagcccaggaggtcaaggctgcaatgagctgtgttcataccactgcactctagtctgggtgacagagcaagcccctgtctcaaaaaagcaaaacaaaacaaaaacacctattttaaatgtacagtttagtgagttttgataaacgtgcattccatgtgtggtttttaaaaatgtaatcacattttttattgcggtaaaatataataacataaaattgaccatgccaaccatgtttaagtgcacagtgcagtggcactaagtacatttacattgttgtgcaaccgttaccaccatccccgatagaactctttcatcttgcttcagtgaaaatctgtgcccattaaacactaactcaccacttactgcccccctcgcccttggcaactactgttctactttctgtctctaaggctctgactactatagatacctcatataagtggaatcatacagtgtttgtccttttgtgtctggcttattatgcgaggacttagcataatgtcctcaaggttcatccgtgttgtatcatgtgccagaatttccttcctttttcaggccgaataatattcctttgtacgtatatgtgctacattttgttcatccatctattcattcattgatagacatttgggttgtttctgggttttgtgtttttatatatgtttttttaaaaataaacatctttagagacagttcagtaaagcagtggaaacagggaagtctccatttaacccctgaggatctggctcacctgcaccttctcatcagcattaagcagagggaggcacgagcaggagccacctgcacactcaatgaggagctgaacagggatcaattacctttttttttagttattaggatgctgctagctgagaatctgccttgccttgattaccccaatgtctggtgcccaagtcccttgagtcctccagcaggaactcctgtggcatcactcaggagtctagtctaagaagctagctctgaccagggcagtggtggccaggcttctgtgagtgggccagcctcccccgggtaggacacaagccataccagcagggctgtatgtgaactgtggaaaatagagagcaaagtgggtaggtgggtgtagggtgctgttttcctggaaatatctacctaatctcgctcttctcttacctctaggtgtttgtaaattttgctaaacagcagactgaaagtcatgacctccctctgcaccctcgagctgctggagccagtcgacaagcccaggtacccctgctgcttatgcagtccacagcttgaggcagttccttggctcagagcccagctggttcactgggcttgagttgctccaaggctcagatatgcctcctacagagagccccacccacaccacggtccctaccaagtccccaccacatcctcatcacatccttgctaagtccctgccactgtgtgttctgtgctgaagaacttttcattcagtagttgtaggggttcctattgtaatcaggaaaccatctggatagcatgggagagcatttttgaaaagaactttcccatgtttttgcttacagcaaaaaagcttggatttggggaataaggagcagagaaggtaatagagaatattagaatgttttgggtgcttgacatctatgtctggacatgtgtttgagtttcaagggaagggacttaactggcacatcatttcagtgtcagacacatttggttagatcaaggaatagcatctgttgtaggaagagggctctttgttctttataaaaattacaagaagatggagaaagaagcaataggaggtatgtctcctggcttgtgataactcttggaataggtgcttgtaggttcctgccctggcacagtgccccatgtaaggagcacaccacccaagaaggagagagctagagcaagtactggaggaggcaccagcatcccaatgccttggcttaagcctgggattgtagagggatgaattagccactctcttctgacttacctggagagtaaatcaaatcaaatcaagaagcaaggatatgcaaaaaccttatttccccataaagtttttattctgcccagtttctggattgcaagaaaaaccaaatacagctaatgattgaaacactgctgtctaaagcagtgcttgtgatgaattttttcccttcctcttgaccagcagagacctaatggctacttggcaaaactgactttgtcttcccaccccttacctgccagagggcccagaaatgcctaaggctcctttagttacagaaagtttgcttttactgagatcttccagccactgattcccatttatagatctggtgattgctgttgacatcagttgaaaattatttttaaaaaccacttgcagttgcaaatcctttttataactctgtaactcagaatatagaattgggtagcaaaattgtttcccagaattaccaatggtctccccacccctgcctggcatgttccctcttaaaggactaatcccaccacatcacctctgggccaggcagaacatcaggggtgctgatgttctgtgatctacagcagttaattccaaacttttctcccttattggatgagatcatttttctattgtgttttttacatttttgttcacaaagattagaaaacctgcaacacacttattggcatatttttctgataattttcatccaaaacctaattctgactttacaacatactatctttacaaaggtttgcaaaaattctttcatatagcattgtatatgtctgtcatgaaataatagtaagtatattattgtttacattataccacttcaaaataatttcctttaaagtattcttcaaacaagaaaaaggcaatttctctcaagaagttttagagagaatttacaacttgctcctaagcaaatgtgagaacttcaggaggttcatctggccattggctttacaactccaaattgtgagccaggaccacacagatatttctctagaaatcagcgtttgcttaccaagaacatttttactctccaaaggactccatcctggaaaacatgttttgggataaggtcttatgcaatcttatactctgttattaaaaccagtgagggtcaaggtgttaatagattaagtagtgacagatgatcagacaacttagaaacatcctaaataggttaataattatgtgaccatcgcatgtgcattcccaaattaggaacaactcagatcaatttctaatccttattcttacactgttccagttcccccatataactcgtatctttgtgttagtttcagaagtttctgaagtaccctcagccttgatggggatcctcgcaccacctcaaatcctgttctcagccctaagaactgtgttagtcatcctcttaagaggatgtgtgattttaaatcagataatgggataaaccacatttcgtctagactggtcaggcctttgtccagtcccctcctcgcccacactaccccagctccacagcgggcattggttcaggaattcaacccacactttataactggagacagtatctctccagttaaaaaggtcaccttggtgtccgcttctcaaggaacatggacatctttattaatcaaagcccaagctttgatctggagcctaatatcctgcactccagctctcatctctcccctcccccagtcacactttcatgcttcccagagccacccctacaggaagtggtcaagggaattctatacctcagggctgacctaaattaggatttcttggcttttaagataatggtaactttcttaagctaaaaaagccccaaaagaccctgtaagagcccttggaaacagcaccatgggtgtagcttccccccaggatgtaagcatgtatgcacacatctcgtatgtgtgtctttgtaacaaatgcctggatcttagtaccagggagacctgattcatagatttcatagagaaggagagaaagatggcccataacctgggtgatctgacagaatcacagtgccctcagctgagtgcccttcagaaattgattgacaactgtttagcttttgaaatctaaaagtagtacagcatctcagaaaaccaagatgacgcgagtccatgtgatctccttccacaggactgatctttcacaccgctcgttcctgcagccagaaaggaactctgggcagctggaggcgcaggagcctgtgcccatatggtcatccaaatggactggccagcgtaaatgaccccactgcagcagaaaacaaacacacgaggagcatgcagcgaattcagaaagaggtctttcagaaggaaaccgaaactgacttgctcacctggaacacctgatggtgaaaccaaacaaatacaaaatccttctccagaccccagaactagaaaccccgggccatcccactagcagctttggcctccatattgctctcatttcaagcagatctgcttttctgcatgtttgtctgtgtgtctgcgttgtgtgtgattttcatggaaaaataaaatgcaaatgcactcatcacaaactatcctaattcacagtctccctggtgtgcaccacctagtatagttttagacattctttagatgggtgcatagctccttgtcagtcccatgcacttctgtgagtgttactgcctcaggactgctcgttctggcaagattctgcaacactaggttggaagtgaatggactagtcttaatgttccatgtcaagtctttgtagagtttgaagaaaacacccaactagtaatgcctgtaaacattatccattgtcagctgggtattactgactttaagtttcgtgtctgtttgcccagcttatttgagtgtttacctcacaagtgtaattaggacaggagacaaagaggcatgcacaggcgagagttggtccttggttggacgtgagacccgacaggactttgtaaccatttgaagaggtcaggacctcattctcatgctgctgtgccttttctgcagtgctaccatgtgcatcttctgcagtggtgttagaagggaatgaaggccgggcgcagtagctcacgcctgtaatcccagcactttgggagcctgaggtgggcagatcacaagatcagaagatcaagaccatcctgactaacacagtgagaccccgtgtctactaaaactatgaaaaattagctgagcatggtggcacatgcctgtagtcccagctactcaggaggctgaggcaggagaatcgcttgaacccaggaggcagaggttgcagtgagctgagattgtgccactgcacaccagcctggcgacagagcaagactccatctaaaaataaataaataaataaaaaggaatgaagatggacatctagttcacataaatgctcatcaagattcagaaaataataattttaaaccaaacatttccagagactgtggatgaggagaacaagtgggtttccttgtcagggcagtctcccctccatgacctagagatgggcttcgtcgtaaacatgctttcattatactgaggatagactccagagtcggggtgaggcaagaggaaaaggggagagatgctgaggcccaggaactgttgctgagaagaggatgagaaagaaagtgagcacaaggtgctaaaatttttgtttcagctgtgcttgtttagaggcagacagagggcaagggctacacaactttaagtcctgcacacctcctggcttgccactttgcaccttctagatgctaggcaaacaactgcccatagagactataaaactactttggtaaccccgcagcttcatctggtgttgactttttcttttaagttaccaaggaccaaaactgtaagaccattttagctagggctaggatagaggttgggaaagcccagcacactgcttgcatcacactgctgcaccctggctggtttcataatttaaattagcaactgcaatatcacaggaaagaagactacactcttcggggctgcttaggaaaagaaaactaaaaaaagactatgtaggggaggtggtttagcagccattctgtttggctgtgagggtttcggaaaggcatcatgaactgggaagagtcgatgcaggtaaaatctgcacacccccttaaggaaaaatctcagtttaccttttgtctccactacacctgaggtctgtgtcttttcatcctgttttttccagctcctggcacacagaaaatgttcaactaatacccaccaaactgaaaacccagcaaactatgaaaactcagcaagaaaaatagacagaaaagaagtgggtccaagaaaatgatgcctccaaaaagcagcaaagggcaagtggagcaggaggatgccgtgctttaaaaacagccacaggccgggtgtggtggctcacgtctaatcctagcactttgggaggccgaggcgggcggattgcctgagctcaggagttcgagaccagctggccaatgtggtgaaagcccgtctctattaaaatacaaaaaaaaaaaaaagaaagaaagaaaattagccaggcgtggtggtgggtgcctgtaatcccagctactcaggaggctgaggcaggagaattgcttgaacccgagaggcagaggtcacagtgagctgagatcgtgccactgcactgcagcctggcaacagagtgagactctgtcaaaacaaacaaacaaacaaacaaacagccacaaagcaaggaggaggtggcaaagccacagcttgcttgggtttgaggagggctgaagctggaagcttggcccagatctcctgagaatgtgtgactctactgaaagatgcctcagtctgttaataagggaaattattgaggaaatggaggaaaaggaggaggaaatggagagagtcagttcagaaaacatggccactcaagagaagctacaggcatatgatgtgctgccagaatttctaagtttccagttctttggggagctcaagattttggaatagctgggataaaaagagaaatctctttcaagctgagtgaaaagcccactctagctctcctgaagagacaggaagagaaaagtggggcagagaacccatcggcaaagctctgggcttggggcacagggtctctgtgacatcctgggcaccttcactgtggccagtgaggaggaagttctgccccagccggcctgcggggactatggggcaagggaggagctcttcctctagaaatacagcagcctcacccttgtggggtagctgtttcaggcaccagaaggactcagcccatggactccggccacctggggcttggtttcctcaatgcagcatttcaatgcctgagcaggtgccccgagcttaacagttcatgactcctgatgacaacaaggaaggattgctccacattttgtccaaggcgatcatcaagttggggaaagcataggtactggaattttcagattcataaagccataggcttgtagagttggaaaatacctcagtattcacaaattaagcctttgtgggattgttttgtttgcactgttttcatagaaaatgaaaagcacattccagaaaaattcaatggcttggcaggccatccagccttccctgcagccccgctccactgccgtcctccttaagtggctgcattctcccagggctaagcatccacaggtcccagggggcatgcccactggacccagaactcctctgcaattccctgtccaaatgatctaaagctcacttctagggcctgtgtgagctgagtcaaggctggtcccggatcgtgcaggctagtgtccatccatggcacacgaggccacttgggaaaacaggggaaagaagaaaaggggagcgagccatggggcagtgggctgtgcaccaccacaggccagtgtggaactccaaggatgccaagaagctgacatttgaacccaggtcattatgaaggtggttatttagcagtttgttagcttcgtttgtaactttaagtattgagacataaatggcatgaggaccccccaaggcactctactcagggcccttcctgcagctcaccatgacacacactcagcttcctgagcagctgcctgatgtccaggctcagatgtgcacatcccataagacatgctttgcccagacccaagccttcttggttttatactttagtacatttcataagagaccacagattattgtagccaaatcccacagtcttgagtcatggtgagtttcagggggcacatttcatccataagacactgcacagcacctggtcagacggcattccaggcacacagcctagccctggtgcaattcttgttttccagcagagctaggcagcctctttggtcctgaacaatactgattgccacattcatcctctaacagttgccaaaaagcaaaagaggaagggggaaaggagaggagagaggaaacattgcagaagaaggtaaaaaagcatccactactccatattctggggacaaagcagagaacaagacacagcctctgctttcacggtgttaacatcctaatgcatcagtcagcacattttttttttctgtaaagggctggacagtgactatttcagactttgcaagtcatacagcctctggttgcaactactcaacttggctgtggttcacggaagcagctatagacaacatgtaaggaatgggcaaagctgggtttggctcacaagccatactgtgcccacccctgttctagcaagtaaacagattaatgttaagggacatcagacacagcttcaggtgccttttaaggacccccccccccccacacccattgccacttgttccattttctgttttatagtaggaactgcaagtaactccagtttagctgggacagcagatgttgaaagataagttgaaggtcagagaatggggacaattttaagctcagaaactgtgattttagatcttcgttgaactaaatcaacagctgacagcagccagcctgcaggaaggtgtaataagcctgggtttttacctgcttcccccatcagccccacttcatgtaacaagatgtcttataggtacagcatcaagtcccacctaaaccagcaggagcctgagggctcaactccaaacattcataattgttccctcagctaaatgtctagggagctctatagaaacaaaatagcaaggtcagtaggttgatcacttttaaaatgtgggctcttgggcaaaaatgtcagggaagagccaggaagtcccaatgtattcgtagtccccactttggagaggattccctattttggagtgttcaatggtatttatcactataaaggtgtagatgatgaactttgaaaactacaggatggtaagcaattataaggtaatgttacactttttgttattttaattgtcctcactttctgagatcctgaactgattaattttcctgtttcaattgtaggcatgactcttctcctgtcctaagagacttaaaaaaaaccctcagattccttctcttccaccttcttcaccccctgtattctaccacttgccaaaatacagcttccaacaccacaaggtcattcccaaataccccttttgcctttcttttatcactgtcctttctctgatagaggcctttattacttcctgcctgggtgatgttccagctccaagcctggcctggcctcgcctctcccacatccactgatactactctgcttcttaaaattcatttcctgaggtctgtttggtaaccacgattgaacacttactattagccaggcactgtgctaactgccacatacaataaaagtccccaacaccactctggttgggaagttgtctcagaaatagatgaggtcaatttagtagggaaagggagggagaggggatgggagaaggagaaggaaagaggaggagagagagattgagaaaacatgaatgaatgaattataggagcccaaaagaagcacactcaactagcaggaagtgggaggagtagggaagtcttcccaaaaggatcattcacttaagttctcaatggttcctataaactgcagagttaagtgcaaaatcctcactttgacattaaaggccttttatgatttggccccaacttacccttccagattgaccccttgccagtccacatatgagctacagtctagccaaacaaaacccctaaattcaaccctcattttcctgtccttgtctttaattattctctcccccctccctagaatatcacttttcaaatttgtattcagtgttaacaactagttatctacatgaaagtatttaaaaaattaagttagttctatctcacagcatacacaaagataaactccaagtggattaaagtattctttttaaaaaataagaagtcatttttatgtaataatttttaaattgtgaaacaatcacaaatttacaagaaagttgcaagtataatagaattttctcttcaatcatttgacaaaaaactgccaacctgaagcctcatagtttgtatagtttgtatatttcctacaaacaagtgcattctcctgcatgatcacaatacaaccaccaacagcagtaaattaacatcactaccatctaatcctcagaccccattcaagtctcaacaattatcccaataacctcctcctttatagcaaaaggatccagttcagaatcacatgttgcattgagttgacaggtctttttgatctcctttagtttggaacagctcctcagtcttttaacgatgacaggtcagttattttttagtgttcttcaatgtgggcatgtttgatgtttcctcataatgagatttatgttatgtatctttggcaggaatatctcagaagcgatactgtgttctttcatttcattgcatcctattagatggcgtgcaatttcaatttgacccattactaatgatgttcactttaatcacttgattacggaggtgtctgcaggcttccataagatgattctcttttcctttgtaattaacaagaattttatttatttatacgtatttatgaattcatggcttcctattttattcaatgggtttaattctttactatttaacttaatgtccaatttgtctcttatttagctagtagaaatccatcaaatggctcttgtgtccttttgatgtgtttcacatcattctttgagcacttacctgctttctggcacaacaagatattccaggtttatcttgccatttcccaatctggaatcacccatttccccaagggccctggttctttttagggaaaatactattcagaagccaacatctaggctctcttagtggacaattagagaatatgtatgtatgtatgtatgtacatatgtatagatagagaatagatatatatacagtcatatctatatttatttctctatatattaatgtatacatcaacaatcgtgaggttatgctgatacctccaattccaatacatcacagcatttactttcatttttttctttccacattttcagctcccttcccttaaaaattggctcccaatatctttaagatatttatacacacatttacttatatgatcgatccctctggatataacacatctcccatctccaccattgtcctcctgcctaccttccccaacaagaatctcacctgacactaccggggttctgacacccacacttccccccctgctcaggctctgactccccaccctgggccactccagcacatagataccctcctcaccctgcctggggtctggtttccacaccaggccaccttcctacacagacgccctccttgcctcgcctgggctcttacacctgctcacagcccctgaggctcccctcagccctacctgggcacctacccggctccctaacacctaagagccttaagaatgatttactcggccgggcatggaggctcacgcctgtaatcccagcactttgggaggcctaggcgggtggatcacaaggtcaggagatcaagaccatcctggctaacacagtgaaaccccgtctctactaaaaatacaaaaaattagccaggtgtggtggcgggcacctgtagccccagctacttgggaggctgaggcaggagaatggcgtgaacccaggaggtggagcttgcagtgagccaagatcagggcactgcactctagcctgggcaacagagcgagactccgtatcaaaaaaaaaaaaaaaaaaaaaaagaatgatttactcagaaagaaaggaaacagaagagggaaaagaagagtacccaagaccacttttgaaaaaccaaagtggaaaatccttagaagaaaacataagatactgttttcattgtgttaagaaaagttttcttaataatgttggttgctaacacttaatgagtgccagggactcatggcactaatgagtcaactatgtgccagggactgttttaagcactttatatatttaattacataatccttacaactacctaataagcaggaactgtaattatctccattcgacagataaatggatggaaacccaaagaggtaaacttgaccgaaactgcacagtaagccgtggggctgggatttaaacccacatggtctggctccagagcttatattcttactcactactccatacagcctctccaaagacacataacaaaacatgcgcatgtgcgcacacacatacacagacgcacacacacacacgcgcacactccgtaggggaaaagattcatcaatttgagcacattaaaatgaaaaacatacacaaaacaaaacacactctaaaaaataaagacagactgcagacaggaagaaattattttcagtgtacataatgaacaaagaattagtattttgatagatgtaaaaaagacaaataaccaaaaagacaaatgagcaaagaatacaaatagacacttcacagaaggggaaactcagatagtcactaagcatgtgaaaagatgcacagcctcactagtaatcaaggaaataaaaatccaaataacaacgggatactatttcacacctattaggttggcaaaaatcagaaagatgaatgctaccaaatctgtcatcatcatgaattgggaactctccctactagtggacatgtgtgaagattagaagaagacttagaagattcagcatataattgtactcatgtctaagatgtattacagcaatggagtaagaatacacagctggatcatacaggaagaaaacatggaaaggatctggtgggatccatgcataggctcctgtatgctttccccctcccatgagggatcacatggagtacattcatttcccagtggtgaaaatgcagcaacaggtatgtgatgcttctgcccagagaagcccattagagagttggtacccaaggtttttattgtgtcacataagcacactttaactagcatgtttcaaaattccagtctcccaggaggaaaggaagggctcagcatgaaccacattgtttgcacagtctaggcacagtaagccatgcttattcattaaagaacaataggaacactccagaaacccaagttcccagatgccagctaagggctagccttgcaagcaggcccttctaaaaacagcagcttcgggtctgctatgataaccatttactgcagaatgtccatggataggaccagtttggacagcctttgacaacatctagttaagttaaagatgtgcatgtccactggctcaaacctttcttctaggtctactctgtcttagagaaactggacatgtgcacaggaggagatgctcaggtgtgttccttgcagcctcgtttataaaagcaaaatattaaaaacaatctgaatgctaatcaagagaaaatgagtaaataaagtatgacctgttcatgcaatggatgttatgtagtaatgaaaatgaactagaaatgggtaagtctcaaaatataatgttagtaaaaatatataatggcagcaagatcttccatggccactctaaggaaaattttgatttcctctacagccatcctcatgtcatattcccttctctgctttttcttatattgttagtagttgtcactttgtcacataccacgtttttatttatttatcttgcttattgtctctctgcccctctggaatacagagaataaattttcatttattttttatggctgtatctccaatgcctaaaacaatacttggctatagtagttaataaagtacttcctacctgggaaacaccattctggacttcgtctgggaaataacttataactaagtcctcaaaagcaattgcatcaaaaacaaaaattggcaagtgagatctaattaaattaaagaacttctatacagcaaaagaaattgccaacagagtaaacagacaacctacagaatgggagaaaaaattcacaaactatgcgtctgacaaaagtgtaatacacagaacttataaggaacttaattcaacaagcaaaaaacaatcccattgaaaagtgagcaaaagacatgaacagacacttctcaaaagaagacatacaagcagccaacaaacacgtgaaagaacgttcaatatcactaatcatcagagaaatgcaaatcaaaatcacaagtagataccatctcgcaccagtcggaatggctatcattacaaagtcaaaaaacaataaatgctgtgagactggaaaaaaggaaacacttatacaccgttggtgggaatgtaagttagttcagcaactgtggatttcacaaagaacttagaactaccatttgacccagcagtcccaataaatcatccagaatgatttatttctcaaaagaaaataagtcattgtaccaaaaagacacatgcacacatatgttcactgcagcactatttataatagcaaagacatggaatcaacctagatgcccatcaacagtagactggataaagaagaaaatgtgagattatatatatatatatatatatatatatatatatatatcatggaatactatgaagccataaaaaagaacaaaattatgtcctcggcagcaacatgaatgcagctggaggccaatatcttaagaaaattaaaaagcaaaagaaaaccaaaaccacatgttctcatttataagtgggagctaaacattgggtactcatggacctaaagatggcataataataatagacactgaggactactagagggggcagggagggaagggggaaagggttgaaaaactaactattggatactatgctcaccacctgggtgatgtgaccaatgataccctaagcctcagcatcacacaatacacccatgtaataaacctgcacatatactttttaaatgtaaaataaaagttgaaattatttaaacaataaggtatttgctgaattaataagtgaagtatggtgcaatttttataaaatttaaaacgtaaaatactaaatactatagatacatgtgtatatagtaaaaaaaaaaatattgtgacatgcatgaggattatcaacaccaacttcaggaagtgattgtctgttcctaggcagggaaagaaggggatgagatcagagagagctacaaaggaggctcaactgtatctgtaatatttaaatttcttaaaaatatgtgacacaaacatggcaatacgttaagaattgacaaaaaaaagtggtgggcacacagatatttttaagattattctctatatttttatatgcttgaaatggttcctttaaaaatattatatccctgctgggcactgtggctcatgcctgtaatgccagcactttgagagaatcgcctgagcccaggagtttgagatcaacctgggcaacatggcaagacaccatctctacaaatattttacaatatattaaataaatagaaataaaaattaaaatattctacccagagcaaatatcttacaccaccagccaccacccctgccaacatcaccatcaagcagaagctgccttcattcccatgaatattcacagccatatgtgcacaactcttctgaatgacaacttacttcacttctcccagctccctactggactgcaagatctctgatattgaattttactcatctttgcatccctcacatgatctttcatggtatcttgctataaaatgtattttcattaaatactgaattgggtagaacaaaaatgttaatttgggaaagagcagacagaacgggctacgtaatctgtggggcccagtgcaaaatgaaaatgtggtcaccttgttaaaaaaattagactttcaagaaggcagtaacagagcattaaatcaaatgcagagccctatgagtgtagaatcctgtgcaactaaacaggccacatacccttgaagccggctgacaacaggctttgaattcacaattcacaaagtatctgaatgatttataaggatggaatgtagggaggccgctagctatgcatccaaatccattcttttctttttctacagtaacagagtaataagttggtgggtggtcgcccaggtaagagctacatttctcaagctcatagtaaggtgtggccttgtcactaagttttctccagcagaacagagtagaaaggatgtgtccaaagtccaagaagcattgc

SEQ ID NO: 2 - DNA, 152312 bp, Homo sapiens
gcaatgcttcttggactttggacacatcctttctactctgttctgctggagaaaacttagtgacaaggccacaccttactatgagcttgagaaatgtagctcttacctgggcgaccacccaccaacttattactctgttactgtagaaaaagaaaagaatggatttggatgcatagctagcggcctccctacattccatccttataaatcattcagatactttgtgaattgtgaattcaaagcctgttgtcagccggcttcaagggtatgtggcctgtttagttgcacaggattctacactcatagggctctgcatttgatttaatgctctgttactgccttcttgaaagtctaatttttttaacaaggtgaccacattttcattttgcactgggccccacagattacgtagcccgttctgtctgctctttcccaaattaacatttttgttctacccaattcagtatttaatgaaaatacattttatagcaagataccatgaaagatcatgtgagggatgcaaagatgagtaaaattcaatatcagagatcttgcagtccagtagggagctgggagaagtgaagtaagttgtcattcagaagagttgtgcacatatggctgtgaatattcatgggaatgaaggcagcttctgcttgatggtgatgttggcaggggtggtggctggtggtgtaagatatttgctctgggtagaatattttaatttttatttctatttatttaatatattgtaaaatatttgtagagatggtgtcttgccatgttgcccaggttgatctcaaactcctgggctcaggcgattctctcaaagtgctggcattacaggcatgagccacagtgcccagcagggatataatatttttaaaggaaccatttcaagcatataaaaatatagagaataatcttaaaaatatctgtgtgcccaccacttttttttgtcaattcttaacgtattgccatgtttgtgtcacatatttttaagaaatttaaatattacagatacagttgagcctcctttgtagctctctctgatctcatccccttctttccctgcctaggaacagacaatcacttcctgaagttggtgttgataatcctcatgcatgtcacaatatttttttttttactatatacacatgtatctatagtatttagtattttacgttttaaattttataaaaattgcaccatacttcacttattaattcagcaaataccttattgtttaaataatttcaacttttattttacatttaaaaagtatatgtgcaggtttattacatgggtgtattgtgtgatgctgaggcttagggtatcattggtcacatcacccaggtggtgagcatagtatccaatagttagtttttcaaccctttcccccttccctccctgccccctctagtagtcctcagtgtctattattattatgccatctttaggtccatgagtacccaatgtttagctcccacttataaatgagaacatgtggttttggttttcttttgctttttaattttcttaagatattggcctccagctgcattcatgttgctgccgaggacataattttgttcttttttatggcttcatagtattccatgatatatatatatatatatatatatatatatatatataatctcacattttcttctttatccagtctactgttgatgggcatctaggttgattccatgtctttgctattataaatagtgctgcagtgaacatatgtgtgcatgtgtctttttggtacaatgacttattttcttttgagaaataaatcattctggatgatttattgggactgctgggtcaaatggtagttctaagttctttgtgaaatccacagttgctgaactaacttacattcccaccaacggtgtataagtgtttccttttttccagtctcacagcatttattgttttttgactttgtaatgatagccattccgactggtgcgagatggtatctacttgtgattttgatttgcatttctctgatgattagtgatattgaacgttctttcacgtgtttgttggctgcttgtatgtcttcttttgagaagtgtctgttcatgtcttttgctcacttttcaatgggattgttttttgcttgttgaattaagttccttataagttctgtgtattacacttttgtcagacgcatagtttgtgaattttttctcccattctgtaggttgtctgtttactctgttggcaatttcttttgctgtatagaagttctttaatttaattagatctcacttgccaatttttgtttttgatgcaattgcttttgaggacttagttataagttatttcccagacgaagtccagaatggtgtttcccaggtaggaagtactttattaactactatagccaagtattgttttaggcattggagatacagccataaaaaataaatgaaaatttattctctgtattccagaggggcagagagacaataagcaagataaataaataaaaacgtggtatgtgacaaagtgacaactactaacaatataagaaaaagcagagaagggaatatgacatgaggatggctgtagaggaaatcaaaattttccttagagtggccatggaagatcttgctgccattatatatttttactaacattatattttgagacttacccatttctagttcattttcattactacataacatccattgcatgaacaggtcatactttatttactcattttctcttgattagcattcagattgtttttaatattttgcttttataaacgaggctgcaaggaacacacctgagcatctcctcctgtgcacatgtccagtttctctaagacagagtagacctagaagaaaggtttgagccagtggacatgcacatctttaacttaactagatgttgtcaaaggctgtccaaactggtcctatccatggacattctgcagtaaatggttatcatagcagacccgaagctgctgtttttagaagggcctgcttgcaaggctagcccttagctggcatctgggaacttgggtttctggagtgttcctattgttctttaatgaataagcatggcttactgtgcctagactgtgcaaacaatgtggttcatgctgagcccttcctttcctcctgggagactggaattttgaaacatgctagttaaagtgtgcttatgtgacacaataaaaaccttgggtaccaactctctaatgggcttctctgggcagaagcatcacatacctgttgctgcattttcaccactgggaaatgaatgtactccatgtgatccctcatgggagggggaaagcatacaggagcctatgcatggatcccaccagatcctttccatgttttcttcctgtatgatccagctgtgtattcttactccattgctgtaatacatcttagacatgagtacaattatatgctgaatcttctaagtcttcttctaatcttcacacatgtccactagtagggagagttcccaattcatgatgatgacagatttggtagcattcatctttctgatttttgccaacctaataggtgtgaaatagtatcccgttgttatttggatttttatttccttgattactagtgaggctgtgcatcttttcacatgcttagtgactatctgagtttccccttctgtgaagtgtctatttgtattctttgctcatttgtctttttggttatttgtcttttttacatctatcaaaatactaattctttgttcattatgtacactgaaaataatttcttcctgtctgcagtctgtctttattttttagagtgtgttttgttttgtgtatgtttttcattttaatgtgctcaaattgatgaatcttttcccctacggagtgtgcgcgtgtgtgtgtgtgcgtctgtgtatgtgtgtgcgcacatgcgcatgttttgttatgtgtctttggagaggctgtatggagtagtgagtaagaatataagctctggagccagaccatgtgggtttaaatcccagccccacggcttactgtgcagtttcggtcaagtttacctctttgggtttccatccatttatctgtcgaatggagataattacagttcctgcttattaggtagttgtaaggattatgtaattaaatatataaagtgcttaaaacagtccctggcacatagttgactcattagtgccatgagtccctggcactcattaagtgttagcaaccaacattattaagaaaacttttcttaacacaatgaaaacagtatcttatgttttcttctaaggattttccactttggtttttcaaaagtggtcttgggtactcttcttttccctcttctgtttcctttctttctgagtaaatcattctttttttttttttttttttttttgatacggagtctcgctctgttgcccaggctagagtgcagtgccctgatcttggctcactgcaagctccacctcctgggttcacgccattctcctgcctcagcctcccaagtagctggggctacaggtgcccgccaccacacctggctaattttttgtatttttagtagagacggggtttcactgtgttagccaggatggtcttgatctcctgaccttgtgatccacccgcctaggcctcccaaagtgctgggattacaggcgtgagcctccatgcccggccgagtaaatcattcttaaggctcttaggtgttagggagccgggtaggtgcccaggtagggctgaggggagcctcaggggctgtgagcaggtgtaagagcccaggcgaggcaaggagggcgtctgtgtaggaaggtggcctggtgtggaaaccagaccccaggcagggtgaggagggtatctatgtgctggagtggcccagggtggggagtcagagcctgagcagggggggaagtgtgggtgtcagaaccccggtagtgtcaggtgagattcttgttggggaaggtaggcaggaggacaatggtggagatgggagatgtgttatatccagagggatcgatcatataagtaaatgtgtgtataaatatcttaaagatattgggagccaatttttaagggaagggagctgaaaatgtggaaagaaaaaaatgaaagtaaatgctgtgatgtattggaattggaggtatcagcataacctcacgattgttgatgtatacattaatatatagagaaataaatatagatatgactgtatatatatctattctctatctatacatatgtacatacatacatacatacatattctctaattgtccactaagagagcctagatgttggcttctgaatagtattttccctaaaaagaaccagggcccttggggaaatgggtgattccagattgggaaatggcaagataaacctggaatatcttgttgtgccagaaagcaggtaagtgctcaaagaatgatgtgaaacacatcaaaaggacacaagagccatttgatggatttctactagctaaataagagacaaattggacattaagttaaatagtaaagaattaaacccattgaataaaataggaagccatgaattcataaatacgtataaataaataaaattcttgttaattacaaaggaaaagagaatcatcttatggaagcctgcagacacctccgtaatcaagtgattaaagtgaacatcattagtaatgggtcaaattgaaattgcacgccatctaataggatgcaatgaaatgaaagaacacagtatcgcttctgagatattcctgccaaagatacataacataaatctcattatgaggaaacatcaaacatgcccacattgaagaacactaaaaaataactgacctgtcatcgttaaaagactgaggagctgttccaaactaaaggagatcaaaaagacctgtcaactcaatgcaacatgtgattctgaactggatccttttgctataaaggaggaggttattgggataattgttgagacttgaatggggtctgaggattagatggtagtgatgttaatttactgctgttggtggttgtattgtgatcatgcaggagaatgcacttgtttgtaggaaatatacaaactatacaaactatgaggcttcaggttggcagttttttgtcaaatgattgaagagaaaattctattatacttgcaactttcttgtaaatttgtgattgtttcacaatttaaaaattattacataaaaatgacttcttattttttaaaaagaatactttaatccacttggagtttatctttgtgtatgctgtgagatagaactaacttaattttttaaatactttcatgtagataactagttgttaacactgaatacaaatttgaaaagtgatattctagggaggggggagagaataattaaagacaaggacaggaaaatgagggttgaatttaggggttttgtttggctagactgtagctcatatgtggactggcaaggggtcaatctggaagggtaagttggggccaaatcataaaaggcctttaatgtcaaagtgaggattttgcacttaactctgcagtttataggaaccattgagaacttaagtgaatgatccttttgggaagacttccctactcctcccacttcctgctagttgagtgtgcttcttttgggctcctataattcattcattcatgttttctcaatctctctctcctcctctttccttctccttctcccatcccctctccctccctttccctactaaattgacctcatctatttctgagacaacttcccaaccagagtggtgttggggacttttattgtatgtggcagttagcacagtgcctggctaatagtaagtgttcaatcgtggttaccaaacagacctcaggaaatgaattttaagaagcagagtagtatcagtggatgtgggagaggcgaggccaggccaggcttggagctggaacatcacccaggcaggaagtaataaaggcctctatcagagaaaggacagtgataaaagaaaggcaaaaggggtatttgggaatgaccttgtggtgttggaagctgtattttggcaagtggtagaatacagggggtgaagaaggtggaagagaaggaatctgagggttttttttaagtctcttaggacaggagaagagtcatgcctacaattgaaacaggaaaattaatcagttcaggatctcagaaagtgaggacaattaaaataacaaaaagtgtaacattaccttataattgcttaccatcctgtagttttcaaagttcatcatctacacctttatagtgataaataccattgaacactccaaaatagggaatcctctccaaagtggggactacgaatacattgggacttcctggctcttccctgacatttttgcccaagagcccacattttaaaagtgatcaacctactgaccttgctattttgtttctatagagctccctagacatttagctgagggaacaattatgaatgtttggagttgagccctcaggctcctgctggtttaggtgggacttgatgctgtacctataagacatcttgttacatgaagtggggctgatgggggaagcaggtaaaaacccaggcttattacaccttcctgcaggctggctgctgtcagctgttgatttagttcaacgaagatctaaaatcacagtttctgagcttaaaattgtccccattctctgaccttcaacttatctttcaacatctgctgtcccagctaaactggagttacttgcagttcctactataaaacagaaaatggaacaagtggcaatgggtgtgggggggggggggtccttaaaaggcacctgaagctgtgtctgatgtcccttaacattaatctgtttacttgctagaacaggggtgggcacagtatggcttgtgagccaaacccagctttgcccattccttacatgttgtctatagctgcttccgtgaaccacagccaagttgagtagttgcaaccagaggctgtatgacttgcaaagtctgaaatagtcactgtccagccctttacagaaaaaaaaaatgtgctgactgatgcattaggatgttaacaccgtgaaagcagaggctgtgtcttgttctctgctttgtccccagaatatggagtagtggatgcttttttaccttcttctgcaatgtttcctctctcctctcctttcccccttcctcttttgctttttggcaactgttagaggatgaatgtggcaatcagtattgttcaggaccaaagaggctgcctagctctgctggaaaacaagaattgcaccagggctaggctgtgtgcctggaatgccgtctgaccaggtgctgtgcagtgtcttatggatgaaatgtgccccctgaaactcaccatgactcaagactgtgggatttggctacaataatctgtggtctcttatgaaatgtactaaagtataaaaccaagaaggcttgggtctgggcaaagcatgtcttatgggatgtgcacatctgagcctggacatcaggcagctgctcaggaagctgagtgtgtgtcatggtgagctgcaggaagggccctgagtagagtgccttggggggtcctcatgccatttatgtctcaatacttaaagttacaaacgaagctaacaaactgctaaataaccaccttcataatgacctgggttcaaatgtcagcttcttggcatccttggagttccacactggcctgtggtggtgcacagcccactgccccatggctcgctccccttttcttctttcccctgttttcccaagtggcctcgtgtgccatggatggacactagcctgcacgatccgggaccagccttgactcagctcacacaggccctagaagtgagctttagatcatttggacagggaattgcagaggagttctgggtccagtgggcatgccccctgggacctgtggatgcttagccctgggagaatgcagccacttaaggaggacggcagtggagcggggctgcagggaaggctggatggcctgccaagccattgaatttttctggaatgtgcttttcattttctatgaaaacagtgcaaacaaaacaatcccacaaaggcttaatttgtgaatactgaggtattttccaactctacaagcctatggctttatgaatctgaaaattccagtacctatgctttccccaacttgatgatcgccttggacaaaatgtggagcaatccttccttgttgtcatcaggagtcatgaactgttaagctcggggcacctgctcaggcattgaaatgctgcattgaggaaaccaagccccaggtggccggagtccatgggctgagtccttctggtgcctgaaacagctaccccacaagggtgaggctgctgtatttctagaggaagagctcctcccttgccccatagtccccgcaggccggctggggcagaacttcctcctcactggccacagtgaaggtgcccaggatgtcacagagaccctgtgccccaagcccagagctttgccgatgggttctctgccccacttttctcttcctgtctcttcaggagagctagagtgggcttttcactcagcttgaaagagatttctctttttatcccagctattccaaaatcttgagctccccaaagaactggaaacttagaaattctggcagcacatcatatgcctgtagcttctcttgagtggccatgttttctgaactgactctctccatttcctcctccttttcctccatttcctcaataatttcccttattaacagactgaggcatctttcagtagagtcacacattctcaggagatctgggccaagcttccagcttcagccctcctcaaacccaagcaagctgtggctttgccacctcctccttgctttgtggctgtttgtttgtttgtttgtttgttttgacagagtctcactctgttgccaggctgcagtgcagtggcacgatctcagctcactgtgacctctgcctctcgggttcaagcaattctcctgcctcagcctcctgagtagctgggattacaggcacccaccaccacgcctggctaattttctttctttcttttttttttttttgtattttaatagagacgggctttcaccacattggccagctggtctcgaactcctgagctcaggcaatccgcccgcctcggcctcccaaagtgctaggattagacgtgagccaccacacccggcctgtggctgtttttaaagcacggcatcctcctgctccacttgccctttgctgctttttggaggcatcattttcttggacccacttcttttctgtctatttttcttgctgagttttcatagtttgctgggttttcagtttggtgggtattagttgaacattttctgtgtgccaggagctggaaaaaacaggatgaaaagacacagacctcaggtgtagtggagacaaaaggtaaactgagatttttccttaagggggtgtgcagattttacctgcatcgactcttcccagttcatgatgcctttccgaaaccctcacagccaaacagaatggctgctaaaccacctcccctacatagtctttttttagttttcttttcctaagcagccccgaagagtgtagtcttctttcctgtgatattgcagttgctaatttaaattatgaaaccagccagggtgcagcagtgtgatgcaagcagtgtgctgggctttcccaacctctatcctagccctagctaaaatggtcttacagttttggtccttggtaacttaaaagaaaaagtcaacaccagatgaagctgcggggttaccaaagtagttttatagtctctatgggcagttgtttgcctagcatctagaaggtgcaaagtggcaagccaggaggtgtgcaggacttaaagttgtgtagcccttgccctctgtctgcctctaaacaagcacagctgaaacaaaaattttagcaccttgtgctcactttctttctcatcctcttctcagcaacagttcctgggcctcagcatctctccccttttcctcttgcctcaccccgactctggagtctatcctcagtataatgaaagcatgtttacgacgaagcccatctctaggtcatggaggggagactgccctgacaaggaaacccacttgttctcctcatccacagtctctggaaatgtttggtttaaaattattattttctgaatcttgatgagcatttatgtgaactagatgtccatcttcattcctttttatttatttatttatttttagatggagtcttgctctgtcgccaggctggtgtgcagtggcacaatctcagctcactgcaacctctgcctcctgggttcaagcgattctcctgcctcagcctcctgagtagctgggactacaggcatgtgccaccatgctcagctaatttttcatagttttagtagacacggggtctcactgtgttagtcaggatggtcttgatcttctgatcttgtgatctgcccacctcaggctcccaaagtgctgggattacaggcgtgagctactgcgcccggccttcattcccttctaacaccactgcagaagatgcacatggtagcactgcagaaaaggcacagcagcatgagaatgaggtcctgacctcttcaaatggttacaaagtcctgtcgggtctcacgtccaaccaaggaccaactctcgcctgtgcatgcctctttgtctcctgtcctaattacacttgtgaggtaaacactcaaataagctgggcaaacagacacgaaacttaaagtcagtaatacccagctgacaatggataatgtttacaggcattactagttgggtgttttcttcaaactctacaaagacttgacatggaacattaagactagtccattcacttccaacctagtgttgcagaatcttgccagaacgagcagtcctgaggcagtaacactcacagaagtgcatgggactgacaaggagctatgcacccatctaaagaatgtctaaaactatactaggtggtgcacaccagggagactgtgaattaggatagtttgtgatgagtgcatttgcattttatttttccatgaaaatcacacacaacgcagacacacagacaaacatgcagaaaagcagatctgcttgaaatgagagcaatatggaggccaaagctgctagtgggatggcccggggtttctagttctggggtctggagaaggattttgtatttgtttggtttcaccatcaggtgttccaggtgagcaagtcagtttcggtttccttctgaaagacctctttctgaattcgctgcatgctcctcgtgtgtttgttttctgctgcagtggggtcatttacgctggccagtccatttggatgaccatatgggcacaggctcctgcgcctccagctgcccagagttcctttctggctgcaggaacgagcggtgtgaaagatcagtcctgtggaaggagatcacatggactcgcgtcatcttggttttctgagatgctgtactacttttagatttcaaaagctaaacagttgtcaatcaatttctgaagggcactcagctgagggcactgtgattctgtcagatcacccaggttatgggccatctttctctccttctctatgaaatctatgaatcaggtctccctggtactaagatccaggcatttgttacaaagacacacatacgagatgtgtgcatacatgcttacatcctggggggaagctacacccatggtgctgtttccaagggctcttacagggtcttttggggcttttttagcttaagaaagttaccattatcttaaaagccaagaaatcctaatttaggtcagccctgaggtatagaattcccttgaccacttcctgtaggggtggctctgggaagcatgaaagtgtgactgggggaggggagagatgagagctggagtgcaggatattaggctccagatcaaagcttgggctttgattaataaagatgtccatgttccttgagaagcggacaccaaggtgacctttttaactggagagatactgtctccagttataaagtgtgggttgaattcctgaaccaatgcccgctgtggagctggggtagtgtgggcgaggaggggactggacaaaggcctgaccagtctagacgaaatgtggtttatcccattatctgatttaaaatcacacatcctcttaagaggatgactaacacagttcttagggctgagaacaggatttgaggtggtgcgaggatccccatcaaggctgagggtacttcagaaacttctgaaactaacacaaagatacgagttatatgggggaactggaacagtgtaagaataaggattagaaattgatctgagttgttcctaatttgggaatgcacatgcgatggtcacataattattaacctatttaggatgtttctaagttgtctgatcatctgtcactacttaatctattaacaccttgaccctcactggttttaataacagagtataagattgcataagaccttatcccaaaacatgttttccaggatggagtcctttggagagtaaaaatgttcttggtaagcaaacgctgatttctagagaaatatctgtgtggtcctggctcacaatttggagttgtaaagccaatggccagatgaacctcctgaagttctcacatttgcttaggagcaagttgtaaattctctctaaaacttcttgagagaaattgcctttttcttgtttgaagaatactttaaaggaaattattttgaagtggtataatgtaaacaataatatacttactattatttcatgacagacatatacaatgctatatgaaagaatttttgcaaacctttgtaaagatagtatgttgtaaagtcagaattaggttttggatgaaaattatcagaaaaatatgccaataagtgtgttgcaggttttctaatctttgtgaacaaaaatgtaaaaaacacaatagaaaaatgatctcatccaataagggagaaaagtttggaattaactgctgtagatcacagaacatcagcacccctgatgttctgcctggcccagaggtgatgtggtgggattagtcctttaagagggaacatgccaggcaggggtggggagaccattggtaattctgggaaacaattttgctacccaattctatattctgagttacagagttataaaaaggatttgcaactgcaagtggtttttaaaaataattttcaactgatgtcaacagcaatcaccagatctataaatgggaatcagtggctggaagatctcagtaaaagcaaactttctgtaactaaaggagccttaggcatttctgggccctctggcaggtaaggggtgggaagacaaagtcagttttgccaagtagccattaggtctctgctggtcaagaggaagggaaaaaattcatcacaagcactgctttagacagcagtgtttcaatcattagctgtatttggtttttcttgcaatccagaaactgggcagaataaaaactttatggggaaataaggtttttgcatatccttgcttcttgatttgatttgatttactctccaggtaagtcagaagagagtggctaattcatccctctacaatcccaggcttaagccaaggcattgggatgctggtgcctcctccagtacttgctctagctctctccttcttgggtggtgtgctccttacatggggcactgtgccagggcaggaacctacaagcacctattccaagagttatcacaagccaggagacatacctcctattgcttctttctccatcttcttgtaatttttataaagaacaaagagccctcttcctacaacagatgctattccttgatctaaccaaatgtgtctgacactgaaatgatgtgccagttaagtcccttcccttgaaactcaaacacatgtccagacatagatgtcaagcacccaaaacattctaatattctctattaccttctctgctccttattccccaaatccaagcttttttgctgtaagcaaaaacatgggaaagttcttttcaaaaatgctctcccatgctatccagatggtttcctgattacaataggaacccctacaactactgaatgaaaagttcttcagcacagaacacacagtggcagggacttagcaaggatgtgatgaggatgtggtggggacttggtagggaccgtggtgtgggtggggctctctgtaggaggcatatctgagccttggagcaactcaagcccagtgaaccagctgggctctgagccaaggaactgcctcaagctgtggactgcataagcagcaggggtacctgggcttgtcgactggctccagcagctcgagggtgcagagggaggtcatgactttcagtctgctgtttagcaaaatttacaaacacctagaggtaagagaagagcgagattaggtagatatttccaggaaaacagcaccctacacccacctacccactttgctctctattttccacagttcacatacagccctgctggtatggcttgtgtcctacccgggggaggctggcccactcacagaagcctggccaccactgccctggtcagagctagcttcttagactagactcctgagtgatgccacaggagttcctgctggaggactcaagggacttgggcaccagacattggggtaatcaaggcaaggcagattctcagctagcagcatcctaataactaaaaaaaaaggtaattgatccctgttcagctcctcattgagtgtgcaggtggctcctgctcgtgcctccctctgcttaatgctgatgagaaggtgcaggtgagccagatcctcaggggttaaatggagacttccctgtttccactgctttactgaactgtctctaaagatgtttatttttaaaaaaacatatataaaaacacaaaacccagaaacaacccaaatgtctatcaatgaatgaatagatggatgaacaaaatgtagcacatatacgtacaaaggaatattattcggcctgaaaaaggaaggaaattctggcacatgatacaacacggatgaaccttgaggacattatgctaagtcctcgcataataagccagacacaaaaggacaaacactgtatgattccacttatatgaggtatctatagtagtcagagccttagagacagaaagtagaacagtagttgccaagggcgaggggggcagtaagtggtgagttagtgtttaatgggcacagattttcactgaagcaagatgaaagagttctatcggggatggtggtaacggttgcacaacaatgtaaatgtacttagtgccactgcactgtgcacttaaacatggttggcatggtcaattttatgttattatattttaccgcaataaaaaatgtgattacatttttaaaaaccacacatggaatgcacgtttatcaaaactcactaaactgtacatttaaaataggtgtttttgttttgttttgcttttttgagacaggggcttgctctgtcacccagactagagtgcagtggtatgaacacagctcattgcagccttgacctcctgggctccagcaatcttccttcctcaacctcccatgtagatgggaccacaggcatgcaccaccacgcctggctaattttctgattttttttttttttttctgtagagacaaagtctcactttgttacatgggcctgtcttaaactcctgggctcaagtgatcctcctgccttggcctcccaaagaacctgtgtttcatcgtatgttaattacacatcaataaagctgatttgaaggaaaaaccaccaccacaaacgagcaagaatgaaataacacaccatagcatcacagggaaggaaaatgtaaaaaaaagaatcaatgaagtttcctgatgactaaaaaatattgttagaaaacaatttctgatatatcagcttttaccccaataaacagagggcaagagtttgttaaaaatcgggaatgttatgcctccctcttatggcaattccaacccacactgggtgttctggaccagtctttgctcagctctcggtgccccagggccaacttgcctggtccagtgtggtctgtgtgactgagtactcctcgatgagcaggctgtccttgtgggagaggaggagctggaagatcctcgccagggaggaggaggagacctggaactggagcatgttgtagtgcctctccctctgcacactgcctgggaagttcccctggaagaactgctccacagggttcaggtcaggaagcaggtcgtccttcggggatttgatcttcattgtgacgatatagccatctccaaatctaggggatgcacacagtgcaggacaggcctctgttagtggttgggcctaaggtaatcccaaaataaggagtagactcatcagaaattttggggattaagctcagcttggtggctcacacctgaaatcccagcaatttgggaggtagaggtgggaggatcacttgagctcaggaatgtaagataagcctgggcaacaagaaagaccctgtctctacgaaaattagcagggcatggtggcacatgcctgtggtcccagctacttgggaggctgaggcgggaggatcacttgagcataggaggtcaaggctacagtgagccatgatcatgccactgcactccagcctgggtgacagagtgagaccctgtctcaaaaaaaccgaaaaacaagaaacaaacccaaacaagaacaacaaaaaaagaaatactggggattaaaggcccataccatagacctgtgtacatactgaaaactaggagagaaaaaccatggtagtccctggagaaatcatttgataccagtttttagagatcaaatgtctgcatggtaatgtgggataatcgtacttgctgaagtcaaaggtagttttatttattttattttatttattttattttattttattttattttattttattttattttatttgagacagtctcaccgttgcccaggctggagtacagtggcatgatcttggctcactgcaacctccgcctcctgggttcaagcaattctcctgcctcagtctcctgagaggctggaactacaggcacctgccaccacactcggctaatttttttttttttttttgtatttttagtagagacagggtttcactatgttggccaggctggtcttaaactcctgacctcaagtgatccgcccgccttggcctcccaaagtgctgggattacaggcatgagccaccacgcccagcctattttattttttgagacagagtcttgctgtttcacccaggctggagtgcagtggtgtgatctcgattcactgcaacctctgccttctgagttcaagcaattcttgtgcctcagtttcccgagtaggtgggattacaggtgcataccaccatgcccatctaatttttgtatttttagtagagacagggtttcaccgtgttggccaggctggtctcgaactcctgacctcaagtgatccacctgcctcagcttcccaaagtgataggattacaggtgtaagccactgcacctggccgtcaaaggtagttttagcccagtgtggggatcccaagactgcccataaagacacgtggaccagtgcatactgagtggtggtaagggctgatgggccaggtgggagcaaaggctcgggaaggcagcacttccctgaggaagcttcctgaaacaatggagctgctagggcttgggccattggtgctttctttctccttcagcaggatggctggttaccctctcttggatgagtgatggtccaccagagagtgtgtgcacggctagcgggtgtcagtaccctatgccctggtatcctgtgtcagtcataactgactccaaagcttcctccacagtctagggctgttctcctctgcagtaagatgcagaggagaaaggctgtttacctttcagctccagaaaactcaccatccctccacacagggaacactcccctctcaccccctctatcatggagatattaaggagctggagggaaaggaataggagacttccctttctccagcagttggacacaggaagttgctgacacaggtctggtgacctgacatgctgctatttctatagatatctatgcagtgtccaagttgtagttgctcaataaatcatgggtcaaacgtccacttgccacaagcagctaatctattagacctttctctcaattatttatctgctctgacacatatgaaaggatgacatcttctgtgtaacaccctcctgtgggtgcatcaggattatgcacctcagcatagataaggtgggttatgtgctgttcctcccaccaaccagcttagtgacttatattctgagctcttaataagtgtttgttaaataaatgagtaattgtaactctgctcttttctaggttataaagcatatcagaacgtgaatgagcacggcaatatgctgataatcttaaactgttagctttggcatgcaaactcttaataataaggaattatctacaatagtttacaatgtgtgggtacaggataaggataatcctattcaagattactgccattgttggtttgtcatataacatatggtcttttttcaaactcaaaagcatacaatattctaaaaacaaagatgggtcctcaagtcagttggtctcctaaccattcctacattggagtggactcttagtaaataggccacaggtcccggatctgttgagataagtggtgaaatattgaggcagtggtagcagccctccctcatcccagccaggctctgcatgcatcctgatcagatgccccatccagagacttgggcgagtcttcgaccacaggaaattaggccaatatagaggagtttcttatcagcatgatggccttctccatctgctgctggagaatgaggcccagccaccacctgcctctgccccaggggatgacggagcagcaggactcttccaagtgtcaatggagaacacaggatccaggtggatccacagaaggcaacaaggggcacgccccaccatctgcttacttggacttgagatgctgaatggtgcccatacatcgaaaggcgccctttaccatgatggccagccgggtacacagtgcctcacattcttccatgctgtggggcaggagagaggaggtgagcaggagaggattcccacccaccttccccagccctgggaatctcttgcctgtgggatgtgaggaccacagccctcccttctctgatgatgctcacgatgacgttccacagcatgcggcgtgcctgggggtccatccctgtggtgggctcatcctggggggtggagagaaggttgggggcacaggctgggagctggcccttctgattactgcttccccctgggctggctcccctgtggaggatgagctgacagaaggcgcacacagtcactcccctcacttgagcaagacaggggtaccctggtgtagggtagggaaggcaggaggtggatccaagagtaaagaagcgtggcgtccatcctgggcccatttcagcccacgaggggattaaagtggattaaggcaatgacagaattctcctcaaaaaaagaaaatcctgcaaatacatttgtcagaaggcagggaggtcactcaggtcacttccttggttcccgctatgtcctgtgccctcatgatccttgggctgcgtgggcatggcctcaggcctggcctggctcagctcaggagcctttgacccagctcagtgctcctgtatggggaccagacaccgacaggccgcagagtgggctgaacttcccggctgtgagccgatggccccacaggagacatcctgggaacgcaggatgtgcgcagtcccaagtcaaggctgtgccgtgacttgtttttctccggagctgtgtgaaccaaacactgggctgatcgctcaaaatgagcaacacaggaaacagtccagactaaagccaaactgctgcagtttctaaatctgccgacccagaacctatttccccaacccaagagacccagcacttggtttaagcccttggtgcggcccaagcccgcagttaccagcagcaccagcggtgggcagccaatgagtgcgatggctgtggagagtttccgcttgttgcccccactgtacgtgccagccaggcagtcggcgtagacagtcaggcccaggctcttaatactccagtttgcaacctagggaagagaaagaaatgccatttggagaagacaagcaaacaccccaaacctcccccagttcaaagccttgggctcccagatctcacgcctccagaatgaaatccccagctaggctgaaacaggctcctgctggctcctgtcctctggcatgtgcttcaggcgccagacaggggctctttctctctgtgtcttggatcccagggtggcccagcctgctcagcatctgttgggtgtagccgcctgggaaatggacttcagccttacaaagagcaagacagtgggtctcgcccagcgtcctggaccatggctagcagtggaggaggaaggctctgtttgagaagatggtgagtcccagacctgttgatcccacccgtcaagagggttacacccaaagccttgtgcatccgacacatacctatggagcactgaccatacgccaggcactgaaccaggcactggagaacaatgtgaacacagccattgctgctatcctcagactgcggggaggtggcagtcaaaataaacagaatactggcagatcgtgacagtgctgtgagggaacgatgacagagacaccaggtgtgtgtgcacatgcgcaggaggggatctagggaagccactggagacaagctcaccatgcttctgccttctatactagtcccccgtgcctggaatgttcctccctaggtgtgcacgtggctccttctctcacctctagttcttcattcaggttctctcctctgcaggctctccctgggccaccctacctcaaaatgcaaaccctgccccagcagttcctccctgcgttacttttccctgaggacttttcactctctaatgtactggatattttacctatttatctacagatcgtctatccctcccactagaatgtaatctccatttttaactttttatttggaaatagtttcaaactcacacaaacatataggaataaaaatagttcatagaattattaactaataaaacccttctctctctcacacacaattttttgtgacccatttgagggtaaattactcatcacagcccttcactcctaaatacttcagggcatatttcctaagaatagagatcttctcttacataaccacagtacattatcaatgtcagtaaacttaatgttatgatacatttacctaatctactgttcatagttcagttttgtcagttggtccaataatatccttctatcattttttttctcttctgcacaagatgtagtctattgtctgctattcagtcattatgcctgtttagcctcctgcgatcagagatatttccatagctctttctttgtcttttatgactcttatgtttttgaagaatacagtctcctttttttttttttaaggaatattccttctttggagcttgtcagatgtttcctcatgataagattcaggttacatatctccaatctggattctacataagtgaaattgtgtccttcacagggtatcacatctcggggcatgagatgtccatctgccccttatggttaattttgatcacccagttaaggtgctgtctaatttctccattgtaaaattattatgtttctcccatgtaaccaataagcaatctgtacagagttacttttatttctttaaaattatattattattattttaagagacagagtcttgctctgtttcccaggctggagagcagtggcttgatcacagctcactgcagcctcaacctcctgggctcaagcattcctcccacctcagccacctgagtagctgggactataggcgtgcaccaccaggcccagctaatttgtttgctaattttttgtagagacagggtctccctatgttgcacaggctaatctggaactcctgggctcaagcgatcttcctaccttggcctcccaaagtgctgcgattacaggtgtgagccaccatgcccagccccttattttttttttaaaagcacttccttactttctggcataagatattccaggttcattttatacctatgccattccagccctggaacttatcatttattggaggaatcagggttacttttagtggggaatgttattaagacaaaagcctgagtgctaagtgtgctcatggctactggggtgtttttgcttcttgagcctttcggaagacagatacacacatgcaaatatatgtctatatatacatgcctatgtgcatgaaacatgaacacatctgcatgcacccacaaacacaagcatataaatattcctgaattcccagtgctacctccggttcctatccatgacctcacagttctttcttgcttttcccttttccatatttgtaagtcccttcttccacggtgagaattctgggtcccaataacatcaaaacatttattaatttatttaatcctgtaacacatctaaaattttcagaatcactttgcctataccactataaaaaacaaactaaaaagaactcagaaattatttgtagttcttctcccccgctccaccctgcccaagaatgaggatatagagtcaaacactgtgttcagcagttgtttgtgttagctctatcccccttttgcaagattatgatatttatttgaaataaaattgggttactttatttagtttgctgtcagtgttaggttttctttttgttttcatttttgcctacttcccattcttactgattttttttgaatatgtggaacattaacatgcttccaaaaattaaaactatacaaaaatatatccccagaagtactgtttcctcccatttttctttcttcccattttcttcttgttgatcaccaaattcattgttttctggtttatcctttctacgttctatttgcaaaggtaagcagacatacgtttactttcttgtttttccttctttcttacatacaaagtagcgttctctatgttctgttttccactttgctttttatcatttaacagtatttactggaaatatctccatatcagtttactgagacttttcttcttcttttttatagttgcgtaagactttattgtgtgtctgtaccataaattattcagccaatctacaatgactaaacatttaggtaacttccagcattttgcaattacaaatgcaatggatcaccttatacatattcattttgcactgtgggagatgcatcttcaggataaactcttagacgtgtgattgctgagtcagaggataaatgcatacaacattttgttagatatgagagtggggatttttttttgtctgtcttgttcactgctatactcctggtttctagaacagtacttggcacacagtagacacatagtaaacatttgttggaatgaatgaatgaatagcacgcttcagtttctcatctccaagagaatgcactctcatgaaacaggcttgtaattaaccagactcctatgtggccacaacaaaacatttttcaccttttcgatttcttctgctggtacacctcgaagccgggcataaaggtaaagatgttctcgtcctgtgagcagctcatcaattgcatcaaactgaggacagtagcccatattttgatggacttcagaaatattggttaaaatactgcaagaaaaaaagcaattactgagtatccttcaaggagtggagggatgaccatagagctagggctggagaagcttctgccaacgggaaaaggaagctgcttcttctcttctcctatttggcttcagaaatgcatgggatatttgggaatcaaaacaggggcccttcggttagaaactgaatcctgtcagattcttccatgtttccatgtctaggattaattgaatccctgttacgccaaaagtcagctttcattttggatcagatcacctcacatgtgagtttaaaaacagagggaagatcaggtttaagaaaatgattcatgatttatcaataattttcagacatttgggaagtaactagaaaagatgcatgtgtcccgatggaagtaaacttctctatctgtatttattggcaaagatagcaatgaaagaggagccagtcagataactacccacagcgagaggcctgcagggagcaggggtagagtgagttgggttccaccaactccctttggctaatatattcacccccactaaaaaatatattgccaagatggaaaataaactatacatagacatttagtctaatctcatccttttcttcttatagcttagggtctatgaataaaggatggatgatataggatggtacagagagaccattacagttccccacaatgacaaaagccaccaaaggcatggctgggccaattaaaactactcagggaagcaagtagggtacgtttccaaattagtgggagctaccctaccatataatcccaattctgtgtcttaagcctatagtttctttctagcgtccagctcagttttaccttctggatgtcagactgtgcctcacttggacacagttgtaacttgatgtctcataaatgtgctcatggaaaattctatgatatctttcccctgccatggtatgatatctctaccctgccatgactccttttgtcaccatgaggaagtcacctgcgtggtcacttgcaggtgaagctggatctgttgagatggactcagccatgacctggcttcacccctgcctgtcccttttctgtaaacccagtagggctggctatggaggccaaagaatcaaattcatcctgtctgagccagtgaagcgtgctcaggactcgtcctgcccactgggcattgggccatgctgaggatggctttcaggagagaggaagaggccccagtcaagcagatgctggacagatgtcagcagcacctaactccacttataaaccagggcagaggcttcctctgggcacctctattgtgtgtgctgaagttttactgttcaagcttttcctgcagccaggaaagaggcagatgagtgagagctcatcctctctgtcctgcccataggggaccagtctgtttaaacacattttattacagagagcagcagtcaccctccagaatccaagggcacacgccagttttccctctatgctccttggtctggcaaagccaaatatcagcctacaaatagccaatgcaggttaggctaccccaaaggcccatgcatgagcccctatctagaaactcaacccagaggaaggattcttcattcatcacaggggttcttaacctgggattcaagagctcctgcaggatcataaatgtgacctggggctcagtaaactccctgaaacgttttgtaaaaatgtgtggagggaggtaatgggaagcaatggtgcatttttataggaataggctacaaatattcatcagatgcttaaaaggttccgtgacctctaagagattaagaaccacacacttagtgcttcccaggtctttccaagaatccatcccaacagaggaatctcttaactatcacaattcagttcacttttccattgggtctatgtgttgggctttttgggccatgctctctgggaggcctccttctctgtacagatctttcagggcctcagagccaccctactatagggtctgatgatcacccttcctattcttctcacaggacctgtgagagactccctgagacaggaggagcaggatactcacctcttgcctgctacggtggcatcccctgaggtcactgtggtgtccccagtgagcatcttgaatgtggttgttttgccggcaccattcactcccaggaggccaaagcactaggagaaaacacagagctagcctggccctagagatcaagaaggtctaaaatgtcaggccccagggtaagtgtgtgtgtgagctgggggaggaattttagacctgggctgccatcagaggccacgagccatatgtggctactaagcacttgaaacacatctaagtcccagttgacacgggccctgagtgtaaagattcaaagacttaaaaacaacgagaaattgtcaaatatttcattaataaggttttctattaattacattttgaaataatattttggttatattgagtaaaataaaaaatactaatgaaattaattttacctattttctttttacttttctcatgtggctagtggaagatttaaaattacatatgtgacttgcattatggcattatgttcctattgaatagctctgccttatggggaggagaggcaggcacaagagctgatgttcggaagcctttcacacgtggtctgcagagtacccacctctccagggcgaactccgacacacagcctgtccactgctgggctggaggtgcctggataaatctgcaagatacgaagaaaccggactgagaactgagacagggtgagagcaaggaggggaagagggaacaaagagcaaaggatggtttaggagaaaactaccagcactaggaggttacatattgacatgggcaggcacagaggtgtggtgagtactgagacatctcgaggctgacccatgctctgcagaaacagaacacagaaaagggaatgatgctcagctggagtgattctcactgaggccctgtgtcagtgcccgagatgaatagcagggaacacacattggaattagatgctcttggaagacgagttataacacagggatgatgaccctacataaaactgggaaccaaattgcttgcataagcatatcaattgttctatagaaggaaaatggcaacatcatgccaactgtggatctaaccagcacctccaaactcatacccattcccttaccttggttagttcatgtagccttaagatgtcagttttatttccaccagtaataattctttgtctttcttcagccacatcatcatcttcatcaacaatgggctccttagtgggctcggcaatcctagatgaagaaaaggggtcaggattgggctggctgtacagtgtccttggcactgtcctttccatgggacctctcttccacttccttgcttctgcttccttctgggcttccatcctttaagacttaaattctaaaaagggctcccagcaggagaggcattaggcattaggtagagaggtcaggtgctcatgtccagagtcagccttgggttccagtcctggcctcctcatgtgtgatcttgggcattggacctctctgaaccttgcctacttcaaccatgtgatgaggaggagggtaacaatacctgtctcataggattgtgctgaagatgaactcagcacagtgcctggcacagagtaaagactcagggcctgggatcaccgtcaggactaaaatgcttcctctacagcaagcactcagtaaggggtagttactaacctccgagcctcccacttcctccagtctgccctgccaactccacctttccaaaacagagttgtcatcaggccacctcatgcctcaaaaccttctgttgttccccatcagctgtaggttgaagccctccctctgcagctgtagttacagccctgcaatccagccccacctacccttctcacttacctcttgcactaactcctctgtcagcaattggcatctccccctggttcccagtcctattggtcattcccgtctcccagcctccgcatgtgtttccagtccctcaatgttctcctcctcctgccccaccaaatggaatcttccccattcttaaagacacagcctcttctttgaaaccctccctgaccttctggaagccagggactatggtgtacttctctggtcctctttaggccctaaagcaggcaggactcattcaaatgtgttgacatcagagtttgaagctaatgagtcaatttgggtagtcaacctcctgacctgctctctcccacacaaaagcctctaaaaggtatggccaaggctgcagaaagggtctgcaggggctgagggtgccaaggacaacaattcctgacactgtctcccataactagaactgcttgtgtatcctgtttcatcaggcgtgtgttgacacctgtgatctcattcacctctcacagtcctgtgagtagaaaggcagattcatttccaataaatcaattccctgtggatcaaaacataaaaccaagtccttggaatctatttacaggtgaccacactcagcctgagaggaggaaaagttaagaaacaaaacactattggggaaagcttgctaggaagggctgctgcttggcaattcaggcccctgggtgaggacaataaaggtaggactggattgcagaggggagtgaggcaggggcccacccagcttcaggaagagcctgcggaagaatggcaattgccagctaacctggcatttgagaagccctggtcaaaagtcagggttggcagctacccaccttcctccaggagtggggggtcgtgatcactgcccgcacccctccacatggctcccatattactcccatgctcccaaatctctaattagcaaaggggcctgctgtgtcctttctctcataaatacattagtctatttcctagtactttggataccctgtaaccattgttatttgcaatactatcatctaatcaaaatacacatttggtaattaaatgagaaggattaaatatcagcaattgaaattaatagcactgcattttaaatattttaaagtggatgctcttcacatatttgaatgtgcctattttaacccgatcctctacttgtattattggagaaaagccaggctttgagaatgtagaaaaaacattgtggagtggggctcctgaggaaagaaatgaccatgtgggtataaggtccagttctggatgccctgagctgcccactggcccagggtgtggcatggacgtaccattgggagaggaagaagtggcgctggaccagcagggtcaggaggaagtacaccaccccttccaccaccatggcaaacaggttcttcccaatcaggtcccagtggaacggatttgcagagtgctcctcacctgggcatcaacaggaattgagtccacttcagccgccccagctcaccccacagacctggccacagcacagggcccactagaccaggccttatgtgggaactgagcaagagccaaacacccgcctcataagggctgccctccatccctcctgtggctccccagccatggaaacagaggcaccctaatcctctccagctggcaggacacctccagcccaacaaggtcccctcctagcaccagcccctgccacagtctgatgcaggagcccccccggtaaccctcccagctttggacccagggcccatgctccatgggcctcggctaccacccaccaaaccgggcatagacatctgtcacagcctggctcagtgcaaggtcaatgaggccccggcccaggcagaagtgggggaagacaatgagcagcttcctcagcacggcgttgaacctgagcagcgtctgaaacagagaagtaggactgttggaaacggggcaaaccccaccccccctctcttcagcaggtggggcccagatgctctcacaggacagcacagggcaaggcctgcagacagagagtccttgcagccagactggccactggagggatttgtccagcagagcatcatgggtttgcaatggaggtcatgaagtacttacaagcagtgcctcaaggccaggccaaggagctaatcaattaaatgaccaatcaaggactggggctccctgcaagtttctagtgggcgggagcttcccctttgtctagccaggcagcatcttctaaacatttactatgctcagtaccatgtgggcaccgaggctaactgtgaggaacctgcattactgtccttacccctcccctaggtgactctgggggtgacagcaggaatgtgcagagaagctgcagccctcctgctgtccacttagggagctctccctgcagactcactttgaaacaacaggagccctcaaggcatttgttaacaccaggccctgagccatctccagctctgcttttcagcccctcacagggcaactaccattgtctagggagaggagggttggagactctctctggggtctgtgttaagccagggacttgttttcaagtggtcggacttggcatgttgggcagagcctcccctgagaaaatagaagggacatcgaggcgtacgaggccagcatagctcctggctgggccactgctgtccattccatctggctcctcccagtcccacaacctcctccctctccagcctccacacctgcgcccacattacctcatccttccctgcctaccctttctccccactctttctggaatcactgtgctctttggcctctaggcctgggcatgtgcaggctgttacctattgctccaagcaggaaagaatgctcttttcccttctgctttcttaaagattcctgttcttctttagacagctggctcagagagtgccttcccttacaagccttccaagattcccatgagaaagtatccattcctctctcccagcacttatcacattcccatgattaattttttaaaaatctgcctactttctctactagtcagtgggcccctggagggtgggcactgagtcctaattatttttttgtccttcctaaatacctgcacaatgattagctcagagtaggcacttcattatttattaaatgggctaatagaaatctacaggctgaaattgaacttcctccaccacggctcccccagcccctgcagcctggctcttcccgctgcctctggcctgcagcatgttatctgcctcgctcctctgctgctctgtcacacgctgtattatggaggatcatacactgtggcttatatcgttgcaaacttcgtgggcaggtccttttccgactggaacgggagcctctggagggcaggacgagtgggccacgcttgtttatatcagcacacacccggcacgtggtgttcagctggtaaagacctcctgatctcacacgggccggcagctgctgggagctggggagcttcctgtgggatactgggggtttccatagcagctgtgtatcggataatttacatgaaaataccaggtttttgaaggcgggtgcttagcaaatgttggctaaatgggtgcagcctcagaggggaaaatgttctgagttgctttaagctggctatttaattattctgaaggaaaactgtcttaagacttagtgggctgtgagcctgtggcaaacacagctctgcaaagcagcactttcagtcacctgggtgctctggccatctgctggggctgtgttcttatccccccgcctttccagagtctgactctgacatgctgaatttcttatcattcatgggacagatgaggcttcgttacttgcctagcagccacgaaaccctaacaagatctggaaagagtcagtctcaggggtccacgggtctgggcggttcatggtggggcctccgcacagatttgtcctgtgttccccagtggggcccagaggcaggtggaggtgggtgtggcagggcagcagtgcagatgtgctggccggtcccaccctctgaactgggaagagctaatgaggagaggaaaggttgaggcgcctggggacacaggcacgtggtgaggcaaatgttccaaggacagccacagccaggactcagacacagcggtggggactgggagtgtggagtgtggagtaaagacagccctgcagcgactgccttctttttttccccctctttttatgattcagtttggccatctgtctctggacagggggaggtcaggtggaagggacaactgggcttggcagctcataaaagtgaggcattcagcatggagaacacccagtctcttcatcaagattaacttgcccaaggaatagtatatgtcagagtgttacaatttccataagaaagcgggagaaagaccgtatagggatctgctgatgtgtctccagagcacacaggaaactcaagtaagagtttgcctctggagaagagaactgcatgagtgggaaacaggggtaggaaggagattttttcattgtatgcctttttgttccttttagattttgaaattacccaaatgtattgatgtgtgtgtgtgtaaaacccaacacccaaagtccctgagaaaacctttctgaaagagtaagcaaagcttaaagtttattgcaagaatcaagttttgcttgcagaataaacacagaaaaccatttcattcagagcacagaaatgaaaaaggtgcttataggaaggaaagaaggaagaaagaaggaaggatggagggagggatggagggaggatgaaaggaaaaagggagagagggcagaaggaaagaggaagggaaggagggacgaaggaaggaaggaagcaatgaaaaaggaaggaaggagggacgggggaaggagggaggagggaggagaagaaggaaagaggaaggaaggatgggaggaaggaaggaaggaaaggaggcagggtcgggggtagggaggaagaaagtggcactcatccgcatacagctgctacatgtacgatgcttgcccctggctctgctcgaccaacacatactctactatcctactaatcaaacaaaaaagccaagaaagttatgctcacccggttattctcaaataattccaagatgaaggtaatagcactgctgttgatgccgatgaacagattagcacaagataaagccacataggctgtgctggggacatcaaacaggaaggatgctgggtacatcatgggaatgaccgcccatctgtgtgaaatgagacaactcagagtgatggagttccacattccattccacctacaatacgtctggatataatgcactccccttacacctgaggtgatgtgtgtgaactggccagagtcccaggggaccagagagatactccatttgttggtctctgtgcctcaactttaaatggagataatgatgcctgccttgaccacttcatggggttttgtgaggagcaaatgggctgctagctgtgtatatactctgtaaactacaaagccctgtacaattcataggagggttctccagcctgcaacacctcccactctagcctgggtcagcaaagcccagctgaggtcatctcagatgagcccagtgagctcatcttcacagcttatagtcaggttggttcccaaattctctatttccaagagaaagatgtggagaacaatgctttggcaaggctctactggcccacagaggaaggaccaggatcactattttcttttacagatgaggaaactgaggccgagatggatgaattactcattcaaatttacacacgtgggaaagaaagttgcatgctgggccctgtaactctgctgatgtaacccctgtgtcatcctctgtccctgactcaggaggagctttttggccggagtcttctactgtgggcggtaactcttggccagttcacatggggacactgaggtggacagattggccacagatgagtgagagtcagagctgggtgaggggttggggaatggctgcccccaggctttggtcaaggcctcagtttgagtaggagattcagatcatgtgggacttctctcattgtcactgacaggaccaggcctcagagatacctctgtcagtggagtcagaatcagaagccagacagatccctggttatcagcttcagaccctacctggggccggaagctaaacttgtgggtgctaccaccacaggacagcccaggttttctgtcaggagatgatcccccacccccaccaccaggcttctcttcagaggcattagctaatggcccaaacggcttacccatacagcaggagcagtgccacaagggcaggaaggttttctggagaagtgtaggctttcttctgaaacccgatgaagatgcccaccaccagcccagcactcacggaataattcatctcggaaagagaagaggagagcaagtcacttaacctctcagacctgctgccagctctgcaaaatgaggggtggggccaggctcctccagctcgtagggtctgggattctgattcgacttgctttttaaacagttcttggttggcaaacatatgttaagctgtcactagtcctcctaccccaccccatgccctacctccctgccaagggaacctttagtttgtatcttttgaaaggatcaattacaaaattctgcctggtctctcactctttctatttggtcataaagttttgttgattcttctttctaagcatgtcttcagaattcagaaaaacttaaagcctagttcttggcttcacaaagctcaaataaataatgataccctttttaaacaatttagtcctacagccactatactgggcacagaaaggggacggcaacagtggggttaggggaggagccatggtgatcaggagcagggcaagaaccagagacgggcttcctcagggggcaacctgccgtggggtgtggaggcctcaacgggatgagaaagatatccttacaggaggctgatctggtgcagggtatcagagccagagcagaacgaggaggacctgcatgcagcagaggcagctggagcagggagaggacggcatccacatggggaggggatggtggcagagttgggcactgttcaggtgtataggtccggtagataaatgagttgggagtgagagaagccagcgtctcactgttggagaagggagttacagatgtggaaagaaaaaaaactagaatgagccctgtggagttggttttggagagctcatagtgttcactgtataggtagatagagaactatagatagaggtgtgtgcatacctgtgtgtgtacatccatatcttccctagttctatcactgagaaggcctgggaccaatggtgctccagaggcaatgaacatatctagcactcagaccttggcttctgagggccacttcccactggcaggaaccagggcttcttggggagagggtaggaatggggataatggaaggatgagcctggaatatcttgctgtgccattgagcatggaggaggtccaggggcatgaggacccaagtcaagacgatacagaagccagcttcaacggccccccactgaccacagtggggataatgtgaatatcaaaataaataatgatagtcttggatcatagtccattgattaacacatgaaccatgactgcatacagagataaataaatggatgaataaatggaaaattgtataatgaataggatatttatatatctttgaagtgcctctacctgaaatttgtatttattataaaggggaaaagagtaattttacagtgaagaagctcagcagacaccttcttaagtgaccgaattgaacatcatcagtaacagagcaaattgaaatcagaagccacctgataggatgcagtgagaacacagcatctgtttgctgatactgctgccaagatgcacaccctcaacctgggcaagaggaaacctcagacaagctcagaccaagggacattctgcaaaataaccagcctgcagtcctcaaagtgtcaagaccatgagtgttaacaaaagactgtggaactcttccaggctgaacgagactaaagaaacagcacaatcaaatgtcatgcatgattctgagctagatccttttttctgaaagacatcactggggcaatgggcgaaagaggagtggggtgtgaggattaggtggtgatgacacatcagtgctggtttcctcatgttgacagtttgtgttgtggttgtatggggtgtatcctcgtttgtaggaagtatacatcggacgtgctgaggggtgtgagagagagagacaggaagagagaaataaatgagaaggggcatcttgctgagaagttactttcaaatgactaagaaaaaaaggtttcaactgtacttgtgacttttccataagtctgtaactgttgcaaaattttaaagtaaagaaaaatagatgacacatataagaatttaaaacatcatatatgtgctaagtgaattacataagcaataattgtttgttccttcattcaactttttttttgccactggctaatggtggtcctaagttccaaaatgatggatcgcggaggtgagattccaggccagctttaaaattctggagcatcagaaagcctgctaacatgatgcctaccatcttctaccccttcattggactgccagctagtatcacctcccacctcagatgtccactctatcctagctacatctctctccataggctcagagatccctgtaagcgcacacgcgcgtgcgtgcacacatacacacacacagaaacacgtgggccagccccaagtgtgtaaattctatttcttatcttttaaaaaaagtaaaattaaaagcctccgcacttttctaagtaacttttcggtaccggtgggcctagctccttttatattagcatcacagggccaatgtggtacctgcagttgatgctcttatccaaagaaaggctttcaggttctgacctcctccccgtgcatttatgagtgtttcctcgtgtagacagaagagagaggaaataatttagttgctactgataatctctggttttgtattgttaagtgatagctgcttactaagctgagtaagatagaaatcatatcttcaggaattccaatattcaccatcattttaaaaaaccatggatgagaaggtcatttgtgttggtctccatcagttggtatatcttatcatcacatgaaatggaggctcatgttggtcttaaaatgttgagattttactactcaagacacctagaataaattggggttgatgtcataatgatccctgttacattataactaggcctttactaccaattcctttgaccctgcagcctgtaatagggtacgctatcctgacccctccctacccccaccaaccttggttgtcaggaaggtggtagtgtgctattgatttaataaatattttttcttcatttttccctgtagcggtggttaatctaataagtgaaggtcttattattttggccactggctggggttgccagatttggcaaataaaaatctaggatgcctagtgaaatttgagtttcagataaacaaccaggttttttttttttttttttttttttttagtgtagatatgtcctgtgcaatatttgaagtagcatatgcttatactaaaaattattcatcatctgaaattaaatttaactgggtgtcctgtatttatctggtgaccctaccacagggaaagttttacctttacccttttgaaggtggggcaggatttgagaaggggacttggggtgaaagaccccttcatattaccttctcagcgccagactgatgccaggaaggccagactcatgcctgcggtgcagtgattatttgatgggtcagaagacccctcagtgcaggacatagagagcccccgttcaccagttgttaagctgcaccccacagcctttcctagcttcgggctcctagttctgtgcctttctgagaagatgtcaagggacagcagatacacaaggcccttggcccagtgcctttcagcagccctggcaccgtgagaacccctcccctcttggtctggtccttcagagcacacacaagctccaccttgggcccacggaggggagggaggcgctgtaaactgacacttacgatgtcccagaggaagttggtcacccagtaggtggtggggctcactccactgataaactggaggtgcttggatttgttcacccgctcctggatcaaataaaggacaaagctggctgggacgaaggacatggagaaaatcacgcagatggcaaccacagcatccactgaagtggtcagcctgcagcagggccagagacacagggagagggcgatgaagagggaagagcagaaggaggagaagatacaaagtcaggctttgggaaggccttacacccgcccaggtgtggcctccaggttcctcttctctaccttgaagctgtcactccactaaactgtcttaatccatatggaccaaggttaaatgggtatttgcgggttgcctttctatttcatgtgaatatttctagacaacctttctttttattatattctctaattatttttatggtgtatagaaatagatgtttatattaatcttatgtactgcaatgctctcattagctctaataatctgtctatagagtctcttgaattttctatgttgacagacatacggtctgtgagatttatcttttgttaataatcatcttgttaaatcacattttcaagaagtacatcgtaacacaaggaaatgttcatgatgtaaatttaagtgaaaagagggcaggcaagttgtacagggacttggctctatttattctttcctcggacaaatagaaggcatctggctgaggggtaagttggggctaaagccagcctgaactttatgtacaagccataacccctggcatgggacagtgtccacctgcagaaaagagcatttttactaatttccacaaaggtatcctatgtggtagtcactaccttgataaaactacagatcatatcatccatacacgtagtaagcttagaacaaatgactggaaggagacacacgaaagtgtggctgagtgagaattaacagaggacagtctagggccctagggtgtccagaggaagacaccaaggagccaaggcccaggttttagtggatgaccctgggcatgttcactggcactcagcgtgtgctaggatagtaaaatcaggaccccacaacgttgctgaagtttgcactaacaaaggtgctcctaccaacccctcctccatgtaggcctcaaatagagtgaacatactacaaaacgcacaaggccactgtctccactggctgaaactgtgcaagaagagcctcagcttgagggtagcaaagctctgtcgacatctccaaagtatgctcttctgaggaaattcctggaatctaagataattactccgagggagctgaaaggtttactgaactttgccagttcctggcagctgctttgcacatagcaaagataataattgtataagctccaggagcaacttgctatcaaaagccaaaagggaatggaaccaaatgtaaacttacttgccacataaatgttggggagaaagaatgaccaagaggtctggtatgtgaagtgtgaggcacttatttgaaagtcggatgttcatatgtgcctgactaaacagcattaccatccaaatcagcacttcgcggtggtgagaatcctctcaggatgttcaaagagtggagaaggtgacaagaaagtggtgaggctggggctgtggtggcttacactgtaatctctgagagctgctccttggtcaggttcaggggttggctaatgacggtgattccatactcctcggggctcctgtccttaggcaggctggcccgtaagatggcgttgtgggccacattgagaaagctgaccagggcatgccagcctttgttattaaaccacacctagagggtggagaggacatctgagacgctgcactaacagctagttaaagcagaaatcagtgaaggaaaggaaatttgagaagcaggaagggtttggtagctggaagacattccttgctagatttcagcaggaggagggatggaatttaatgaaggtaggaaagtaaaaataaaataaccagctcaggtaaatttttagctccagagcagattatacataggtcaagtaccttaatgttgtcttcagtttctagatgtttaaggaaatcaggtatttctttagaggcctctctagtgatagggccctaaaaaccatgtaaacaaacaaacaagacggttttaatttttttttcctgttatcactcatgagagtttctcattcatggtagttaagcaagtcaaaaatcctactcaaatctccagtctgtttacataccccgctcacattcatgatccggccaaggtcgcttaaaaacccaacaagtgcttcccccgtgatggggacgactgggagctttcctccaatggaaattcctccatacctgacaaggaaacaggaaatcctcagaccagggccacgaacttcacgcctactagtagctctctcgggttttgtagggaaacatgaactttcgggggaattgcctggaccagcgagcaacatggctccactttacaaaccagcttttaactcttttcccactgctgctgcctccaggaaggagtccaaaccctcatcctggcctctgaggcccttctgcatctggtctgtgcccctctccaacttcatccttcctcagcccttccctggagtggcctattctggacatatcgagtcacttccagagctcctcatggcccagactgcctgcatgtctctgcctttgcatggctgctagctcccctcggcacctttcccttttgggagcatcgagccaactccaggtcctctttcacatgtcacatgtcatctcctcccatcccagccaaggactccttttctgtgccacctctgtgctttgcaggtacttctagcagcacaggacccatcttcatcctgtcatccctacctctcggggcttctgtgcctcacacctgttcagggaggcccttagcctctcctgcctggacttgtgctctgcttcttcactggccctgggatctatctcctgtactgccctggaagtctgaagtgactgtgtggaaacaccagtctgagtgcatcactccctggcctcaaacccttcaaaggcagggcagaagccaaagtcaacagaacagaatgaattagctggttataccaagcagaggaggagctctttctcagggccttgaatcactgcctcactcctactctctgtctcagccgaggccccacaggtccctctggagagcaatcctgaaagccagatttcatgtgtacggtctagaatctgcccaggaaagcacatacatgtcagccccgcacctgttctggaggtgcagttcctgagggaggctgggaggcagcaggctcctagagtcccacttggtgaggttctaaacctctggaaatatttcaacctccaggatgcctcaggaatggggtgagtctggggctggcccacactccctgaagcttaaaaggaatgggccaaggagtgtcccgggtttaggctacaaggccctcttgttggagtattataaactgttatatacttggaggttttagaagctttttttgggtgagaatgctctgaaacgccacatcagggaatgccacccccacttatgtcctccaagaagaggcaccactgagtgtcttctgagtctgggatgtccctagccacatattcttcaggacgtgtcttgtgacttcctgagcacctacagaacagcccctcctcatggctgtgaggtgtgccttttaaaagtgtgcaattatttcaacaatgaatcaatctgagattttaattctgataaaaatagtttcttacctctgttcattgacccagaatttgctctttaagctgaaagccaaaataaaataatgcaatgaataccacaagtacagcagtgccgttaactttctttcccaaacattcattttgaagactgaagtctcagtcttcaggggcatttttgcattttccgatatccaagcaatgcggaagccgcccagccctgggacattgcctgaatacacatgcagagaaaggacctatgatttcccccactggctctccaaatcatatcccgcatgctggactttctgagtggtcctgttgtcaggtcatatgtcaggtcaatatgcctgatctggacccagaacacacggcaatgaccatgtcagtgtggaatgaaggctgcagccctcctgtcttccaccctgcaaaaatgagactctaacaaccacctgcacacctcgggggagttccgactcactccacagcccaaagttaaggcactgacattcagtcaatcaagggtaaaatgacaaaatgggaaatgaacagatgccaactctggaccccagagctcaatcccatgaactgtcattgtcatccacctttaagcacacacgcacaaaatccaaaatttcatactggagatttgctgctgagaactcagtttgggatggttgctgtttattgcattctatttattctgcttttattttggggcttggatggcattctttgttttgctaaatgctttcaccatttgcagtgtgttctagttaattaagtcaatttatccctcgttcagggctctggcaggtgaagcaacagaaagtcctactaaagttagacaggaggttttatcttaaagccccagagcctgtgcggactggaccacgcttccttaggatcctctctcctggcatggcatgcccctgtcaagctgcttgttctgatacgggctgccaaagctgttccatcctggatggggctgataagaacagctggagagccaagagaactagatatttcttgaaaagttcattggcatctcaaagggcagtgatcaaagatgataattcacagttagaatatgacagctgcagttgacctggctcgccctggcgtgtgctggactcagacactgtcccgctgcctctttcccaccctatctttttcctttctcttttttgccacttacttattttctctttttcttctaccttttcccctatactcctccacctccctccaaatttttactctctcttttaactagttaaaatatgtggctgcatttttgaataacttctatggtcttctgatataacttttaataatacgtgggttaaaatttaagactgcttgccctaaatgtaaaaacaaacaaacaaacaacaaaaaaagaattaatcttaagttacattttacttgtatgtgcctcaattgctttttatgttgaatggggccctcaaatcagataaaaaagaaaaaaatctactgccctgatcatacataaattgagagagaaaattatcttctgtccctagttaatatcttctacagggagccaggataaaaagcataaaaggatttcttcttacctgcttcttataagagcaggatacgtttttaccaagaagtcggagatgttcctgtccgtcaggtcttgtagaatttccgtgctgcgctgtgttctctgaggcaatgagacacccacgttaattaccttggaacttgaggacttataagtagtttgtgaaactgcttgttgtcttccaaaaattatttatggattgagctgctgagaaaatactaaataaagtactggcatctccctagttctcacttcaatgatgtgtaactcatctttgatgcctcttttttcgccaatccattgacaagacagaatggcgtcactccaaaacaaatctccaatccatctgcgtttctccagctccaatactgccacgctacccaagccaccacctagaccactagagaaacttccacatgggtctgcctgattctgtccttggtctgccaacttccgttttccacccagcagccagcttgaactataaaaatgtaaacccgagcacctcagtcaccttgcttacttatccactccaataaaccctgggatcaaatctcgactcactaccaaggcccatgtggccgatgtgtgtggccctgcccctctctgagctcacctgccacactcccctccctgtctctcggcgagcacctctctctcctggtgcagctttgtgcttggctgttcactctgcctgggaactctacctgtagaccctctcatggctcgcttcaaattttattcctcggagaaatgttcctggttccagtcactctgtattgtcatgtactgttgtgttatcttcatagctctcatttccatctgagagtttcctcccgatggatctgtttacgtatttgtatctgtaatcccccgtaggatatcattttggtgagagcagggactttgcctgatttgtgagctgttgtgtccccagcacccagaatagtgggtggcatacagatgacacagttgatttgtgacattaatgaaagaatttgaatagttccttacaatttacaaatcactttcaaaatacatctaggactggaagctagttcatcgaaatattttggaaaattcaaaggtgcatgggtttgtccaccaggtggcaatattactgcaaatctgggaacacattccgcttacattctcataaaagcattcactctgtcaagggtgctgcccagaagtagttgaggggattttggtggcattacaccgccgttattgcgcaccattctttccttttcatacactttctatctcctccccctgttttcccatttgactttcctcttctttaattcactcttttcaccttgtttctctctctcctgccaggaggagagctggcacctaccgaatgctccctgtgtgtcgggcactatgttaaatgccctacatacacgatctcacttcatcctgacactctttgaaagaagaatttttagcttaatttacagacagagaaactgaggttcagaacagttagctgacttgcactgactgggctgcaaacttgcaggtgggtggcccagggcctaggaactgaatctgcctctgtctcctccttgctcttttcactgagtcacctgcttctcaagctgaaagtggcactcagacaccggccaagctcccctggtggaatccaggttggaaaaattgctgctggctgcgatagcttatgataaattgttttataaaagttctgcccaataaaatatttgtgtaaccctatctccacatatactagaagtcagggacagagtgcttccacctcaggacccaccacattcaaagaatgttagagcagggagggtccctagagatgaccacattgccccatttcccagatgagaacaactgattgtctctgaatcaggcccacgccctctggacttattccaggctgaatgagggattgtgtttgagtggctagggtgagcagatgtgaataagagtgtgggtttgtgagtgtgtgtgtgtgagaaagagagagagagagaaagatagagagagaatgagaaagagattgagagaaagagtgagaaagagtgagagagtgagagataaagagtaagagatagatagagacagagagattgagagagaaagagagagagagaaaaagagtgagtgagagagacagagcgcgcacagctcctgtgcatatgcgtggcattcagttttgctccaatggaaggcacgtataatagtgaggaaatgcagaagtgaaagaaaatggcaggaactggcttgcctttttctaggactttggctgttacattttgtccagggaccaaggaccaacactactgaaaataagtttctaagctggacagaccgcgtggaagtaagggttcgtttaggaaatgaaacaccatgtaggtaggcttggcctcccctccctcgccctggccaagagctcagggtacagtatcacagccttgacgtcctgatgctggagggttttgagtggaggcagccacaggagccctcagcattgacagcaaagcaaacaagcaaagcttcctcttggggcacagaggactgagacaagttccttgggtccttcttttgggatccctatgatgcagcagatgagctgtgattcaaagagagaaaatattgcttgagaaatataaagatacatgctttagaatataaaaaagagcagggatcgggtgttcttggcctagaaccatttataaaccagactgtgataggtgctgtggcaaaatctagttgctcccattatttgctcctccctgctgccttagccatagccttttttgttgggtttgtaagtggaagtactatgtgggaacttcagaaaaccttccctaaacatagcacatgtgcacactctgccctctgttttgcttcatccttcttccattccgctgcctggaaggcagctcctgccttattggctgatgaggctgaggcctgtttagtgtggaggagaaagagaatagaacatcgtgcaccacccacgtagacttttagatgagtgagaaacaagttgtgtcttgttttatctgctgttagtttggggttgtcatcacttgagttgaatctaattctaaataattccttgcccacatgatttcattaaatcctcataataatattatgaaataagcagttattcccaattcacaggtgataaaattaaggctcagagaggtcaagtagtccacctggggctctccgtgtcccatacctgtgctttcccactgaactgcatagcctgtttgggaacagtttattcattgacaaatcattggacagggctgtctaaggcccagccctggcaagtcagctgggaggcccattatcaaccacggacacagccttctttgatgtctctaaatcccccaggagatgctcactgtaatctgttctggactttagaactcccaggacagggtgctgctcagagccaagatcattaatgtccctgcaaaagatggatgctggctgtgcatgtatttgtgtacatacctgcagatgttagagacacagcacatggagagcttcttaattaagactgttaataagtgtgtaaacacatttccatttgaatgtacatcatagcattgcttataatggtgaaaactaaaaaacctaagtggcgaataatgggagatcagttaatttaaagtaactttaggccaggagcagtggctgacgcttgtaatcctagcactctggtaggcagaagtgggtagatcacttgaggccaggagttcaacaccagcctggccaacatggtaaaaccccatctgtactaaaactaccaaaaaaattaggcgggcatgatggtgcatgcctgtaatccccactactcgggggggctgaggcacaagaattgaacctgggaggcagaggttgcagtgagccgagatcacaccgctgcactccaacctgggtgacagagagagactctgtctcaaaaaaaaaaaaaaaaaaaaaaaagaaattcaaacaatgggataatatacagatattaaaagtgatgcagatgtctatttattgacatggatgcatgttcctagtaaattatgcagtaaatcagattttaagacaatatttggaatataatctgtttgggtggctgcaaaccaaacattatctgtgtttatatccaagcgatgattttttttccttctgacttacctgtgttttctaatttttctataatgagcacatatgacttaattttttttagtgcttaaacacattttttctactagatcaaataggaagtatctggtggaaaatgaagcttttggtgagtggcttcctccagttggcagccacagcgccctgtggggagcccctcccagagggtgcagggagtttggtttagtcccctactcaactgccagtttgaaatgttagtttgtgagagactcaggagataccagggactcccctagtccctctgtggcaggcagacctggggccccgttgtttggaggtcaggtacctgggggggcgggaggcccccggcaccctcggggcactctggcagcatggtgagcttctccctggtgctgcacctgcaggatggtgaagggttgacctgtgtccatttctgcttctggaacagctgggtgatgtttggggacacagaaggagtcttccagggtgttgagttgccacaggggtactccctcatggaagacaagaaaatattccataatcagcctcaaagttgctgacaaatccctaggcataagaaattgtgcccaaccctttcctcctcctctttagacccaggccctttcttcttattctcttggaggctggtttctgctcaagcaatatcaaaactagggttttgtgactgactaggtgtggggctggggaataaccatctctagcttgtggatcgttttgtctccctttttattcctagcagctctagctgttgagagacacagcaaccagaagaggaatttgaaattagtctgttttggtccttattgacagctttgaaaaagactgagggagaaaagttaaaattatattgaacttttaggattcctggtggatgtcaatggccttcgctaactcccttctccagactcacaactatcacaaagtactggccactgtgtcactcacgccattcaaggcccaatcacacaatagcataaccctatttccctccctccctgctcagaggcctttcaaataagttatggggaatcatctgtcaactcaacatagaacttctatgctgagaaatatagagctgtccagtggtgtgggggcttcctaggaggtagtgaatgtccctgcacacaagtgtggaaggagaggttgggggagtgctggtcagagacatggaagtgaccagcagagcaggattgagtggggcctccccaacgcctgccatcttgaacccaccgttgggtcctcccaggggagctagtcttcttaggacaggggcgcgtaggcacttacggaagccacccttccttcaggcagcggttgccaaagcctggcttattcaggaggacgtctgcaagtaccgtgaactgctcactgcctggttcatccatgctagacagagtgagacatgtgactgggacagagcaggcgcgtgccaacatcatgcaactcagagcctttactggatagctgctgtgtgccaggtatgtattggaggcaccgaatgctgccttgggatggcgctagctctcctgggagtgcggtaggctgcctgaacactcgcagtggtctgatggcatgtcacctatgcctcaaaaagatggcgcttcaacccattcacctaagctttgcattcctttccccattcggccttcccaagcagtcctgcctgtccactaggatcgcctttccaagcagtggcagatacattaagttcctttctgcaggcagcccaaagacccctcccctctctcattggtgaaggtcccagtgaagtgggaaggtcagggcccttctaagcagcatgtgacccaggtgccccaaacccacagaggagaatggtgaccccgagtccgcgcacctgaagaaggtgtactgctgcccatatatccaggggtgaagggtcaaagcggggtattcgccaaaaggagggataacaatagaaagcatcagagccaaaaacacaaaggtagccgggagcacgatctgtgggagaatagacgtggaataaacatgactgtggcatggagatgtcacacgtgcgcgtgcacacacatcttcattcttttaaacatttatcctgcagcctcctaatcagcccctggtggagagggttgggcttctgggggaacataataagcagggtgtgcaaaggtaagatgtgcagaagaaaacagaatgttctggtggccactgaagaatctgaatgcagcccagtgttcagccagacttcaaagggcatttcaaagagcaagtcacgtgactcactgttctttaaaccagagcttctttttctaaattaaacaacattaaaagaaaaaagagggcaatgattttgatatgtagggtcactgcaaaaatgaatgaaaacatgactttatccctcactgtaaaaataaaaacaatattaacattttcactattattctattttctttgctaggggaggtccaacttacaaagaagattcatgttaccaagaatcaagataagggtttggaaagcaggaaacaaaaccagcagaatctaaagagggtgctccttgctgagttataacccatgcctgaaggaacactcaggagaggaggggaaggctgggagaggagccactgagctcagctaaacaccgaccgacaatagtacctgcgccaggaagtccttgtggctgcggatggtgtgttggaatctcttgaccagcagcgcctgcacatgctggaggaccagctgtgtccccgtgttgagctgcgggcctgggcactctggctctgggggaggctggccctctgggtgagcagccggcgcccctggggagcagacattggagtcctggggtgtctgtccagccttctctctgggacccaagcaggggtgtcgggggttgacgttttctcttttctgctgagcgccacctgttttgagagattgaattaataatttggaaaatgcctataaggtctggatctctaatgccattttttttttcccttacagcattgattttcctcttcatttaagtcagcaatgaaataccaggctggtagcttaatcatctttataaaaatctatttctagtgtaaattacttatacagagaaattgtatagattcacctgaaattgccttaaaattctctattaacattaaagagaacaaaatagctctaaaagcattgacatggagaagtttaaaatacgtaacttggttaataaaaaaacaaaactggctgggcacggaggctcacgcctgtcatctcagcactttgggaggctgaggtggatggatcatttgaggtcagcagtttgagaccagcttgacctacatagtgaaaccccctctctacaaaaatacaaaaattagccaggcatggtggcaggcacctgtaatcccaactactcgggaggctgaggcaggagaatcacttgaacccaggaggtggaggttgcgtaagccgagattgcaagactgcactccagcctgggtgacagagcaagactccttctcaaacagcacaaagaaaaccaaacaaacaaacaaaaaaactaaggtgctggtcaatatgtgtaatacactcacatttatgtttaaaattcatgttcatgtatcctacacaaagaaaaactgacatcttatgtacacacacacacataattgtaaaactctgaaagaatgtccaccgactgtcagcagaagctctccctggggaggcagagttgggtagaaaggggagaggaagtgggaagcgagactttagccttttgtgtattatatgaatttttaaacaacaaaatacattcacctattacctgtgtacttaaacaaatgaaaaatcagagtcgatgtggttctttctgaattcttagaggatactgagaagtggtagaaaaagtaatgaactaagagttaggggactgaggtttgaatatggattcttacaagatacataaatttggggaagtgactcaatctgcctaaatctgagttttctcagacttcttatctgtaaaatgaaggcatggtggctcatgcctgtaatcccagcactttgggaggccaagccaggaggattgattgaccccaggagtttcagatcagcctgtacaacatagggagaccctgtctctacaaacaactagaaaagaaattagccaggcacggtggcgtgtgcctgtagtcccagctacttgggaggctgaggtgggaggaccccttgggcccaggaggtcaaggctgcagtgagctatgatcgagccgctgtattccagcctgggtgacagagcaaaactctatctcaaaaaaaaaaaaaagaaaaaaaaaaagaacatttcacaggattggtttggaaatttaaatgagataacacatgggagcatgctctagaaaccattgcaagttgtcggttatgttgaagctacagtttatagtcactgattaatgctcatttgctgaacaactattgctggacatggagagcctagaggactgttggttggtccccagctgctttcttaaccctcctcaagtcccccaggacaaggacagttgtaaagggaattggatcagctcagtcatcctttcaactacatttacctatgacgtgccaggcctgggatgcgaaggctgggtggcagccccagccctggcacctgcactcagaggggcgaagttctgcaggttctcggtgccagagccccagttctgcaggctccttctcctgatccgggctcagatttgatgtcttctatggctggccctccctctgggaggatccctactgcccctcctctttgctggctgatatcatctcaaacctctgagctttgatctctccctgaaggctccatcctgactggagcccactgacctggccagagctaagggttccaggcctattcagaatcgccagtttgtccctagctatctgctgctttctagttactgactatgagtcaccccttcagaagtggcattgacccttgttggaggctgcacaaatgtttcttatgattaggcataattgaaatctgtcagtaacaacatgaacccgtgatcatttaagcagctgacccaatcattacctcctgctccttcctcctgttacccaataaataatgaagggctgcagaagcttagggagctgcctttactcattagaagcagggagcccttttcttcttctcttcttctctcttcttcttcccgatgctagcctttccttaaaacagttactttggtttttttgttatcatttccatgttgatcccttcgttcagtcttgtaatgatgttctcaggcagtaacagtagtaactgctgtaatgatggtttcacgtagtaaccgtggcagtcagccacagaccctctccatgccacgcattgtgtgaccccaatgcacagctacaggttcatttaaacactggagacaagatcagaaaatgtcatcctctgagactgagctaactcaaaacaaatgtacttagccatctgaaaagtggctgagagtgtggcattgagcatcctagattacagagctaagaccagagagtgagacccagtggcctgggtgactttaggcaaaccctccaacctctgtgagctcagttccccccagatggggcagacccctgccctgcctgcttcataagattacagtgataatcaaataagacaatggatgttaagtgctttgaggtaagagatggtttgtaaacatttagtttagagttgctaagtcttaatcagtgatcgtatactgtgttataagtcggcaagcattaactcacttaattctctcaacaatgctacaggtagatgctattattatctccattttgcagatggggaaacaggtacaaagaggctatgtacttacccaaagccagttagtttgcaaattatgaagctcaggtttgatatttggtcggcctcactccagaggctacactcttacccactccccttgactgtatctttggaacatcctgttctatgcctatgctgactaaacagtcctctgatgtgtaatttattctcctgagagggcctatttatcaagaaggaatattctgcacaggtaaaaggccctaactcttgaatccagcaaagcttctgatataaattagcatattttcattctggtcttggttaatatgagtctttgacattgggtgagctgagattattcaatttctgtgtcagcagagcttgaaagaaacttgggttctgtggtgaattgctgctgtcccctggagaggactgcttcctgccccacacccactgtgccaggacgactacatcttttggtcaccatgcgatgtactgggatgggctgaagcatatctgggctggtatatgtgtccattggtagttctaggcatagtagatagatgtttgggatcattatgaagaaagatgaaaaccaagttatcttaagagctgattccagaatccacatagaaaggaaacactccaacaggaaaacactgaaatatgccacactggaaagaaggaggtaactggtggtttaggaggtgttaggagcccaggggcagcaaaggagaatcgctgcaaagctttgcctgtaccaggagaggattttacagtgtgggtggacacctcgtgttctatcagaagtggtttctgtttgtgtggcaggtaacccttccacacatctatctccccaccctccaccctctgctgtaaactctgctacactcacacatgctttgtgtggctgtgggtttgataaaagttcatggaaggagctagttggtgcccaggctgacacatgtagaagagagacttctagaatccacaggaattttggtccccatgttttcaaagcccatagaccactaaataagggttcaaaatgattttatgttgatctcaaaggggccaggagactgacgtctgagttgtatttgataaacattaaggactctgccagctgtcactcatgcagacagagatggatcagaggcctggtggagatgacaggaggagatgaggatgatgacatggcaggccgagagactggggatacagcatgaggagctgagggatgaagctaccaacctgacctccgtaagaatcctcattcatccaaagtgtccccatctagacctaactcagtctgttattcctttgtcactcaaagccatctaggatgcaaaatgcctactactggggagtcagatactatggaggagtatttgcctgctttgttgtttcatgactttttccttagacttttttttttttttgagatggattttgctcttgtcgctcaggctgcagtgcagtggcacaatctctgctcactgcaacctctgcctcccaggttcaagtgattctcctgcctcagcctcccgagtagctggaattacaggtgcgcgccaccacacctagctaatttttgtatttttagtacagatggggtttcaccatgttggccaggctggtctcgaactcaggtggtccatctgccttggcctcccaaattgctgggattacaggcatgagccactgtgcccagccccttagactttcgagatggaacttgggagggaggcaaggaagggaacaagccactggctccagcaccatacccgcaaacagaggtcctgaatcagaatcctccgtgaccttcagaaaaatctgtcaagaagaaaaaaagagagaattttgtttagtcattcttattctcagaaaaatctaacccaagctctgttttgttgggtattgcttcataatgggaagaaaatccattacgactctatctgagaacatcatcttctataaatacaaaaacgtaagcacacagtaaccacaagtacataaaatttgtatgcatgcagagatgggggaactatgccaaaaataaagatagttgctatgcttgggtggggaacgatggctttttgcttttacaaaactttgctctaatgttagactttttcaaagaaccgccacttctggcacttgacagaaaccagctggaatctctactttacctcttccaggggagtgtcagaaattccaaaactgctgagaccaaggtcagccagcgtctcctccagctctctgaaaaggctggcatatgctctgtgcttgaagttcttatttggaagaaggaagataagttcttgaccaatgcactccaccagctttgcctctggaacatggtggagaactacatccatcagctcatttacatcccctaggacaagaaaaaagactgatgccagctctgttttccagaaactggaagactgtgaggttacccagatttcctacttctctccacttcccctttgaagaagaggtattttgtatctcggcagtgactctttcagaggactgatgctccatcaagtctgcttttagcttagttggccctgagatcatcattgagaggcagagggaaacggaagcaaagtcctcccgactagctagctgtgcaacctgggggcggaggttggtgggggggtcatgcaactttcctgtgccagttcctcctctgttcaacgaaatgctctgtcccctcaaactatgttatgttgggtgggtcacattagactttcctcatctgtgaaaaggggaaaatactggtatccacttcattgttgtttttgaggactggatgagtcaaactacacaaagcagttagagaaatacctggcacataggtgagtgctggctgctattattatcctttacatcatctcggtaagaaatctcttactcatggttgtttttcattctcattcactgaaaacttgagggctaagtcaaagttgttttcatttttctggtctgtcaccagctatgggggacttgcccaagacacaaacctggaaccggtgaccaagctgagtgagaagtaccttccctaaatcacacacacatgcctactctaacttctcagaagattgcacagtttctcttgggattgcacctgcctccacaaacaaaactgaatcctcaggtcacaggaaatgcagagggggggttgagaagccatggagagaggctgggggagagggtaggatatgcggtgcgtatcatagactgtgaacaagtgtcaggtatcaactgtttatctgacacatgtatacagtcagaattgaattttatgtacaaatgtgtattactttaaaattaaaaatctaactgtgaaaacctcacttgcatgcacttgaagagagagttctctcgcacattgtcttgagaggcaggtcaaagggagagggattccaggactcaaaacatgactcttcagaaagcagctctcagagttgtggacacccagtaggttcttttctttttttgttgtttaaaaaatgatccatatgaagggatttcatggttttcaaccaaaatccttctgcctagccggattggaagtcttgctttatgtcaaatctgcaagttggacttgattgtctttagctctgagatgacttcatacggaggctggagagtcctttacgttaaggaagcagctctgccctaatagctctccaggggtcatattcattgttcttttaggaaggaaattgaacccaaagctgctggattcccaggaattgtgtcttaggcatgtgtcagcctttccagaagtagctctgtaggtcagcagggctttgggcatctgggagggaggtctgtgagtgtgtgtgtggtatgtgggtgtgtttaagtgaaaagactttcaaggagctaactggggattcaaatgattttccctttcttatttggggcataactatttagtgcatttcccaccattcacagcatcccgattctatacaaagaaaacctttatttagaaataaagtaatttaaaaaaaagaatcattcagccatgcaggccctgtttccaatctgattttggcaaatcacagtaacttaacatattagtatcaatttaaaacaaatataaacttcttgaccaaggttcagagagcagggagataggtacccacagcaaggcaggctaggagaaagacccagagatgtcatcctaaaaagatgttttctgttcatcacagggtctctcagtgtaaagagagggcaggtgcatgaacagtgatgatgcctctctgagcatgttccctccagttgtaatgatcagacaacgcaaatattgcccggttctcttgcttcaccagatttcagttagtaaattcttaacatttgaaaaagtttgtgctaaatagaaaaatatgccttttctttgataagcagatactttccccattcattaacctgcatcagtacgtaagtttagttttgctcctgtgtgggaatacgcttctcacacattctctcacatagagaggggatagcctctccactgcagctccttggagatgggggcacccctgagagcttcagtgcatcctaattaaagggagaatcactgggaaattgggaagctgaggggagaatcaggagtataacaggggtgtatgctatttccagacttgccatccacatgtgcaatctctgactccacgaattcactggaagagccgtgcatcaccatgcttccactagagggcgccacggcacacatgtagaagaagctctccccagacactaaggaatgtggcctggagccagggcagggggaccccaggaatgatggcttactaagggtaagagcacagagtgtattcctcattaaagggagagggcctttaggtgcatgacttttaaaatccctttgggaatgaaggaagaaggaagaggagaaagaagctcaaagcaaaagaacaactgtgtgacctgcagaagtacccagtgttctctttgctcccattaaaatgcatcacaacaggacacacccagcaatactgggagatggctgccagacggaacccaagtatggcccgtccagtccttaccatccaggacttgttctggagttaggtcatcgacgtgggctggacacgtggtggagaaacccttagacgagcagctgcaggtcccctgcaacagatggatgggatgactgacaagatgcacatcccttccatgacagcctctccctgatgccagctgctgtcaccgcccgctttatttatttctcactgccaagtgtagtcaacacatttttttcttcactgtttaatctgttaattcatctgagcattttgagggtgtagtcgcttgattttatcctagagagtgtgtgagtcacacacagagaggagcagaacctccaagggtccctttggcttgtcatcaattatgtggcagctgtaggttctgcctgtgggagacattctgtgcctccctccccgtggatggacataggaaaccccagcggcagccagacacttaaaccagaggcataaataatgctgccatatcataatcatgaccatttgaatgtgagcaatgcctgttcttaagaagcccagagcacatttataatactttatctcacttatcttcacatccctaagaaatagaagcagaggtcattagcttcatgttccatgtgaagaagaaaaaaatactaaaaaaaaggaggaattaaataatttgcctaggatgacacagtttgttcacttcgcagcacagacataaaactgggtctcctgatgtgctgaagtggtctctgctggttggtactttttgccttcatcatttttatgttatagcacccaaggaggcctcttcttagttttcacttaccactgaaattcaggtttaattagggaatattaatgttgaaatgaagctcaaccaattgctcttaaaacagcctaaccttacagaataagacactcacttctatgttgcaccaaaccgcaccaaactggtgtgtaatctggcatgtaatacttgcagaccatttaaagctagttgtttcattttggctaaagcatctctgtaggaggaggcttcagaatgtgttcatcgaaatcttctgcaaatggtcccagaacaaagacactgattctggtggcgagagcctgtgtgagtagccatgtctggagtggcagccccgtgctgtgtgctccttctcacccaggccagggtccttccctgggcagacacctacctcactgcctttcctttggctctggatgtttttcatcttgcgcaccaaggttaagtacaagcctgtgccaaagcagttcttcaggaagagtggggtgcctgagcagtagagccttccctgggcaatgatggcaatgcggtccccaaggaggtcggcctcgtccatgtggtgagtggacatgatgatggttctgcctgcaaggtaggggccagggcaatcaccaggcctgccctgggttgggcattgttggtaaagggtgtacagcaatttcctggctatatagttgcaaaaatcaggagttaactaaaaaaaaaaacccaagggaactaattcagcagcaaattccagcatattaggacaataataactaacatttcatagcttcctacatactgtaaagcattgccacacacagtgtctctgtatccagcataggatctgattcaaataaatctctatattaggggctcatgtattatggtcagcatctagggagtttcatatgtacattttctggatcattaagctctggatttatactcttcataaagaacacacacgtgcatactctcactaactggagatgtcattaacagaaaacagcaggccgggcacggtggctcatgcctgtaatcccagcactttgggaggacaaggcgggaggatcacctgaggtcgggagatcgagaccatcctggctaacacggtgaaaccccgtctctactaaaaatacaaaaacaattagctaggcgtggtggcgggcacctgtagtcccagctactcaggaggctgaggcaggagaatggctcgaacccaggaggcggagcttgcagtgagtggagattgcgccactgcactccagcctgcgcgacagagcgagattctgtctcaaaaaaaaaaaaaaaaaaaaaagaaaagaaagaaagaaaatagcaatgaggatttcaggatgacaaaccctcagagaaaggcacggggcaacgctgtgtgagtagagcaagggggaaagctctggcttgaccacggggttgaaccgtgctgttacctctatgggcactcagctctgcttgctgtctcttctgatctgagccccttgtctgagaggtgccatgacagaggagccacttccatctgtggccaccctctggagcactgaatgcccagcaggtcaccctcacactggtcctgagtggtcatctgacagctatggagcttctaggtatgtttgcaggtgacctgggtccccatggtcagagaagacattcacctagagtagcatccattattccagacagaagggctgcaggtcaagagaattttctaaaatattttgggaagtaggttgcatcatcagtgattctctgtttatatttgtaaaaacctcaggaggctttagctggaacttagattcaccaagtcactgataaacccccttctgagtgtagtcattgtggttcctgtactcagctacaaaatggcaggtgagagagtggggaccacagctagggctgcagtgagagcccagcccaggagactgagcagcagctgttacctgagcgatacttcaggagcagatcccagattgagcgtctcgagtaagggtccaccccagaggtgggttcgtccagaatcaccaccttggcatctcccacaaaggcaatggcaaccgacagctttctctgcatgccacctggaggcacaagaaggacgggagagttaaggggctgtggagggtgaggaagagaaaggcccagggcaagtggcattgtgggggtaccttaacccagcagtggtttggtgctgcctcttagatgtttatagcgttcaaagccctaatactgttcaggctttgtaaatgcagaaagggcaaccctcacctcctcggatcagaccctttgaagactgttcaagcacatcaatctcaggacaaataaaacccaggctgctgtgagacagtgctctgcagggaaaatgatctgggggctgctcttagatttttggtgtaacttcacagaggtgttcccacccttagaagctctcctgctccaagcctcccctgcctcctgggtgcactggggagccatggatttgccatctgtggccctgtctccatccagctctgagcacctgataggtcctgagcctcttcattccgcttgtggtggaggcctgtgtcctccaacatggcttccatctccagctgggcctcctcctgggactttcctttcagctgggcatagaacagcatgtgctcagccaccgtgaggctaggaggatgggacaacgagaaaagcagtggcttagcacttccacttccagcagctgatcttacagaaataattgaggacaagtattcttgatttggcaatcaagatgctcactgtggtggtgtttatgatacaatacaaaaatagcagaccctgcttaaatatctaataagaggatggcttacatagttcatgcatacaatggaataatctgtaaacattaaatattattttatagaagaatatgtaatgacatgaaagatgttcctgatatcttatgtttaaaaaagcaatccttttttttgaaaaaaaagtcaggttataaaattgtatgcatagttttactattctttatcattttgaagtatatgtgtttatctatctatacatgtataggagaaagttctaaaaaattatataccaatgttataactcagcggttatctctgagtagtgaaattacaggtgacttttattttcaattttttgtttacctatatttacttcctccctccttccctttccttcctccttccccttcccttttcctccctcctgttcccttccttctcccctccctccctccctcgcttccttctcccctccctccctcccttctttccttccttccttccttccttccttcctcccttccttcctcccttccttttttttctttcacaatgactatgcgtagcttcttagataagaaataaaagatatcttattggggaaaaaaagtaactgaaaagccccctgaaaagtttgcctttcaggccgtggcttcaacaggaaaaaggaacaatggttctcctgtctttggtcccagagaggaagtacttcagggctgcacaaggggctcggggatcgatcagctgctctgtcagagcgaaggcagcctcacccttctgagggaggagccctcagctctgagcagcagaggcagagtcccatattctcagggacaattctcactgcaagtaggacaaaggactttaaacataggggaaaccaaataagagtctgtatctctgcctgtgcccaggcctggcacccctgagctgggctctagagaagtgtgctgggggcagaggtgaggagaggggatggggcggtctcagttcctgtgtcgcttactggtggaacaggatgttgtgctgtggacacatgccaaggctctgccggactgcatccaggctggtttcaatgtcccttcccccaacgagcacagtcccagaggttggtggcaacagacccgtcaggatggacctgcagaacacaggcgtcagtggcagaagagatggcctttagcaacatgccttaggagggccacccccacaccaggttcagtgagaactctcacagattcctgcctggggctgtcagtcaaactcaaacccctattagctgtggggcccccttagcaccagtgtatacatccaggccctaatgcagagggccacctctgccatccttctctgcttctacttgtttcatggtgctcccaggccaacgccgagggcctttgggattcccagcctcaaaatgttcacgtgcagtcacaggtgtccccagctcagccatcacggagcctggtgttggagaggatcaataaaaggtgttcggtgcatgactcgaggcgttgcctcctgggtgagcagtcatggctattgaaaagccaggtgtcatcatcataaagcccgggtaaggtcttgatgaaggccagaaccctaagcagtcctaggcatttgctgattaattgatcgaagccaggcatgggaattaccaccaccaatattagctttggatccaaaacataaaaagcctcagagcaatggtgggctttttttttttttttttttaaatgggaactatgactcccatgtccttaggttgttgtaaggcttaaatgagttaatacacttacaacattagaacagcgccagcataaagtaaaactcaaaaatattattactgttagtattaaacattgttttaacccctgggggaagttgcatgtcagcagccgatgaagtaatgtgtttgcctttgcggagccctggggtcctggaatttgcttccagctctctgaccatatcagttagcatggagagaaagcagatggatgcagggccgccacacccagctctgtccctgagttctgataccatctcaggctatctgaacttgtcctgatggagaagccgaaatctccgcgatcaaccactagagggaaacagaaccaattagaatggcaccggccccacattccattcacactgaaccgccctagagaacattccatcacagggtgtacacgctgttgttccttcctggggctctccaaaggacttgaagactgtgtcacgtgggttcgctgccccctgcgaggtccgtgtctgctgctccttgggaaaccatggcgggccgtgttctcctctcagcagatggcgctcgggtcccttggaggagagtggggcgcctgcggagctgagagatccgcgcagagcccctttgccttccctgccctgaccttctgttaccaggcggttactccacaagcccctctagagactgattcttttttcactttctccagaacgaccactaaccctcatcagctgatgttgaagcctgcctaatgattggtaggaaaaggaatgttccttgaaaatagcaggactcggcctggtgcggtcgctcacgcctgtaatcccagcactttgggaagctgaggcgggcagatcacctgaggtcaggagttcgagaccagcctggccaacatggtgaaaccctgtctgtactaaaaaaaaaaaaaaaaaaaaaaaatacaaaaattagctgggcatggtggtatgcacctgtagtcccacctacttgggaggctgaggtgggagaatcgcttgatcctgggaggcggaggttgcagtgagccaagatcgcaccactgccctccagcatgggtaatggttactatctcaaaaaaaaaaaaaaaaaaaaagaaaagaaaagagaaaggaaataggaggactctatagcttccatgcacatgatgacagtggccatgacttgatcaccaccatggactgttgagatggggggaaagactcaaggtgtgagaaacaagaggcaactgtggtgcctggcttttgcccccgctgagccatgacaacttggtggcttcaggaaagtcacttcaactctctgaatgaatgtccacttccccggcacacaaaaggggcaataaacgtattctacctccccatcaagagaatacatattagtgatctttgaatactgcagaaagcttttacacatttttggggccgcaaatatttgtcactaaaatttgtgggaaagagtagacagccgctgatagggaaagactaagccaggaaatgacaggctagcatggcagccagcttctctgctggaagactcacaaggtggtggttttcccagctccattgtggcccaggaatgcggtgatctggttctcgtagaaggtgatgttcagacggtccacagctggccggccacagggctcaaaaatctttaccagattcttcacgcataccccaggaacccaccctggatgctcacgttcaaagaaggagtcttggaggaaaaaaaatgaacatgatgtaaacataatgcctaattacatggccccagggctctgtctccaggcccttgtattctgcctataacgtcacctgcccctgtggcttcggctatcaccgttgcaaggaagactccagaataataatagtaatactagcatcaaacgtttatacagcacctcctatatgccaggcactgcttcgactgctttacacaaattacctcaatgtactcttacaatggtcctaaggggtagacatttattaggctcatttccatagtccaggaaaccttagacacagagacatcaagcgtcctattaaggacacataggcatgagtggcagagttgggatttgaacccagagcccatgcttgtcagaatgcactcactgtctatagggagagttggccccaagctcaaccttggtcctaggccctcattgccaacagtccacggggcatttcctcatgaatttctggaagcggcttaggttcttcatcttcccaaaacaacatctgccttcagattctcccatgaccttttctggaccgccattctcttagtcaccttggcttgaatctttgagttgactttgactaaggcttcttgctcctcagaactcccaggttttccaataggtgggtagggcagtccacgcttcctcatcaccatccctcaaaccccactcccctccttcttcctcccatgccccctccagtgcagaccctcaccgagtgctctcacttctccctgacctcccatctatccctgcttcatttcaccctatatggcacagcttaatttgtcatcttaatactgtagctctaagcatttctttccctagggggaaaaagtccactgtttcttctatccgtgcctcctggccttgcctgcaactgaggtggaaccagtccccagcctcctgatttggcttagactttccactgtgggaggaggatcttgccagaggcatggtgtactgcagtctaactctgggaggggctgcaggtctctggctttagttttatgaaatggcccctggggtgggctggagggataaaggccagaccctctcctgccctgtcaggcagagcccaggggctgtgctgcctgtctaaacccagagcattttggccacagagaaatgcgtatgcttagggaatgaaaagccttgggagaaatacagaactagtttaagagagaagatgagggcagcaaaagccaggaaaacaaaacttgtaaatctgggtcgtcagtttagggattattaggtaacttccactgtcaggaaaggcttctgatggtttcaatgaatggccttctagatttgtaagccgtaagtgaagtgtagtcagctcccctggagtctctttccccctggacacagaagcatttatttttgtctttccttatagctcatatccgctttaagtcccagtgaccaaagttattgttcttgctaaatcctcggaagtcagcacatttgtgcaactcacttgggatttgcctaacaagggcacaggcacactacatagttggtatttgctttctccaggaaatatgcgctaatgtctgggctgaaccattcattccacacacatgcagatggacctctgagaagggatctggtttaacacttgtccacagagagagtcagtttcctaggcttctttccacccttgccatgagatgttttgctctggccctctgcagtgcttagagccttttcctcgcctctgctgtgtattctttatcggggttttaccgtgtattccttctgggtgctctggatcctccgtttcctctgttaggggctcggtcttttccagggctctttcttctctggttgaacaccctgcaccaatcagaagccagtgttactctaccaccgggagctgagaacgagcaaaggcaggaaaggaggggagaggtacagggagcaaatgagtttcctagccagcctttgacctgctctaggactgtgaggtactcaagcctgatcacacaatctttgccagaggaagatttataacaggagcttcagacttggagagtttcacctcctcctctcaatgtgccatgaggagcccacagtttcagaaactgtgattttaaaaaaattaagaaaaccaggtttgaatttgaaatgagttaattttctttagcccaccactggcacattttactccaatacaaaacatgtgaaagtcatggtgaaccttgagtaaaagtctattcaggggccggatgtggtggctcacgcctgtaatcccagcactttgggaggccaatgtaggcgtatcatgaggtcaggagttcgagaccagtctgaccaacatggtgaaaccccgtatctactaaaaatacaaaaattagccgggtggggtggcgctcacctgtaatcccagctacttaggaggctgaggcaggagaatcgcttgaacccgggaggcggaggttgcagtgagccgagatagtgccactgcactccagcctggccgacagagtgagactctgtctcaaaaaacaaaaacaaaaacaaagtctattcaaagtgctatgacgggcagccagcttaaactacagcttgaatatatggtttacctgagaaattcacctagatgggcatttaagtatcttggaattaacaccagggttgagcctggtgatggtattaatacaagcctggacaaattgtgaagtgtggtataaacacacgcattgaacacacacacacacacacacacaaacagacactttttggcaaacttggcatttggtttaaaaagatatcaggacatcctggaaggggaagaggagcagaagggccagtcagtctgccagagaggaaggcaggggcaggaggaaaccactgtcaccaggcatccaagggctctcggcctcaagtgcacatacaggagcagggcgagatttctcaatgcaacagccacccagggcccctctgtcccccaccctctgaaaatgtgcaggatgtgtgctggagcagcaggtagtgggcctgctggtcagggacctgctgcctctagtactgttcttctatttctgcttcctgaaggacttttgaatctatgccccacagttcctttgatcactttactagctatcaaactgcacaaataggtaatgaaatagcaagaggaaacatcctcctgaagagtttaatcactggaatgagttcctgccaggcaatgcatgtgcatgttccagattttgtcccaggtgaccaataggggaagatactggatgtctcctgggctccattttttattttttaatctgtgaaaggagggaggttgggtggagacactcagctcttttctggttttagagagttttagaaatccatttcagtccagcctatgagacaggtgaaaaatatttgccttccgttggcaaacatatttgtgattcacttttgaaggagcatattttccttatgatttctttttttcttaagaggcagagtatctgttgggattgtagagaaaaataaaatgcccacaagccctgtgttgaaatttttcatttattatatgataattttattatagtaaaaaattaacaagtttacaggtagacaagtcaatacaatgaaaaaatcctgagctgttaaagtgttgtttgtttgacccagtgaaaacaaaagcaaaaaacaaaagaaaaaaagaaaaaaaaagactaatcccccagagaaaacaaacatccatctcagtgcttgcaggataagtcctggcccaggcccaataatacaaagtaaagaataggtaggtgagcaacaaacagatgggagagtacttcagctctaggggagtcccccgctttcaccctggaatttctttgctttctcagacctcacaaaagagtctgtgcttttccctgcttctagaactttctctagctaggcctcctgtttggttcagtagtaaaggtgccttttacctaagatgtgttgtgggcaaatgccctttcagcctttttccccacccctaagaaagatcaacaccaggagaatctgaggtattgccctgaagataacagctctgcctcagccccaggaggagtcttcatcttgggagaataaactaatttatattttgaaaaggcagagaagaataaaaaggcacaaggaaggcaatgggagatgaatgcaaaggttccttcatgattccctggatttctgctttatactgaaaagctgcaaaagttctttgaaccctgaagtggcttggccttttttaaatagggcaatttagtctactggacaaggtgtacaggacccagggcttcatccatgatcagccattcatgatcacacagggcccagcaacttgtgaaaggtggtcccccagacgctgcaatgcccatcaaggggcagagccccaggaggcagctgactcatcaggaatcacaccgtttacatagagggccacctctgtgatccatatacatcttgcacagagcccaaggagttgatttcaaacattaagatttgtgttttaaaggactcaccttcaccgccaagccaatacgactcttgtagaagaaagtaccaaggaagtggggttccatagtctcctaaaaatagagacaaataaacagagaaagtcgaaggagtctccctatcctaccttaccgcagttctataagatctagagtttatttacctgaacctcaaattgtaactatagatatttgcagttattattacatggctattctcaggctcccagaaagactaccccttccaacatatttttatccacacagtcatgtttttggggtgttataagcaacagcaagaccaataatcttggttgacatcagttttccaagaaaacgtttcatgagagaattaaatcaagtccttttccaggagtcagataataataatggtgatcatcactaagatgtactggatattctttctgtggcaggcattgctgtgagtgctttccatgtgttaaataatctaaacctcaaaacaaccccaggagataggtagtaatattattcttgtgagaaaggaaacagaggcacactgagattcagccatctgccccccgtcacagatagtgaaacagaaatgtaggaattccaacacaggtaatccagttctaatgtcagtgtttttaaccctacacccccatccctcattctactggatctaccagggttccaagaaaaagactcccaaatttctagtccagttctctttgaaagttctgctccctacaaaatgttgattttgtaaaatcatggtctcggctttttttaagagttgccgtatgtttcatggcctttgctgccactggactgtctattcctcggggcaggtctggatctttatctccaccgctctgttcccagaacctggccctgctgagcctcatgcacaggtgctgctcagtaaatagctgttgaataaatgaaagctttagcttggctaaaataaaacttttgaattatgcacaaatttcaattttaatcaactaattttcatctattatatctgtttccaacaatctagtaggatagaaaaaacagactaagttcaaatgtcttgttcaaagtcactgtcatgggttgaatttggtctccctccaaaaagacatgttggggtctgtggcataacacaaaatatacttggtctttgtccccagctcctgtgcagggcacagatctcctaaaacccttggaatttcctggcagaaaggagtgtctttttttattcataataagccccttcctctaccacatctgagtttatgctaatgatgtgactcagggtagagccccaagatagctgcagtttctggggactggtcaccagaaacaccacacatgtgaagaatggaactttcagtcccaaccctcaacctccaatgggggagtatggagctggagatagggttataaaaactctcgaacaacaagatttggagagcttttgggttgctgaacactttgaggtgctgggagagtggtgcgtctagagagagcatagaaactcttcccccgaccccatactgtgcttctcttccatgtggcagttcctgagctgcatccttcattttaaagctgtgattgtaagtacaggattttggcaaaagtgtgggtagcctgggcaccacatttccagctggcatctgaagacggggaagccttgtgggactgaacccgtggagtctgtgtgaattctggatagtgtcagaattcaattgaattcttggacaacccattaatataggagaattggttggtgccaaaacaacaacaacaaaaaaccaaaacacacatttggtgtcagaagtgctgtcaagaaaaaagataccagagtgctaaccccaggtacctcataatgtggccttgtttaggaacagggtcattgcagatgtgattagttgagatgaggtcacatgggagcaaggtaggcacctaatccaatccagttggtatccttataagatggccatgtaagacaggcagaatgccatgtgcagacgaaggatcagcaggaagcatctacaagtcaaggagtgcccaagcacctacaggtttcagagggagcatggccctgccaacaccttgattttggacttccagccttcagagctgtgagatataaatggctgttgtctaagctgcccagttagtggtattttgttatggcagccctagtaaatgaatgcacgcttgccactaggatgcaaacccaggcctcctgacccagtctagaagccttcctcctattcagggtggctgcctacctatttctgccaacaaaggctgccctgagatgatctgagagctgtgagtttgtccctccccatggactggaccagcctcaccatcccctgcctgcttttggctacagcatcaagagccaggcatggctgccacagcacaaggctattggctgacttggagaccactcagaggaagatggggcagctctagttaccagaaaatgctaatttgaaggaaaatttgattttctaccaagcaaatacacgaccgtgcaaacagccaattttcagaagctgattttccatgctacagattacttagatatttattcagtgcccaccaaaggtcaggcactattctgggcactgggactgtcacagttaacaaaatagaccacatgcatgctctctgggctcatattctactaagggcagagagtcagtaaatacatgcataagatacatcattgtatcagatggtgaagaatgttccccaaaataaagtagggtaaggggacaggaaccctggaggaatgttgtttacagagccatagttatgtagatctcttcagtctggaaagatccctgtgataatgggacatttgaacagagaccttaacaaagtaaggaagcaagcctgcagatatgaggggcgggttgcaggttgtggggagagaaatgtgcttctggcatgagaacagcaggtggaaaggccctgaagaggaaatgcgctcggtgtattaaacagtcagtaaggaggccgacgtggctggagcagaggaacatggaggagtagggaaaatcgtaagatgaagaagagagttggaggccggataatgaagcagcttggaggccagggttgagacactgggttttactctgaaagagaggaaaagccagtgcaagcatttgacagagagggctgacaccacatgaccttgattctgaaaggatctccctgaatacagtgtgcagaatggactgatgggaggtggtagtggaaggaagagactggcattgggaaggttgtggtggaggtggtgacaagagatcagattctggatttgtttctcaagtagagccagtaggatttgctggtggatttttaacttctagatttaaacttcaaatgctggttctgacaaagagcttggaagaaatgaaatttaaactagatgaatggagagggctggggatctgaagaactcaattacctttaccctatagaggaggatgcttacctggaaacacctgatcaaggtaccaagcgagtaagccatagacagcagcatcaaggagcatcatctgcatggacagcaggaagctgaattcgtccccttccgtgggactgttcccgatgttgctccactgcagccccaggccttgctcttcaaagcgaaccaggtactcagtgccaaatccaaatgccaccggagacagtaagctctgcagtgaggcggagagggcacagaaaaagagcagtgccttttatccaatgcaacagcacccagatgccctcgaggtagaggggagggccaaaagagggtccccattgtctctcagtgtaaggtcagctcaggagggtgaaggcagtctttcccttgacggccagggggagttcagagtgtctctctgcaaacaagagagtctctagctatacagtcacaaaaaacatgaaacaattctcagcccagccctaatccacagttgctagacctatagcttcctagtgatctatgtacccaagaagatggcctcaaattccatctgcctactcaaggattaccaaaatagcccaactctgcccacagatgagtcataaggatttcttgccacttatccattgtgatcattttagaaaattgggtactacaaatggcagcaattgatttcttatttaacctaagaaatgaaaggcagatgccctgacacctctggagcctaataagtgtgagtcgtgagaacaagtcagactttctgtcttttcccagtgagggcaggtggttgtcccttcttgactctacagcacagagacagggagactccggaggacaaggggaactgcaccctccagggccagaggctgattagagggtggaaatggcccatttgaaaacaattagagaaaagacagtgctctttgtctgggtctgggaattgtgaactaggaagtttctcaggccatcagaagtcagcttcgggagtcctctcctggccagcgagcctgactctgtggacagtctcatttctgcacttctttctgcaaacattggtagagcatgttaaagatacttgtggaaatactccaattcaagtttttttgaagcaaaacaaaaacctttaattaatggaaacatctctttagacagatagtaaagtggcaagctccctcccttctgattcttctcaaagagtaggaaaggaaaactagtgaaatgggctgctggctctctcttgtgagtaaataaagggacccatgagttgaactggttttttaatgactttccagggcagatgaatcaagcaggcgtggtgaggagtcactgttgcatcgctcggggtgaggactgctcccacttttgcccctgtacattttagcctcacgtgaactttttaaccttaggtcaaaggcaaagtggaccccctcagagggcaggctgggcctccaggactgctacggacccttccaaggaaacgtgttgtaggacaggggccagcccaagggcctcaccacagccttcttcagctcagcggtcatgcggtcctgccaggcgaagcacaggatgtgtggcaggtagagggtgaaatagatgacaccactacaggctgctgccagactggccttggagaagaaggtgctgagcagaaagcacagcatgatggtggcagtggagaaagccaacaagaacaggaagaggatgaatgggtcgctgtaatgtaggattcttccatgctgaaaccaagaggccatgcgtcagtaactcctgcccttggccggacgccttctcattctgccctaaagggctctctcccaccagcctgcagttagtgtctaaatttctacgcacactccatgtgctgagttcctttaatcctaggaatgccattttccctgggaggagtagcacattagactcctaacagtcatcagtaatgttaaaaaaattaattgggagaccattaggttgaaacggccccagcattctgtgttcctacatcagcaaaccaaaacccaacttagagaaacttaactaatcacaaactgcccactaacctgtaatcagggactttccacttgaaccaatcaaatatttgctttgtttttctttgtcttgcttccctacccctcagtggggccctgaaccacttgtgatctggagcctcctgtgaatcactgtttgctggaatcaactctaacattttaatgtgcctaagtttctcttttaatagtatttattatgtgttaagtaagcaaatcctcggtgagaagagtggtaatatggagaaatatagctgggacaagggaggaagacctgggtagggggtcttggagcatctccagggccctggataaaccaggtatatggaaaacaaaagagggagatgggagggaactccagaggagcttcaacattttgcctggggcctggcctgtcctatgccgtcatctatacttgattttctgaggtttgctacccacacaggtgaaaataccagtaattaatccaaatcacttggaagtggattgatcctccccatccatgaatatcacacaaatatatttcctagaacctgctggcagtactcagtaactttcacattaaccaatgaatcaatcactttggctatgtagaaaataggaccaaactagcaacttttgctaggggaactgctatccaattacactataggataaactgagattgtcaaaggtattagaccttcttggttatcttttgctggaggcatcctatgaggcactttactctctgaacacgtaaatgagtacatagaattcatcctgtgctcttcccaggaacataaaggaacaaataggtccatgtcctaaatgagttctgatcagttggcagtagttccctggagctctggcttcctctcatagaaaagagaccaatgagctgtatctgtgatgggcatgcgagagctgagtggaacgaatgtgccatttgtctgctgtggctgccatttctcctttctgctctcctgcctgtgggtactgacagaacagactgaagaacagataaaacaaatggcaaaggggagcggggcacagaagagacccacgcttaactggaacccaaatttgaggaaatctaaataaaagtctaaattaggactcagagctcctgattttgtgtgtcacccacacgcagctccataaaagcaagtccatggctgaacatgtgggttttggatggaatcactttaaggtagttgttgcagttctcagaagaatgaaatcaatttcttttttatttatttatttttttagacagagtcttgctctgttgcccaggctagagtgcagtgatatgatatcagctcactgagacctccacctcctgggttcaagggattctccttgctcagtctcctgagtagccgggactacaggcatgtgccaccgcacctggctaatttttgtatttttaggagaggcagggtttcgccatgttggccagactgctctggaactcctgacctgaagtgatccacctgcctctgtctcccaaagtattagggttacaggcgtgagccaccacgcccagcctgaaatcaatttcttatccttgctcaaaacaaagtcccataaacttttaggacttctaggaccacaaacttctaggacttttcactgacttaagccagaggtgtaattcactctgtgaccctacagtttcaccagctgtggcttcctcagatggccacttttctttttgtttctaatagctcgagtaacaaagggaccttcccattgtccctgcttccagcttctttcctgtgttgttgaggtggggaggaagagacaagggaaaggtgggagagtcattcaaaggaaaaccctgttttggtatggaaagccctgtttccgtcatcactggaacaatgttctagttcccacaaagagaaacccttttgtgcatgaaactcctggtgaacattctttacctcacatcgtaaaagctttgaagacctaatggcccattcttaggagggcagatctcaatgctgcttatcaacaagccaggcaaaatctcatggctgttgctagtcagatgtttacacatttttactcctttaattctgaggacacaaacatgttggtactgggaaaagaagcagactgagggatgggaaagaacaagggaaacctagataaggacaaggggctcagctcctcccctcatctcttagaactttggtgccctttgcaaatgtaagcccacatccaggtggggtcaggttgtttgagcagaatgacctctaccttagcatttgtcttgttaggactctagcacagagcataaccaaggccacagatcactggatcatggagcaacattaaaaagacaaaaccttcagatttagtacattttaccgtaaggagaaagggcaagatttggcttaactggagatgtgttgtttgaacaggatctgatggaacatttgtggatcaggtgggtaccagatatgggccagcatgggatgggagacactcagccagtctgtggtcactacacacactgcctagtgtggtacagcacttcctatcatgatggggaagaagtagaacaagctcaatcagtccatctcaggagcctgtaaagcctgaagtctaaaaattataccaaattccacccaataaaatataaaaaatgacctaaatttatatccttatcatttaacaagtacaaactatcatctacggtggaggagctaaaaatgaaggatagcagcgcattgcaaaataatgtttcatttccaagtctagctctcagaggagttgcaagtttgcagaggacagaccaatagatgctgcctgtggctataaaaactccttatcactgaggaaggatggactccaaattccatcctttaaaagagagagaggtgttggagctttttcaggcagcagaatgttttttggtgaagccatgtaggaggtgaccatgatgatgataagtaaataatccagatctcctcccctactgctactgaaaaggcaaaaggctttccccatttcaactctagccagtagttaaaattgtaagcccaggaaaacactccctgaactgattttttctgtgtttggaaagagaagaccactttaattacactatcaccctgtgcagggctctgctaatagcagcttctccagatggtcacggaatgggactgggaagtctgtgtggaccatggacccctgggcaggaagtgggagatgggaggatgctgtgatacagtggctccttcaggagatttcgtctctttgagtgtctcccacgttggctaaaaggaagggctgggaagctagatgtcacgctctccttggtggccacatgactaatccaggcacatgaacaggaggaaaggggaaaggaaccaaagtattcaagattttctgggccttctccatttggcttaccatgatgaatatcgtcaggaggaagatgctcatcgacatgatggagaagctgtccaggaaccaggtacaccaaatcactgcattggagacaccctgatttttcaaggtctccttcagtcgcaactccttctccaagacgatgctcttcacagtcatggagacagagtagatccatgccagcaccatgaagatagggaaacagcggttcaggatgatcatgaaactaaagcaaaaggagagaagcagaatagtagagtgctctgtacctggtagaggcagaataaatgtttgttgaatgaatgtgttgagaacaaagcccagatggagggaaaggaaaacaggaaaacctcccctggacatttaatgggctggaatcttttaacacattccatgttagccctgaagcattattttttgtttatagcagagtgctggctttctggttagcccgggtgaatgctctgcaagtaaaatgtgtcaataaaattatatcctctatgtcaaagatcttccctgtaaggccttgcaaggaaaaaactgcagacttgatgatgtggatgggatctgagtagacagctacatgctgacactgaaacccaagagggtggaggactgacaagggcaagtggtggtggtaagagcaataacttggctccccaaggggtcagccgccccagcacagtctgccctggaaggtcaaaccctagttacacaaaaagacacacaaaataactaatcagtttggcactttcagaaggcgaatgatccatcaatacatcagttatccaacagccactggacccaccaccagccatgcacaggtggaggagaccctggtatatccacctggcaaacaggatagatttgatacactggaacgactttcttgtgaactttacacgttttccctgtgtttcatgtgctagtaaagcccttgggattattatctattgaaaactgttgtgtgttgtcactgaaagggcccaattccagcatgggagggtttcactcaaggtggccctagggagagaagcatatgttcgtaaagcatgcacttctgggactagccaccagaggactctcccataccaaatgacccagctccctattgcctccccacacccacctcacttccccaccagccactcccgtcctgatcctaaagtggacctgggctttcgcccctggctccatttcccagctctgcctattgtccgaacccaaactaactgcagactggccactgttatctcaagttttctgtagagctgaggctggaaaacccattggacagttattaaaagagggtttcctgtgtccacactgagttttaggtgaactcaattgtagatctctgctgctgttttggtagtgtgtctgaccccatctataatgacaaatgagcctcccaaccctccaccccggccctttctctaccaccccccaaatccatattcagtcaaacagtaggctgcttgcttggcttattcctggtcaacagatatacaggcctgggatgggagtgtccagggaggcaggtcctgagctcatccaacacattcctctgccttgtcattgagcatacatcatggaaatgttagttagggaaggggctgcattattccagggctcccaggaaccagacctactggccatacagagtccaaaatgaatgctgatgtggcaatcattgggcaaacattctgaccagaacccttccacataccaaacatactacatagtggggaatttgtcccctcccccagcctcactttccttgctttaattttccccttcccttttccagctacaacatcaactcttttccctttcccaccactgcactgactcatctgtgcctgcctggagcttgggagaagcaggttcctcagtcagagctccatgctctccaatttggctctggtccctggggctctctctaaagacatggaagccttgagggcacccccagcccaccccagcccactccagcacccccattagcgtgtcatggaggaggatcgcgaacttcagactcacgaatcgtccacgaagcaggggtagggcatctgctggaggtagattccaactggagcctccgcctgcacctggctccttgtgatcccctgttcaaccatgtcctgcagataggcaaacccgccccagatgtaccggaaatcttccacgggatcagctctgggaccagaatcccaatacctgagaagacacagagggacaaaggatgggaacgggcttggatagctcactcacacctcccgaccacagggtgactcggaactcattctcttaaaatctttctcctaaacgcttcaaaaggatccaattctatttcctagtcctcagtttaaatctcagttttgaatattagccacaatgtgactctgtaattgctttcattcaaggactctttgttgagctttataaaatatcttattttttcttatttaacttaattttattgatttatgagtccagtctcaatccctttctctctaccaaatgtaatttcccactgactttggagaaatgcagcgagcccttcctgaaacatcacctgtctttaatcttattggttttctccaccacgtctatgtccattcggatcttatacttcacgtggggtggtagagagctggtccagggatacatgtcagggaataccactccggcccagaacatgttttcctccagtagagagagggcacgttgggtgagctgagtttcatcattgtagctttcaaacttatccaggaccaagcactgcagagagtcacaaagttgagagagtgtgaggaggaccaactgcaaagactcaactctacacacagaaagtcacaggataagggctgctgtcccaggaaatggtcaaatgcaaggaggcctataaacttaatgtttgcttaactccagagtctggtgttaatttttcaacgtgtccagatgtaggggcgccagagagcttggaagtgctgacgtgctcttatccctgcagagctagtgaggaccacactttccagatgtccaaggctgtccaaatatgcaagtcttcaaaatgacaaaaatactccaggcttttactctccagcatggggaggcgagggagtggggtcacactggctacagcctgctttgaagatcagaaagcctgacgattaaagagctttaaagagagagagaaacattcctagccttgaacctttctggctctctccaaacacacaggatggccagctgagggaagagcaaggaggaagagagaaaataacagacagccaaaataacttagtcagggaaatcacttccaattacaattctgtgacaagtaatgctgggggaggaggaatttctataatatgcctcttttcttctcctggaagaggaaaaaaaaaaaccattacccacaaaagagcagaactaagaatgtttgaaaatttgaatatgatggttgtcctcctgtatagatttgttaaagcacttatattgctatttgcatctatttccttttctttaacctcctgttcctatcattgtgagggctattggtgtcgacatttctttcttagcatgtaactcacaagaagtcagatggtcttgtcttgattaagttgttccctgaatgcatactgagaatctgcaatgtgccagagcctggtcgactctaggaatacaagaaggaaagataaacatctcttcctgaaagaaagttgagagctaatgagggagaggattggagcaaaccaacaaccataatgtggaaggatcaggttctaatgaaagcaagcccagtgtattggggaagcccagcggagggacgcagctaagtcttcctggagggatcagggaaggctgcctggaggaagagcctcctgagtaggaggataagcaggaattagccgaggagaggaaagtgggggaaaggtcagctcaggcacagggaacagcacatgaggtatctggggacctacaagaatagatcagtggttcccatctgtggctgtgctttagaaccactgcggagctttaaaagatacctatgccaggccctaccccaagcaattaaatcagaatctctagtggcagggccagggcatccatatcttgtaaaaaactccctaggtaattgcaaggcacagaagggagtgtagggtgaagggaggtgagtgtgacagcagcactagaaaggagggtgggaccggacggtttgccctgcgggactcagtagtatgaacgaccaatgcagggcttccccggacacgtgctttcagtgctaagaccaggggagttctgggcaggccttaaacagccacagaagctaatgtagggttttgagctgggatatcacctatgggatcagactatgatcactggtagtggagaggggggaaagcaagcaggaagactgggttattgatgtactgcaggctttaaggaacagattcatccccacaaactatctgtgagttacctggaatcctcattttactgaagaggaaactgagctttataaagtatcttatttttttgaggagacctgcctgaggtcacccagagagacagtggcagagctgggactccctccccaatttcaccttcaggcctagagttcttcctgccacaccaggaaccgtgggaaaggctggatccacagcctggcgctcagggccctcactactatcttgtcaagtaggtggatcagcaattactacttatcctcacttggcagccccggaacttaggttcaacgagtctgagtgactcccccagaggcgtggtagagtaggtatcaaaccccaggtcatttgattccacaactactacccgagaaataaagaaacgagaaaggcagacagggcgtaaggacctgaccacagaaccaagctccactgcactgggaagaagtaggcaatcccaattcattcgccgaaacctctcactcccgagtcccacctgcgcctcagagtatgcaccggaagcctctggcgattcagaggctgtgtttgaacaaggggctgcacacccaacacttcttgggcctcctgaactaaactgtcccacctcagcctccatgccctgggggcaggtcccatgtaatgttctcagtcttctagataaaaaggaagaaaactattagtgttccagctgatatgggcagaggaacacaggtacatgaaaaattctaaagggcccaggcttaagtgacaccacgctgatgagatattaataatgatcttaaaatgatatggaattggtatttctttgggcccaggcttcagtgacaccatgctaatgagatattaataattatgttaaaaggaaatggaattggtatttctttaagaaataccagtatgtgtagtcacccaccatagagctaagggaaatggagaattttctttaggcagtgattctctcacaaacaggcattgcctagcctaacattgaccagtccttaaatgagatgtaggacttaaacaggtcacacaccaaaagttgtcaataaatgtttgtttcttctggacagaaataatgcaaggtttgctattggataaatagtttgggtctgttgagggtgggggtaggtggcatctaatatgtagactgttagcacagtccctgaccatgggcctgacacccagtgtttgtcagtacttaacccacccaaccatgctgcttgaggacaaaggattgacagtgtgatgcttgggccagggggcttctgaactgaactgctagaatacatttttaaaatatgcatttaaatttgctttagggagacctcaatgttgtacaaagataagtagtcaaataatctttttttattggtttgtcaagtttagaactgcatatagagaattttagtattggcaattagagtgaatctgaaatttaattcctaaaacgaaaaacaaaattatttggggagatgaaagtctttgctcttcatgttgtgacacacacatagaatgttctaccagttcactcagtcatggggcatttggacagagccctagagggcttgtggtctgatgttcttacttggctggtgaagaaattgggatcagaggagcaaagggccttgcccaaggtcaatctaggtcagaagcagagcctgcatccgtgtcttcagtgctgagcctgcagagtgccatggttcccctatccttgctctgaggataagccacactctagccacaagcgggggtgtaacatccctgaacaagaagatcttctgctccagagcagcattgttcagtagaactttctgcagtgatggaattgttctatatctgccctgtccaatatggcaggcaggagccacaaatatctattgaacacttaaaatgtggctaatgcatctgaggcattgtgtttttacttttaattaatttaaatttaaatagccctgcgtggctgctggttactgtattggccagcacagttccaaagatagtacattctttgaggctggggccgtggcttgttcgccgtggtctctagaatagcattttgtcatgatagggcctcgatatatgtttactgagttgagttgatttgtgtattttgaatataactctgcatcctaccctagaatcacatgataaactaggagaaattaataaaacgtgaatttttgctacagtgctaatgacagtatacctcttaaaacaaaaaagctagtaaaaataaatatattttagtaatatgactctcagagatatctggcccattctctttgaactcccttttcatgtcttaaggggaaatctatacgggaataagcagctgatgtttttcagtggcattgctgactgctgtgatgacgtgggctccatcctggctggtttatcaggcagctgattcatagtcatgtttcctgatgcatccccctacaatgataccttgataatctctgggggaaaaaaaacttaaaagattctcaaacgttcatttaccctaaaacatctgacccattttcaaaggtgctttgtcttccttgccttgcaaattggtgtagcatagtgtttaagagtctaacagatctgttgccatttcctaattgtgtggcttctgtttccctacctacaaaattgagatatgccctatctcataggtttgttctaaggatcacattagacgctgtttgtgaagggcttacaattgcctccctgtaggaataaaagcagatgcttgctgaaggcttactatacggccaaaactggtccaaggactttactcatattcacccatttcattctcacaacaaccttatgaggtccaagttcacttaggagacacgactaagcaaagtaaacctcctctggaaagagcctgtgtttttaaccactatggtataccaaaccgtctcacaaatagttaggatctgataaataccatttttatgactgtttttgcaaaatatcttgaaagtcaacagacttttaagccccagccaggttaccttttagccatggcagctgtttatcaggggaggaagggagctattttctttaaataatatgtctgggaacatatcccatcctgagctgatccataacacctcatttggttagaacaatgctatggacagatgccaaagcccatgtcccaggtgggcagtaggggagctgagagggcgtggggcctcacacactgatgcttgctagctgcttgttgatcactaggtgaaagtcagacaactctgcccacaggaaggccttataaagctaatcccgaatgtcatcctccccacatcttccctagatcaaggtagagcaattgtagaagctgctttggacatgaatcagaagttcctgggtcaccctctgaagtatgagtcatgaggtggccttgcattctcatggggaagccacctgccatgcagcaagtgacctcattccctattggtacttgctttgatccctgaaatcaaaatcttggctaatggacatgtatattagtgcacgtatgtacataagtacgtttgggagacagagatgaatgaataaactctcagcagaggtttttgattttgatatatttggtctgattagcttgcaagttagaatatagtaggttctatgaggctacggccatggagtctatgtgtaaaagctgtctgcttctacactaagagtaactatgcaatcatgaatgttagggaagaatgtaggtagacaagaactggctattgtaaggggccagtgtaaggtgctcaaacctagcaccactagtgggaaaaggagtcaaagggcatctttgctgaataaaaacacagtgtcttaaggcctcagaggcagattctgggcaaatgttatagccggagctcagaatctcaaagagaaccattgtaatgccctatgacagccaatgacaataaagcaaggaaagggctttcctcctcccctttagtttcctaactgctgtggctgagcccaagtggcaggaccaccaccatttgaagtccacacaagtcctacagctctttgttggttgttttgctggcactcaccaggaagcagagttcaccctggcggaagaggtttgagccctctccagcgcaggcagctgtgttcaggacctctggagaatgcagtcatttgtttacacagctaaatcaaacacctccttgggaggacaagctgcagtagcagcaggcttccttctttaactgtgacctctctgtctgtaattcaaacacattcagtaacagatacattaaattatctgttaggtgggaaatgatgtccagtagaggcagagaaagaaagaaaatctttccttttgtttaaacttgatgatcaaagtggggagcaaccctgtgctgacgtggcataagaggacatattttgacgaatacatccaggacgtgctaggagtgaggtcttcgagggtaagggagccactgcccgcttagagatgttggctgtataatcccgcctctcacatctgtaactcctaaactcaggctgagaacaaagcgggcgatgaatgccagcggagggctcaagtggccctgctggtgtcaaggtagacacctggggttccttttgagaaatgccaatggatgtgggcaaacatcccagaatgagtttcctggctaatctaaacagtaacattcaagatttatttcccactacatggaaaaatccactggataaaacagccttgggctatctgaattggttggaatggtgagttagaggccgaaggcactgcaataaattttatcttgcacgctgggcaccgcaaacagacatctgaaacgttcacccacagagagtaaggaaacacatgacgactggaaaacaaagggacaggaaatgcacagctgttaaaaaatgtctgtctctaaaataaacaacttaaatacaataatgaaacaaataaaaagatcaagttggaggacaaagattcacactggggcaaagccacgaggtaatgcctgcgtctaactgggtccaaaggaagagaatcacctggctgacaactgcagggcacttgagctcttaaagtttcttgttgaatcatcccaacaacttgggcacatggatgctactatattcaaaacatctgctaatcaacagagctgggcactgaccaatcagaccacattctggccacaaacacccatttcagccacaccagtgaatgccacttgaactgcagtttgggttatcatcctcagttttctggcagtaaaacagcaaagttgcctccaatcacagagcctattggtgcaagagatggtgtcctttcacctataggtgaagcttttgcaagccgtgcctgctgactccaggcactacttcttctcccctgatgctgcagccacacctctgcccagcccatccatttctcttgagcttcacatctctgcactttgcttatgcccttcctcctgcctgaaattgtctttcttccttgcttagctggaaaattcaacctttacagcccagagaagcatttatgagcgtctattctatgtgactacagctccactaaggtaagttgggaagtcaaaaagaaaagtaaggcagtttcggcccttgaggggttcagggccatgaaggtgcggaggcgtataaacaaatcatgatcaagggctacagggaagggaatggtgcacagaagaaggcccgaaacataggacctgagtcctgaagcgtgggtgtgggtgttgacctggcagtcgagtgggggaaggatggaaaggctcagtggtaccaggtgggaagcctggggcagtcccatagaacatggaagaagcatgaagggctagactgggaaggcctttaccttaacagcaatgaggagtcactgtggagctgtgggcgctaagtcttggcaagcctgggattttagaaagatcttgctggaagcagttgagagctgaacagcaagagactggcggcctggcaaacagctaagagagacagtacacgcttctgtaaatggaggccataaatgggaaagaaggaggaatttcagagataatttggaggaagaattgacagtgcttagaggatttatgatgttttgaattggatttgtacaatctgtttctactctgtcagattgaattatgttctgctagtcctctgagataccactattatggcattatttaatgacatgcttatctctccaatgtgagcttccaaggaatcagggattaacagcatttattcaaatgtaggtagctcaatccatgcaaatgcatgaatgactgaatgaattcacatctttttggtttcctactctaatctagctactttcaagcaggaaaatccaatcataatagtgcctattatgctgcatattataaaataatgtcttccttcattggattcattatataatttatccagagaatactttctgagccccctattaatgtgggctgcatatgacagcagaaagagctttctcatcagagccaggcagctctggattataattccagatcccccatttagctgttgtgttacattagactgtcaacctctttgagtctgtttttaattctataaaatgacaattatgcttactaggcaggtaattgggagtattgcatgagatgacatgtaacagtgcccagcatgtggctggctcatagcagcttcaatatcagtccaccctatgagctccattgattactatttggacctccacccatgaccccggtctaccccttgcccacattttccttcctcaggccagttatatgtttcttagagactagaggtatgaaatgaggtcattgcctatgagttgcttaggatctagttcatggctcttgaaataatattgtttgtgtgatgcagacttctgtgctctttctcacgatcccctgatttctccctagccttccaatgcacatctagagtcaatgaattaatagaagaaagaaataggacagataattcacaaatatttatatatctgagtctaaagtacattacatgatcagcagctttatcttcttaatcctattttttcttaggttatcctgaaaaatacattccctgcgtacattctgtttgggtggtggtggcatgtggccaggaacatgcaaggttacagagaaaaaatagtccaaatctctggcctttgagaattcatcagcaagataatcaccatgtagacaataaggagttatgcacatgtattgactgtgttgacagcagaggaaaaagcagttaatgaatgcatgttttttcacagcttagagaaatacagtggttactggttaaagtacaattttatgccttgatcagaggtattttcgtattaaaatctggctgaattcagcttcctatatcagcttcctgatgtgaaattcaagacctgaaaatcaaatatattatgaaatgaaaatacactgtgaactctgaatagtatttcatctgtgccaggcctaaccttttgctaaacaaaaaatccaaaggggaggggtgtgtatgcttgttttagctgaagggcaataagaagaataatgtattaatttttctaattgagcttttctccagaagcaaaatatatgtgaataaagacacatataaattagaactataaatgaatacacataccagtttaagatatttgcctgtatgaggacccatttgtcctgtgtccttagatttggagaaaagggtgattggaaggcccatgggaatgaatgtctccccatgagtgatgtgaggctccccaaaccaccatcatctattttcctactccactgcctgccttctaactgggccgtctgacttccatttatttccccctgctaatgggaggggatcagaggaaagacagaatgtatttatggggtgaatgagattgcagaccctattgtggagggggtctgagacagcagaccatggtccacagaaatgccagcatggtggttaggccgccctcctgggaggggcctgtactctctgctcagaacccccaggcaggccttcagcagcccagtgaagcaacatccttgctttcagagccatcagcaaagagttttcatggcctctctgctactaagccatcctcagggtggggacatgaatgattttcaagtctcctccagacttcccaaaacacgagaacagaagcagaaaaatccaggacaagccacagtgatgtgtttcttcctcacacatttcctccccgctatcttctcctttctgttcattgccccttgctttcctcctcccccaccccaagggcaggaagatcagaaaccacatcatcacagctgctgggcttctgctcccatcatacccctctgctcagaggccctcgtgaagtcctggcggccccggaggatgtgatttgcagcgttgtgattcctagaggagcaccagcttggaggctgggcctatttacaggaggcactaacatcatttcctctcctaagcagtgttttttggcttgtattttgttaaaaagctaatatttattaagtgcttactatatgtcagtgctttgcatgaattagctcatttaattctcataacgagcctattaggtaagtgctattaatatccctattttatagacttggaaactgggcacagataataggaatttgaacccaggcagtgtgggtccagagactgaattcttaaccatttaagcaattaatatattttaagtatctgtttggtgcctggggctgcattaggaacaagctgcttggaaaaaataatccttctggaaaacaagacatttatgtcacgatacgaatgtcaagtagacaaggagtattctttatatactttgcaaaaacattgtgagaaccactgaactccatgctgcacaaatgaagcaacagagcctctctcctccgtccacaccccctcgcacaggtcctgcttatgttataacagcagtgggtggatggtggtgggcctggctgggaataagggcttagcaggtagaggcaccatgagaggagggagatgttaattgagtaactaactgtacaagggaactgcaggtcccacaaatctaataggtctgtaaacatgcagataaccaggcctcttccctggaaattctgagccagtcgatctgggttgatgcttaagaatctgttttgtaaacagacacatagaccaatggaacagaacagaggcttcagaaatagcaccacacatctacaaccacctgatctttgccaaacctgacacacacaagcaatggggaaaggattccctatttaataaatggtgttgggaaaactggctagccatatgtagaaaacttaaactggatcccttccttacaccttatacaaaaattaactcaagctggattaaagacttaaatgtaaaatctaaaatcatgaaaactagaagaaagcctaggcaataccactcaggacatacgcatgggcaaagacttcatgactaaaacaccaaaagcaattgcaacaaaagccaaaattgaaaaatggatctaattaggctaaagagcttctgcacagcaaaagaaactatcattagcgtgaacaggcaacctgcagaatgagagaaaatttttgtaatctacccatctgacaaatgggtatctatcatctcatgccagtcagaatggtgattattaaaatgtcaagaaacaatagatgctggtgaggctgttgagaaataggaaggcttttacactgttggtgggaatgtaaattagttcaaccattgtggaagatagtgtgattcctcaaggatctagaaccagaaatacaatttgaccaggcaatcccattactgggtatataaccaaaggaatataaatcattctactataaaaatacatgcacatgtatgtttacaattgcaaagacatggaaccaatccaaatgcccatcagtgataggctggataaggaaaatatggtacatatacaccatagaatactatgcagccataaaaaggaatgagatcatgtcctttgcagggacatggaagaagctggaagccatcatcctcagcaaactaacacaggaacagaaaactaaacaccacatgttctcacttgtaagtggaagctgaacaatgagaacacatggacacagggaggggaacatcacacaccggagcctgttggggtggggtaggggcgaggcgagggagagcattaggacaaatagctaatgcatgtggggcttaaaacctagatgatgggttgacaagtgcagcaaaccaccatggcacacatatacctatgtaacaaacctacacattctgcacttgtatcccagaacttaaggtaaaataaagaaagaaaatctaaaaattaaaaaaaaaatcctgttttataaaatgcattcaaggtcattcttatcttcagacaagttggtgatcgcttagtagttgcctgcagtttggtgctgctgtcatgactggcaccttctgaaaggccactggggagcctcggctgccacttccagagtttggagagcgagggtcacacactctggaaaattgtggtggcaccagggcaacagaaagtcctcaagagcaccaggtgacagatagaacgaggcttttcttcactagtttgttatcctcaggactcacaagtctgagacaagagggcatgctcccgagggccctcgagtttattccctctcctactgctcacagaagcccctaccttccaacagttctagatgacacagacccagacctggcccatgggcaagagtggtccacccttagatggagtcatttactgggagtatgaggttgagaatttgaaaatgactgacatgtgctccctgattctaaataactccagtttagctgcccagccagagatggacatgtcaacagccaactctaatctatctgggagaggggtctgagagaggtgtgaagagagggccaggaagcacagaggagtgaatgactaaacctccatcaaagcagaagtgacatttaagagctgagtgctgagtctcaaagaatgaatgagtagaagctcagcagatgaggaaagggacagtcatttcaggcattggtggacatacacttttctaccttgtgtttcttcttttggggaaacatcttcctccacttcacagtaatcctgctcatagaaatggccccatggtgggcagctgacccaggcctcccaatcagagtacacaggggtgggtacaggagccagaccaacagggaaactctctaggagcattgcttctgctatgggaaagggatttttggtgtatagatgactgctaagggctgtaagcagctagggcatcagcagaggagagggcctggccagagatgaagctgagcagaggcgagtagaaaagtgaggtggaaggacacaggggtctcatggtggcttccaactcttggatcctcctgaacttcattatttatgtccaccaataaatgctttctttttggttaagcaaaaagcttgtgaccaaaagcgctctaataaatgggcaatgaaaacagcatttgcaaagggtagaatcccaagaggtcatggaatgggaatgcctgtaggcgtgaaagggccaggtagcagagttgagcaagggctgggaaggtggggtaggacagatttggaagggacctgtgttatttgggggtcgagtcattaagattttaagtgagagagcaacgtaagcaggtgtgcggaatgtaactctggtgccagtgtagagaaatgcctgggccaacagaggctggaccctggattccaggaaggaagcccttggaatgggctggcgcagagatgacaaggcctctagtcctcagagagcctggaatgcaagaggcagagttgagagatatttaggagggagaggagacaaagcttggtaagagaaatcagaaaggcaggctctgaactcaggcacccccagagctggatcctgttcgctcctcttaatggtcatgcgtgggatcttatttaacctctttaagccctggcttctcatctgcaaattggcaatgataatggtgcaagcctcatggagctgtgagaattaaatgaagcatatgtgtgtaaaagcagttggcacagtacttggcataaagtaacactcagtaagtgacagctactgtgtggagggtgaagaaggaaaattagggatgaccctgaaatccctcacttgagaattcgggcaaatgctgaggacgttaattaggataggaaatataggagaaggatatgttctatgggcaaggagaacatacagtttttggaggggacatgttgaggctgatgtgcttgtagaacttgagggcaggagtgtccagcaagcaatggactgtggggttgaggggacactggccatagatggccactcaagcaatgtcagacagaagagggttgaggacagacacagatgcttaaagggggctacaggaggaggtgcccagcatgagaagtaggagatgtgaagaggaaaccgttttcagcatagataagttttaagtatggataagctgttagagaatgagaactgtacaggggatgtagggattcttgtttcttcagtggggaaaatgaaagcttaaattcaagaccacttgacttgctaagggagctctggccccactcatggggctatcttcaaggggcccactgtggggcttgcagccccttacctccaggtattgattgaccaggcggagggtgcgatcagtgatgttaaatatgtccctccagtcgaagttggccatgtcgtcagcctggctttcccgagggcccttgtagaggaagtttaggatggcttcagcagtaataccttcttcaccaagctgcctattcaaaaagtcttttactgttgggttccccagggtatccttgggaagaagaaatacagtcactgctctgcttagaaattccataggatctttggtcttgttcttcagccatttctaatttttagtgattgaggatagagatgctaaggctccctgaagagctggtgagcttgttccactatgaaacatacctatctatatcccatttccccaagtccatgggtctctagaatagagggaagatgtgtaggggcaaaggaggggccagatgggggtcattgaatatggtgtataaaaagctttcttttgcttatggatatttttgttttcttttgagtgtccctgatatatagaactcttgtcttcattttgcaaagctgaaaatgagaccagacaaacacattccaccatctttggagttacagagctggccccttggggagatgcctctttgaatttgaggcccttgagtgaattcataaaagtaggaaactccaggaagccactggtcttgtggcagcttttagacttctcccagaattcaagaaacatatttctcatccaaagtcagtgaccccacttggtgactgcttggaatgaaggcctttggggcctgcttgttgtattttgatctaactccaatagcgattaactctttcctgggaaaaggaaacaagtggaactttcttgcccccaccgcttcctcctcccctcccctccccatcctccaaccccccttactctgatcatgttcatctgtgtgctgttgtcaaagaagtaccagatctggggccctacttcttcccaggctttgaccaacttcctaacgtgttccagttcttcaaaagttgagttggcctaaaaccagacagagatcaagacagagacacgaacagagagaaaagtgagagagaacttttggttgtgtcttttctgcccctatcacttagtgttagggaaaggcttttcaaggaagtgtttttattttctcagtctattgctatttcccagaacaattcaccatctcccaacttcctgggctgacagaatctaatttcttagtatctcagaagtccatgtaatattgatgatattattttctcagaacctccctcgttaaagctagatttggaccccctgggagaaaatacccttcctcccttcctccctgtctttatctgagtagccaggattcagagaattgtgaacccttccattagggatataattcaagcaatgggaaagaaaacctcattgtaggctgcagtagagaggggagggcccaggcaggggcactgaagcaaagcattccagtgatgactgtggatgggggaggaaacgcaagagtccacttagcaaaaaacaaacatgagatgtgctaccaggaaggcacatctctctcacacacacacacacacacacacacttctgggaggtccagggtacacaaggcaagcccagctgggatcttacattcttcagtatccttcgtgctgcaggtgaatcaggagtgtacaggatttttcccatcagcaaaggctttgccgccctccaagcgattttggttaaaggatttgactccaggctctggatcaatgcattacaaaaggatgctgccaggagacaagggacagattttacagaaactccccattgcttgtaactcaatatagtcattagtgtatccacatcacatgtctcattcaactccatgctggaggatttgatgaataacctaaattaataggctgtaccccaccaataacaagctcatcattagtagcaaaatgccacagtgactctcagtaatggcctcatcagagaaacaaaggatgcgacttgccctgtggtttattctgctttaggagaaggaggctgagaagcctgcctctgattactgctaggaactgaggcctttctcagatgaaagggactgagaggccaaacaaggcccccgcttggaatctcagcttgagcctcagtaatttcccttcaattagctgcttagctgctttgttgtgtgtagctatcttagagtccaactacttttggcatgtcccttgctgcctcttttcagtttttaactagaggggcagccagttacatttcttccccaccccatcctcctttaccccatagaagaccaaaaaaaaaaaaatagtgaaaggtggggaagatgatttgccaggaatttgccatttggaatgtaattcagtactacacacatagattttcacgatattgtgtttgtaaaagcatcccacagccgtgtttacttgccagggcccttctgacctgagcttcacctggaactctgggttgcttccttgcggatcattctcttcctcttgaacttagccctagttcaattacatcagtgggaaatggcccctctgttccctttccaagtgggcctcagttctttctgtggttcatgtccagaattgcttataagcaatgccccctttctgcaaggggaagtggactttctgggagaagtctctttacctaaggccactcagcaagacaagacagatgcaaccccaggtttggtttcacctagaagtgttaaaccatcaacttaaccaacatgagaggccaatttataagcaggactcagaaaacttacttgttcttctgtcataagaatagataggatccttccttgtggagtcaatccccagaaaggccttatagttattgtcttcataccagttgaaggagagcacccgagagccacctccctcggggtagccacacaggaggtcagacaggatgcccatcagctttgtaaaggtctctggaccaccattctgcatgaggggcctggtcacccacagcaagtcctgcatactcggccgatggataaactagggcaaggcaaagtcttcaggttattttaaggcagctagagtcataatctgctgtgaggccaatgctccaacgtttggtttgacttccacatttaaaagaaaacatccatatattctcagcaatccttaatccagctgcgaaaaacaaaaaacaaaacctactgccatctacttagggactaggagaatactaggatgagccttaaagaaaatcacagagtggccgggcgcagtggctcatgcctgtaatcctagcactttgggaggccgaggcgggcggatcacgaggtcaggagatcgagaccatcctggcgaacatggtgaaaccccgtctctattaaaaatacaaaaaaattagccggacatggtggcgggcccctgtactcccagctattcgggaggctgaggcaggagaatggcgtgaacctggggggcagagcttacagtgagtagacatcgtgccactgcactccagcctgggcgactgagcaatactccgtctcaaaacaacaacaacaacaacaacaaatcacagagtgacccctagagcactgtagtatagcctctcttcttctagtctcctttatttgaattcgttgggaatgtgtccttgggcaaatgcagaaaatattttactgttaagccagttcttgggttctgttgtcccaccaagatggggatactggggagaaaaagagggaaataaaatgattggggaatgattctgttgtagaaaagcaagatcagagcaaatttctttggctaaatagtctaaaatttagtttcttatatttggaaaataatcttattagcttaattttaccaatgaattcttccatttccttgaaatgtgtggtttgtggttttctcgtgtgtgtgtgcgtgtgtgtgtgcacgcctgtgtgtgtctgtgtgtgcgttttaaaattctagcaaatacagaacagatgaagtatccattcctggaaaaacactttttcaattctgtgccagctaagaggaggttggtggccttctcttctccatgtgggcaccctgtggtgcttgctggcctcatcctttgagggtagatctgtaatgccgagaactcaggagaaggctggtggagctgccagtagcttggctcccataatgccatttggctttgctttaggggaaaatacgaaattaaaataatgctgcttttattcctaaaacacacctgattacttgctttgctttcagtggtactggggaatttataaaaccattaggattcaatcagtgagactgaaaatatttccccattgcaataagccatgtttacgtgtcatccctctctttgtccacatgccaacacttgccctctgaaactgatgagcccagggagaatccacacagtgagtcatgcctataatcaccatctatgcttcaataaagtcaaaatctcaaattgcttcaacaacagtgagtcttatgacatcttgtaaggggttattactattattatgttgctcatttagtcaaagcactcagagatgaaggggctgttctcaggtcaaatggtgtaataccaattcatataaactgggccttctgctttaacttagttcacaaatgattagacttgctatctagacagtcaagaagccttctggaacttctactcagaactaagagtgttgatatactttggggattgtttgtacattctctatcaatttcaaccttattgtagtgatataaatttttttaatgctatgaagaaaagactgtttaacagagactcccactgtagcaggtgagcattagtacaatgggctcttctctaactttcccacatcagtgtgcatactcggcccaggttgagatgcgttttataaagacagattccaaccatgcagttttccaggttggtggagcccaagtcagctgcgaataatggagggagaaaagtttggaaaaaaacctgtttcaacttttccctccctttcgtaacactcatcacacttgaagagaattgtttttttcccatctctctttcccacagggtcatgaccaaatctgtgtgttcatcatcatatccccagcacctcttatctattgcgtggaagaatccatttctatatgggaggagacttgtgcaatcagatgttaattaaaatgtgcgcatctttttacaaaacaacacaaaagtccattgttttctttatgatgaaataagccaacataggtaaaacacttagaagaagagtgcctgtaagctataaaggtgtatgctattattattggcagtatatatttatgtgaattttaagactgtaacagaataatgaaccacctcagtactgaaaagacttagattcaactgtaagtcttctgatgatttatgccacaccaggcaagttgcttattgccagtggcatttcttttttgatgtgaaatcagaagggtggttcctttctttctgcctcttacttaagagcacagataatttgggatgtgaacaggtgctttgaaattgctagatggaaagatcaaatgtacttttccttgaacaggtttgaaatacaattaaattatttgacataagtggggtaaatggtggaaagacataatgaaattataattactaccatcaggctactcacctcttgaattcttggtgacatatcagataatattcctccccaagatctcagattgataccttgagaacggctgtctaggagtgtgggaagctgtaattgacagtaaaacaattttttaaatatatatatgtttgtaggtatatacacacataggcacagtctgatctcctatatgtttgaaaactccccccctccttctttctgatcgcaggatcttttctgcaagattacttttagaaacaaaaaactcttttatttaattgaaaaaataaaggctctcattccaagactccttgctgcacttgtcaatcacagatagtttcatagttatattaaatactatcactatttcaaagtgattctaattgctgttttagtgacaccaaacaagattcctggaggaaggaaaacagagtgcagctggcagagactgaaggaagtgctgcgggcctggggtgcccatctgttcacctcggagctttgtagacactgcagtcttctcgtcattgtttacatctttcttcctttgtgccattttcagacaggttgtgtctcttcctccattcaacactgctctctcatggaggatttgaccagctacatcacctttattttaaagcagctgctggtaggagtcggagaagttcccttgcagattctccaattgccagcagtgttcaggaaaccccagcccatgtgaactcaccactgctcctgcttttgccacctcggcaggggatgtggaagtccccaggtgtgctgcctccaagctccagagactgatgtgaacatctggttttctggaaaccaaggtcatgtcctgtttgacttcatgcttcatgtttcaaaactgatggaatcactgatcctagaggagtcatgtaggactgagttctaagtgtaaagacagtggttttccaactcaagtgtgcttcctgagtaggtgtgaagtgagcactgggcatgtgccttttaaccagctggacttgtaattctcatccaagtatctggggaccaaaagcctctgctttttatttgccagcacagttctcctaaatgatcattgggctgacctaacttgcatcagtgctgacaaacaggtggagttaggctttgaccagccaggttctcatttgtagctgtgtgtctttgcccctctcctcttggctgtagatgcagaggtccttgtattctttttgaccctgaaactctagaataaatgtaggtacactcaggcagcattcatatttcaggcttattttctaattgtgaaataaaaggccttgttaggtatgggagttacaaagcagatgggtagaattttccagaggaaagaacaactaagctgctattgacaccacatcactgagaagcgtctcccctctttgacctgagcactggaccgaggcatttgtcttgccgggagtactcttcaaactccttcgaaatagcttcagtgggtgctgggcaaagcactttaatttctgttttttccatacaagggtggggctgagaagaagagtgggtgtgaagggaggaagcaagtaggcaaaactgtgtgtcgataagcaagttagccccaagtcctgcccgtcctccctcctgtctcccctgagattattagagatgaaaagagacctgagagacatagcagtaaaatggccacaggtggattttgattctgatctgaacaaaccagctgtagcaattgggggaaagtggacatgaaatgggtattaggtattattaagacattatgataaattttgttgggtatgatcatagcatggtgattttgttaaaacaagttcttacatgttagagatacagagggaagtacatatggtgaaatgatatgttgtctgtgatttgcttcaaaaaaacttcaggaaaaaaaggtggagaacagttaaaacaagaacagccaaatattgataatagttgaagctgggtgatagatccatgggagctcattttattattcactctactttcatacttttttcctacaataaaacgttttaataataaaaaaggttttagtgtatatgcaaaaataaattgtcgaatgagcaaatactaaggaagtatcctatctgttttgttcttcctctctaggactacctttgttcacttcccttctagaatatttcatcaaaataggcatagaaaaaggactggccttcttgccagtccccttgcctctagccccctcccttccaatgcattgtggtctgagttacccaacaggccaatccagtcatgtcgctttccctgctcaaacatcttccatggctccctactgtctccagaagagaaggccattactacgttttgacacacatgacctctgtgagctggtgcctggctccctcacttgccttctctcctgcttctctgctgccacagtggacttctttttatgtctgctcacacgtcagctgtctcctgcccctagctctgctctctattcccccccattccttctttgcctggcaaacttctactcatccctcaagtctcattcctaacatgatgacctatgtgagaaacagcttcctcccaagtagatttagatgcccctttttctatgcctcttgctcacccctgcccagccacgctctctttaggagttctgtttccttccttgtgctcttcaccattggtaattattctggtgtttacttgtcatctatctcccctgtaagactctatgctccatgtagacagaaatcatactggatgacttctaggtatgctgggcatgtggtgggcactcagtatttgatgtgtgagtaaatgatcttatcagaataacaagcagattgattataattgtttatacacctgatactccatgaaatggtatgttcattaaggacaggaccccactttttatctttgtatcaccaagctttttatccattgcattttctgtacactcatcgatgtccaactaaggaaggttctgtaagacaagtctgcttttaagttgtctttttttaaaagggtaaataaatttggtctttttatcttgaagtcaaattcccctatattgaagtcctgttagaagtggatgtaataaagaagtggtaaattaatgacttcctgaaaattcataatcactcaattttactaattcaattaatcgtattgcctaggtagttctgagtcacatgaagagcacataggctgttttttttttttaagacaacgaagtagtagctgtttacttatataaagtacaaggcaaaactgtctctgcaaacttccccacatctctacccaaggataatcaatgttaacaatttggcacatatccttccagaagcacgaagactttaacttctttttatatctttttcctgattgacaattccacagacctccacatttttaccatagtttgcagtttaaccacatcagcatatgtggcagcacttggagaacaccctgccccaaatggtggctttgctttccctaaagactaagggttccctccaagaatacgagatcagcactgtcttagttcactctggctgctacaacaaaataccataagctgggtaaacaacagaaatctatttcccacagatctggcagctgggaagtctaagatcaaggctccagcaggtttattgcatggtgcgggctcatttcctgattcgtagatggcatcttctctctgtgtcttcatatggtggaagcggcaagctggctttctggggttttacaagggcactaatcccagtcatgacctaattgcctccgaaaggccccacctcctaatgccatcatcttggggatgaagatttcaacatatgaattttggggaggatgcaaacattcagatcatagcatgcatctcctcttcatttttatccccctgttgcctaaacgtcctaataaatgtataacatgaagcataagaaagacctcaagaataatgcacacaccaacccattccattaaccttgcctagcactgagtgactaggcttcgtcacagtgacaaagattgatgcttatctatgcaatattgctaaaagtcataatgcctggcccagcctcccatgcatacagggtgagcctatggcacaatggtaaccaagacaccaggagaagtcataggatggggtttctggaaatggtcttttgaagtaggcccctctgccctttgcctggtccctgcctgcaacatggatgtgctggaggaggcagcacaggtgtttggaggtcaccagatgacaggcatatgctggggatgaaggagggaaacacagggcagcctgggggtcttgaggaaacctgtggtgctccaaacccctcttggaggacccagctccagactctgcctggggagaaaaatgaaacccacggtttctctgacttttgttactcacagccaggtgcagtttctaaatgataaaatcccacatttgacaaatatgtattgagtgtctgctattgtgccaggtgctggggacacggcagtgaatgaaacaaagtcctcccttcatggggtttacctccaagagtctccctgaggcttcgccagcccttccatcactgtcgtcatgctgtgtatacgtgcaagattctcccacaggagagaaagaatctacctctgatcgcttatgtctccctagctacagtctaatttctctcttccacccttcattcccacattcttttaagcatagtccgtaatcagtgacttcacttcctcaccaacacttccctggcttctaccctcaccatcctactaagatgctttatcaagaaccccccagttttctcctggtttttaagtctagtggacatttttgcttcttgtattttcaaacctctctgcttttctcaacattttgatcatgtccttttcctccctggtcgtctgtgacactgcttttgcctggtttgctttgctacttctctgcctttcccaccagcaactgtacctctaccttcccctgaagtgctgaggttcccaagggcctcccttgctcctctcactctgcacactccccggatagtctcatttcctttatcatttaatctgctacctttttgttgatgacttctaaatctgtacctccaacctagacctctccccagagcttcagacttacatatccaactgtctgctgggcatctgcctagatccagcgtgttctgaactgaccacatcgtcttaccccaaaccaacttctgtgcctgtgtgccctttctgtggctggcaccactttctgtctgggacccatcatgggttcttcccatcccattgtctaaatctccagcctggagatccagaaattggtgctgggaatgagtgtggggtaggatgagcccttagatagcagagggtaaccaagggacatctgaaaggctactttaggaggaagctggcatcaaagactggaatccaaagaagctatgcagacaaaaagcaaccaggtcctagataataggaaggcatctaagagggggtaggagcccagaggcacaacctaaggaacagccacactcatgtctccagggaggctgcgcataagtaaatcagtcacaagctcccatcagttttgattattttctcttctttctgaatttgtttcctgtcttcctcacttgagtgtgggtgggagattgcccatggccatgtggacaatcttctctccatcccctctcctttacttctgcaggccccaggcacactctggtcttgaaactccaccacacatcacatgaacactttggaaagcatctgtgtccatatctattcagatctctgtctatctataggtctaggtctatgtaggtatagttttctaaaagctcctaatttttacttatgaaattatttgactttgaacaacttatttaatgatttatctggtatgaattttaagcaatcattgtgaatacttagaagtgtttgtaaagtggaaaaacctgaactgcaaacaggctttggaatttaagattttatgaatatagtaaatcctcacttaattcatccacaggttattggaaacttcaactaagtgaaatggctataatgaaaccaattttaccacaggctaattgatataaaccagaattaagtttctttcttttctatttttttttttttttgagatggagtgtcacactgtcgcctaggtgggagtgcagtggcacgatctctgctcactgctccgcctcccgggttcaagtgattctcctgcttcagccacccaagtagctgggactacaggtgcccaccacatctggctaatttttgtattttttagtagagacagggttttaccatgttggccaggctgatcttgaactccggacctcaagtgatgcgtctgcctcggcctcccaaaatgctgggattataggtgtgagccactgcacttggcccaaaattaagtttctatagcttgtttctggttacaataaatcaccaaacttcaaaataaagactaaaatacttctaatattaaatattgaaatacatgtgaactatacatacattttcaaagattaattaaaaagtaagataattattcacccaattatttcagttcagagtcatgggtggctggattccatcccagcagctcagggcacaaggtaggaatctaacctggacaggatgccctcccatggcaggggcactcactcccacacccacactcactcacgttggaatcatgcagacacaccgtttccactaatgggcacatcttggggatgtgggggaaacaggagtacctggagctaacccaagcagacatgggaaagatgtgcaaaccccacgctgacagtggccctggccaggaatcagttttgttttctctcatcaacggtatgataaaacagtgttgaatgaaactcaagggcttgttttaactaaatttaacaatgaagttgaataaaattaccttccttaaatattcatttaatattcattcattataattctaaagttttttcattttcttttggagccaattaaaaaaaaaaaaaaacttcaaatctcaaatagttttgtaggcttctgtaaagcctgcagtccttagccactagtcctatcactttgaggactaatggatcaaaatgaccaacccaccctgtctcaccccattctcactctacccctactggccagagtcaactcatttcaaactacctcaccttctccagaaagccttcttcccccatcaccatgctcttccagctttccttccctagggattaggtgcccctcctagctattcctgtctttctcagtgcatttatttaccacttttattttggtttgctgttattttttaatgtatctatctctccactagactgtaaactcattaagcataggaataggttttattttgtttgtcttttatcttctgggcatggtacacagtaggtgctcaataatacgtgttgtggtaattaatgagtaaataaactataacagagtaggaaagagactgtgtctgttgaggttttaggttccatgagggctatatatagcagtcatcatggtgacttacagggagggagcagtcagtttcacctggggacggggaagtgacacttgagctgaggtttgtaaagagacaaactgatgactgtgagagtgaggacagtgtctgtcagtaaaaggggagggcccaggaattccaggtggagaaaggaacgtgaagagagtcagcaagaaagagtgactagagagacagccagataagagcaagactaggaatttgggggaaagggaacagagaaacaatagcttgagatgtatttttgtgtggttaatacccttttttccatcttgttaataatttaataatattccttcaccaaatagttactaagctccagttacgtgcctggtgctacagctacaatttccttcccagctctttttagtgggaatggtaaatgatgagggtccggtcctcacaccttacatctctgaatactgcctagtcccgagggagccctccatatgtacctgttcacagttgcctgactgaggttgccataaattataaaataactttcccagggctctcctcttcttttggttcccccttccctattatctgttcaaattcacatgaattgtttctgtcaaagaaccggaagagactgtaagtttagttggaatggaactgagaaactatttctggaaaaaaaagtcacagatcaaaatggcaaacatcatctcacacacacacacacacacacacacacacacacacacacacacacacaatttcctatgccaaataagttctcttaattttccaagtaacaaataactcttccatgtcacacatcacaactgacagcactgccagccgaagttcaaggtcagactagacctctaaggaagataaggctgtgaagggatctgcctctactaactgaggtcagtctaaggggcctttaggccttgatcctgtgcttaagaaattgatataaggtcctaggcagcagccaagatgattccggccctaagaggtctctgcttgggttgtctgggatcaaaaccatgtctctcccttgggactgtgtaatatttttttcttaaggtagaacagacatgtttatcacctcctaaaaagtcttgttggcatagtatttctgatgctttggatcaaatgtgttcatcaaacagatgtcacccaaccgcacatgaaatgtcttaagcattgaatgttttgttgttttactttctgtgattcaaagaagacaatctggaaacagtattaatttctaagttgaggatatacctaacacaagggtaaataagtagcctcaggttcaatgtgtctttttggggcagacatggcctctgcaggctatggaaggttctgaagggagggatgagctgcagtcttgaaggcatgcagaccagaggtgaaaagcagttgaagcagtggacagaagtgtgtgctgctgtgttcagtcctgggctgagctacaggaaacccacatttatccgggagggaagttgttgctaggcaactgggagaatgtggatttgaagcatgtttcttgcaaactgacagttgttaagcatcaaatgaaaagggaggaagcgggcttcagtggtgagggggcaaccaggaggggacaccctgagtgctaggaaatgcgtcatcagtggagaattcagactcaatcactggggggttgggggacatgtcaaacggtctctaccaggaggtcacagagacatgcagtctcccagaatgagagggaactgagtgtctcaactagagggtgggctcttgggtatgtgaacagacaagttatgagactctttggctcaacagaaactaggtctttttctgtccgtcccagtatctgtggttaatgaaagcaaaactgagcttggaatctagaggcagccaaaaggtcactccatgagacagaccttctcctagtctgggggggtctgaagaaggagaaatggggagcaaagggcctctcaaaagaggctgtgcttttataagagcaaaatgctttttgttcaaagtgtttttccatctcttctctaatgtgaatttcattactatttcatgagctgtgtaggacaagtcttattttctcgattttacggatgggaggctaagatttcctttaaatggcagcaagttaggagccaacatagagccagggcccagtctctcagccactaagagatgcctgtatgccccagcagctgcccaggcctgtggtcctcacgccattggatcctgtgctcaggggcagggaggatgctgaagggggcagggaggatgctgaatacttcataaacagagttaaggaagaatcggtgtatattgagaccgcttactaaagaatgcatattagtggtaggtagaaaaacattttaatgtaaaggctattaacctggggtctggcttcagctgctccatgagccccatcctgtgtgtccctgtgaacttagttttctttagggaacaggtctagagctgtagtcagattctcgaaggtaatcctaacccataagaaaggttaagagctactgttctgtagagataaaacatatcagaagccaaaacctttcttaaaaccaactgaccctggagagaacctgacgcctcacacattggtgcacacattgtaggcgcctagtgcgtatttactgaacaaaggccaggaccccaggactcattatcctcaatggcagccttcccaggggcctgctcttgtcttaagtgacttcagttttgacttctcagtatttctttctttgtaaatccataaaagaacatctgatctgtcatgaaaataagccctggcctactgcctgcctggagctgaaaagacatcaaggcaggcaagtgacaatccagccagtaggctcaatgtgcacgaaggggcctctcttctatttcatttttatttcttctttgttgaaatccattcacccagaggatattttgatggtaataggtaaagatttttgtagatgcaggcagaaaaaatactaatgctataaatcaaatatatttgctgtggcttgaatattttcataaaaccccccaaaaacaacaacaaaaaccttcctgatttagttttgtttcctcccaacagccctgctgttccctggtactggcactcaggaatcactcctttctcttctccccttcccaaaacccttatggagaagtgggagaaattggaaagaatgaggaagtcatgacatcaagtcattagtgggacctcactgtaaaatcctgtagctgtgggggctttcccagacacttgacgtagcaatatccacccgaaagttgaaatgcataggtgaagtttaacaatctgcaaccaatgacccaggagagcagcaactgtggcaactctcactgggtagggggcggtccacccacgcttctccccagtgactcaggaattcagggagccagagccaagaatgaaacaggacattgatgggcgcatgtagtcagaaccccaagattgggcccttttcttcctggaactcaacgtccagccaccccgtagtcaaagagacacggataaaatgcaatcagaaaagtaaaaatgacaacagagcagtggttgggggacagaaaagaaagctgaatcatgccacactggaagcattttcaaaggaaaaccgtgagcccaaatgccgaggaggctgacttttctctatcaacaagcatttaggagggggaagggagggagactcagacttcccagcagcatggcaggtcttggcacccgcctcggttcccctgccgaacttccacaaataaacattcaaagcagaagggacagatttgcttctcagcaagatttcaaagctgtgcaccagagttggagagaaaacaggaaggatggtagggggaagagggggaggaggaggggaaggagaaggaggggcatgcatgccttgggccaaatcagatgggaagcgtcccaacctctcacccgaaactgacacaccatttttatgaggtgcgaaacatttcaggtagtgttggcactaataataccttgggcccaagtctgagcttctgggtttcaagctgggggcgttaagcctgcaaaggccgcaggtgaagacaagctccttcaggtgaaaccaagaggggctattaataaatttccttggagaaaatccagtcatttggctcttatttctctcccagtccacctaggtcaccaatctgtgtgtgcgcacgcaagtgagcgtgtgcgatagtgtgcaaatgagcgtgtgagtgtacgcgcggggatgggtgggatggtgtgggagggatgtagtaaggccatgggtactgcctttggattgtttgaagatgacaacactcacttctgatctccaaggaaccgagagaaaacacagctggtctcagtcggtgctaaccccagcgcccccctccgattctctgggctccacaggttcccttgtctcggaggttgcactcacacccccagctcctgactcaaagtgggtagatgccgtcacggtggtttactgagattttccctctttctttgttaatgagaactcatttggcatttaataaaaccttatttatacactggcctacgtgcgtatgagaaacagcccagaacagaaggcccagcattcccgcactgcagctaagcatggctgcgcgccaaccagctgcaataacagccgcgtcccagcggggccccttccctggccccggagcaacccctgcctgcctgatgctcctttcagaggatcggagggtctgccctgagcctttctgggcctgcctcaggcttgtttttctaaaaacccaaataggatgggcccaggagcaataaaggcaaagtcccattttaatgcctgcaatttctttcaggttttttttttttttttgtaaatttttgtttttagtgtaatccatttgtcaaatggaaaagtacattttaaaggcaccagaagactagatgtgtcctgcttcggttggatctttctccaccgagacggaagcaggagtgagaggagagcaggtaggggtggtgctccgtggttaactgaggccgactacggcagagctttctcctctgggccatctcccggtccactgcaggctctgtcgctcaccagctttgttaagagaacaggagagagaaagcatctccacaccacggtggtctcatgggtgatcaaatgaaagttctttggaccctcagaggtgtgtggggtactattattatgcgtggtctatagagactgaggtggtaaattaaactctaggtcagtgattctcaatcttggccggacattggacttatctgggaagctttttaacacagtgaagtcaaggctgcaccctaggccagctgactcagaatctctgggagtgggggccaggcatttgtaggacacattgaatcactggggaagcttctaaaagctaccgctcggggggacaaatgctgctggtgttggccctttctaggctgcactgctgtgaaatgtcctgtttgcttgtctctggtctggctgtgagttcagtgagggtggaaggttcacatttggagccttggcctcagcacagtgcccggcccttcacaggtgcctgatgcaggtttgagtgcctgcatacagaaaccgagaaagcaagcccccaggacccgtctgaggtctgcaagggtgacaggtcaaggtagcccagggtttgtgaatgctagcatttgccaaggcagcatgtgaagacgtaaggaaagacttggtctttcttgtctgataaagaaacatttggaagccagtgtcctgagttttggttctagtctccaatggaaagttttacccaggtgccgatttaccctactatctctggcattgacatcccagaatcaatggtcatgtcctgggaggtaaatttacctatactggtggccaaggtgcttcaagaagggaagaatgatgctgctcccttcatggtgacgagaggattgcacgaacctgggtacccaggccctgcctgcaaagcccaggtgcacagacattgctcattctgcccattctacaaagcatgcgggccctggacacctgagagggagcctctggtggctctgcaaacaccagcactggactcctggctgtgctggtattcagctgcctggaataagggacctttgttgcctcactcttctgtctgattctgaaaacaagtcaaggagcgtgtctaaaatcaagttctttttgaaactttggatagagacatttggactacattgctttttatttttcctacagtgtggtgagccaagagaccttttctggggtcctgggctctcactgatggtggcatccctaggctctgacccttcatactcactctggggccccaccctgacgagctgggaaaatcgtagagtaactttccacggaaagtcacacattgaaggggattaagcgtggaccgtgccagaaactgcggtgtcttatttcatgttgcttcatttttaaaagccttcagcttgctttttaagacaagctgaaagtgagtttcctgggacttgagagagcagtcatgaaacagacaaaacacagttcctcaatcaagttcttagtgactgacattccctacaacacagttctagaaattaaaatgtaggcaaaagaaaaaaaacataattccatgctagaaatattatatatgccaccttctctgaaggattctaattttgagtgtttctgaaagtgtggcctacaatggtcttcatcagaatcgcctaaggtaacaggatagattctgggcctggcctggttcttctgaatcacagtgattgggggtggggatttagcacttgcatcttttaccaacttctctgatgggtttttttggtttgtttgtttgtttgtttttattgagacggagtcttgctctgtcacccaggctggagtgcagtggcgcaatctcggctcactgcaagctccgcctcccgggttcacgccattctccggcctcagcctcctcagtagctgggattacaggcgcccgccaccacacctggctaatttttgtgtgtgtgtgttttttagtagagacggggtttcaccgtgttagccaggatggtctctatctcctgacctcatgatccgcccgcctcggcctcccaaagtgctgggattacaggcgtgagccactgcgcccggccctctgatggtttttatgcactttgcagtgtgaaaacctctgctctacacctcctttatctaattccttctcatcttatccttctagcaaaggaggagatattttcaggtcccaagcagtctgtctgggatgcagttctagaacaaagggttgagctagatcagggctttccaaatttttgagactatgaaactttctctgtcgttttttctctctagaaacaccaaccattgaggttgagaccatttccagaggaagaagcatggggccatcatttattaaaatttatgaaatgttttgcgtatacttttcttgtataattcctaccactctgtaaagtattatatttgttttatagatgagtactgggaccagaaaaggttcaatatcttaccatgatcacctggctaggaaatagcaggtcagggagtcaaaccaggcctcctccttcctttaccactctgttagaggaggtaaaggggattatccccacatttagagtggacacaaacatgccacagccacatacctaatggtgaacctcatagtgacttctgggtccctgggccactgttctagaaatactatcagttgtgattttttgagccctgggagcctggagcttttgcaaggattgtccagaacaccaggctcacgccctccccaaggtcaattcgtgaggctctgctaccccaggaatcaccttgcaattggcgagcagccaaacccctcccttaccacacggaagagcttgaagaagtccacgttggcatacagagtgtcttctatccactgtagggtgccctgggagagggagcacagggcatagcgcaccgtctttgccccgcgtctctggctgaagatgatgaagcgctccaggagggcctcgctgcaggcgatgtccttcagcgccaggtccgggactccatgagcgaactgcagggagaagaggcaacactagaaactgccctgtggtaggaaagacacccacgtcctaacccacagaacctgggaataccttgtgttacatggcgacaggaattaagatcgcagatgggattaaagccactgattagctgattttaaaataaggagattattttggcttttctaggtgggcccctgtgtaatcacaagggtcccttaaatgtagaagagggaggcagaagaaacagagtcatgtgatgtgagaaagacttgataagcccccactggccttggagatggaagcagaccactagccaaagaatgtggcgtgtctctggaggctgaaggaggcaggaaaatggatttttctctagaactccgcagtaaggaatgcagtcctgctgatgccctaactttcagacttgtgacctccagaactgtaagataatgcatctgtgttgtttgaagccactaagtttgtggtaatttatgacagcagcaacaggaaaccaatacaatccccatacctcatcttatcagagtgccatttacaattcaagggatccccttcttacagcatgatgttacagtaccatcaaggcttcctctctgaaggtggggttgagaagtagctagaacaaatttgctcttggatttagcaaacaaaagcaccagatgcccagtcgaatctgaatttcagataaatgaatactttttagtacaaatatgtcccaaatagggaccgaatagaacacaattatttgaaaaaattatttgttgtttatctgaagttcgaatttaactagacaccctgcatctatcttgtctgcaggccctaagccctgcagagtgcacattctgcagctcctaggtagctcaaggatagtggttcttgaagtacaaccctcgtgatggcctctcgaggatcaggtggcaggggagaggcctggaccttggccagggacctgtggccacccagcaccttaactggctcctagagtcctggactcccatagcattggacagacactgagtaccgtgggcaaattcgtgagattcccggggcaccacagtctcccatgacatctaacgacgtggctctctgggctggagggcagaacaggcctgagctctgccacctcctacactgtccagactacacatggcagcctggtccccacacgaggcacaggttacagctgaccatgagtcggtgtggacactttcgatctcagggacccataaaacatagtgaaaccagagcactgaagagggtgtgttaagaatagccactaaaagcagctagtatttactgagagtttactatgtgtcaggcgcccttccaagtgttcacatatattatttcttttaacttcaactgccatgctggtaggcacttttactatttccattttacaaatgaggaaacgagaggcacagagtggttaattaacttgcctgaagtcacatagctaagtgtgtggccttgtgagatttgaacccagagcttaaccatcacctgttaactctccagtgagtagggaagagggagaaggcaggacaaagaagggtgggtttataaattatttcactgaggaggcaacatctgagctgggccttgaagcatgtccaggagtttactgggctgggggtgagccagagaactgtgcccctgtcatcttctaattccctagatggagagagggaatggtgaggttccttctgagctgtgctaagaccccaggcagaaaggaccaggaggggtatccagtcctgatggtaaaggacacaaatccatgttcaatgagcatgagtgacaacacagaggcgagctcccatgttggacagcgcccagagagaacgttgccatcgtgatggacagttctgggaacagtgctgataaggagccccggaactggatggaggtggagatacagatcaggagctagaagacaggtgagcccacaaggcaaagcatcctgggaagtgggcagggagggccgggttggctggaacgtgcctctgcgaagcgcagatggctcagcgtttgctaatcagcagagcatcagctcatcagagccagcaacatgaaataaaggcacaacctggtgaccccggcctccattctccaacatgaaaggccttggcactgatgccagaagcacagtactagagatctaaatgtcacattagtaaggaactggaaagaaatttccccgaaattcctgtccttatcttcatctcccttttattaccaactggaagtcatcaaggcattgtcaggacttgagttttacgagctgaagagaaagcaaaggggaaaatgagcaatcggtgccgacagcaccccctctgtgggggtgggagaggaagctaaacagggcctggccggagccgcaccacccagggcctgggcactgcaggcgccaagctcaccctgcctccaggctgaccctaggttccccttgtctagtttcggtgaaaacctcagggtctgagaagccagaaaagcaggtatgagctccttcattgtgcagggaaccagtgtgagaacctgcttccaggagctggtgctgaccaggtggggtggggtccctcactcctctggactcagacagcaccctgtgcagaccttgatctcagggttaacacaggctctgaagttctgtttatgtctcgttctctcctggagtctggaggaggatcagacccagccaggagggagtcgggagggtgtctgggatatcagctgctgcagatctagcattctcgctgtgttcatcacactgaagaagctgggcggggagcccagaaggcccagaggacagctgcagctctcacacctgagcctgcggaatcacctggagggcttgtgaagcacagattgctaggccttatcccagggctttggacccagttcacctggagtgggccctgataatttgcattcctaacaagctcccaggcatcgctgatgctgctggtctctgggctttgagagccacaggactgaagtaagaaacactggattaggattgagaggacctggattccatctggctctgacaatttctagccctgtaactgtgcacaaatcaccccatcaccagacgcgcaagcctccttctctgacccatctcaggattgttgtgaggagtaagggagctaagggatgtgcaagtcgtgagttagtggtaagaatgctctgcataaatagaggagattatttaaaggggttagataaattgggggcgtatacacaggtcagaaatgtgccaggggatagaagaaggagtttgcctggtgctgagaaggaagtggtccaggaaagcagaagtgggctcttctgcagcatctcaggttctgtagcctcgggacgccaccccagcacttgccagcactgtgctggcagcttccaagcccggaactcccctctcacttactgtgtggctgacagacaactctgctcaaataccacctcctcaggaaggccttcctgagcatcccccttaaacctgcccctccgtccctctctaaccctcgactctaccggattttccttgcagcacccatcacagccagaagtcacacagcggagtctctgcttacctgagcatcgcctgtggccccactggaatggaagctccctggcctggggttttgcctgtctggttcacactgtgttctagtacctacaactgtccctaaatatttgagtaataaatgaatagatttctgtttcctcatctataaagagaaggttgtgccccatgatctctaaggttccttccagttataaaaacctgagatgttttaaggtcaccaggatgtgtacagcttcgaatcctatgttgaaaatgatcacgatctcaagtgatcccccggtttttttctaaatacaaggcattaagtgatggattctgaatgtgaacacaaggaagaaagaagaaaaaagccaatatatttcttgcctttctcaggctgggtgcttccctcccctccagggaccactggccagtgacatccccctacctgctctggacggacttgagagttgatcagaaggtagaccactgagtcagacaggccgatgtttttaatgagaaatagtgtcagtgtttcttcatctttcaagatatcccttattcgtattcctcttcctacatatgaataagagaaagaacagggtgttgaaggggaaatgggtcaaaaaaaggaaaacagccagagtcgattggaaacacttgtaactcaactctcagaggaaggttctgttcttggggtctctgggagcccctagaggtgaggctcttgccagtgggctgcccccaacacattgactgctgaagcagctgggcccaatttagtaagaaggtggaaaaagttagccagggctggatgggggtgtcagatgctttgtggggttggtctaggacagtgcttctcattgaggtggggctggggaactgaaacaggggaatttcatcctcctggaaatatttggcaagatctaaagacatttctgggtgtcacaactggggaggtgctggtgggtagaggccagagatgctgctaaacatcctgcaaggcccaagacactcctccctcccccacacaaaggattatctagccccaagtgtcagtgatgctgaggctgagaaactctggtctaggattggaggagacacgtgctcttcccacaccgcagctgtcacagggtagaggacccctctgggtgtttctatcatctcagcttgggctgagatgctcagggcactgacatggactaagagaaatgagttggggccattaagggcaggaaaagctccaggtagaaagaggagagccaggcacatgccggggcttgcctgatgagccctagtcaagctccctccagctcctctcaacacctgtgggaagcagggtttctttataaggaggcataaagaacacctaacagttaaggtgaccttggggcaagtgattgagcctgtccccgtgtctgcattttccacatctacctcataggattgttgatgcggggtaaggaatgtgaagtgcttagctcccaggcctcaaaacagcactcaataaatgcttattatgatcgaattaatataattcttacccctcctgggagattcacacaagcaccctcctcctcggctggcttccagggccaatgcttggcctcaaccctgctagtgctatagttcatgaggctctggccagagaagagccttatgggcctggatgtctacgaagggacttcaacacaaagggaaagcactggggtgcgtgaaaatgccaatctcttcaccccgagtgcttcaggggcatgggtgactgtttatctcccagttcttctctaactagctttaaccatcacatgtccccattctttcctggtcccaattccacggcatcccatcctcttcctctccaaattctcccctcccccagtggccaagaggcctgcccctgtgtgctggacagccacccttctcatccccaggttgtgcctttccctgaacagcaccatatccggatttatgttgcagctagtttcctctggaagggtcttgcgccaaccccacaggcctgtccatgcagctggggcaggggaagccggtcttgaagttcgaccacacagtggcacagtggcttctctcacagtaatgggttccctgagagtggtgcccactgtcactcccctttgcataggaaagatccaaggactttggggaaagctggacacagggcccgaagggaggaggagggctctgagaagggctgctcccttatattctagtcttccctcttcaaaaacataaatccggctgtcttccaaacccagccctcctgcttttcctcctgtccctgggtgccagctccattgttcttttcccaattaccccttcatacacagccttgtacactctcactccaccaacaccatccccaacacacgcacacacacacgcatgcacacacatgcacacacacatgcacacatgcgcacacatgcacacgcacgcatatgcagacatacacacatgggagatctcttgagagttgggggctatggctcctgcttttattatactcctcattgtacctagcaatgctgggtgcacagatgcaagcccttgaagtcacctctctctgacacccagcattaaagactgacatccaatcagagtctcaataaatgtctgttgaatgacatgaggcattcagtaaataactgttgtcttgacctgacagtcaggactccatttgactgtttatctcttcgttattctttaactcactcacctgaccttacatacaaatatcttgctggggagaaggggcaaaacaagaaaagctgggagtgatgttgcccaggcttggcacacaagaccacccaggagacagggctgctgtggctctgggggggaagggggagtgtgctggcttctggtacacctgaggagggcgggggcccaggtgaagaggaggccgataccagacagaagcttccctagactcctgagggagaaatgtgaactgggagcctgaggaaagaaaaataaatttcgtttaaaatgtggttcttcttgttcccttccctgggaagattagaggcttgggggtggggctgctgaggccccaggagctgagggtgggggtgggagggaagccaggagaatgtaggaggctcccgggaagaaggtgttttaaagatgattgagagaccacagagcttgcttcgagggagagggaagggggctccatgcctggtcttttaccattaatcctccctgctgagaatgcagtactgcaggtttgccatgaaagaaaacctctgcctgggtcaaccagcggcataccttcccaggtggctgtgcagaagcacgcaccagcaccagccccgccacccccacccgctcgctttcaaaggtgggctcttctgccacattggcctgaggagtccgtgctcacagtgagcagcgccccggtgaatctcaacagactgaaacagcctgtgttcctgacagtgcccttcaggccctggcctgggatttcctcaaagaccgtgtcccttacttggggatggacccctgttccctctcacagcctctaaggccagggatcttgcagagcccccattcctagggggccgtggccaacctttcctgagcccttgtccccagatttgctctgttagggacttctcacagcccgaagcctgcagaaggaaccgcctgcataccaattcaaaatcagtcctgctctggggttaagaagtagtgattttggttctcatatccacattgtaaaagccacagagaaactgtggtttgaaattacttccttcacacttcctcccagcaggactcaatctgatgatcaggcacttaagtgaaatgtctgcctcatcatcaaacccactggatgcatgaggtatgtcatcccgccaggagctggacagcccacgtctgcatctgtttgtttaaattaggaaaaaaacaccttctggttggtacacaggggaagggggatttcttactattaaaatggtaattgtactcataccatataaggttcctcaaacttgggctcactaaaataaacttctacccagggcaacaaagaatggagtgtttgtaatgcagtttgtagaagttactacataaaatctatggtttactagtttgaaacaatgagaacgtaattcagcatcttcatacaccaatctggtcatacgcctgtcctttctcacttggatggggagagagggcttcagaaggtggccagatgggaggaggatcagattctcctcggagaagtttcccctgttgactctcctgtgctcctgaatcccctccttccctccactgggccccacacgcgctgtggtcattttctgctcactcatctctcaccttctgccctgtgagccctctgagggctggcatttgcctgactcatctctccacccccagagactagcccagtgcctggctcacaggaggcactgaaggtcgactgaatgttgaaggagctgcacgcatgcacgggaaggtgcccccggggctgatttcaaccattctcccacatttcttgtttggaacctgcagcagaagctgttctatcaatacagcctctcccattcccctggtagaccccttggtgacccctttctcatccctgttaacctctaaggtcatccttagagtcaactccctaatcctaggagcacacatctcccagaagcccctaacagctgctttcgtggcctctgagccccgtttcctgggcaatctcccccagagcagcctttcctcagagggcacgctccacacccaaagctgcagcaacccctggattttggggggctttacttcctcacgaccactcttttcctctgctcttgcaagtgggatccagtggccatgtccagtccctctagccatccacagaggagcctactacacacgtgacagcacacaacacccactcacactttgtaaaggcacattggtgttattactttcggattgtttcttgttcttctcctggggaggagagacacaggagagggagcctcttcatcctttctcttcactcttcctgactccaggtggctcccaccctggtgcccagctcctgccatcttcctgcacaaccgtggtgtccgtgtggggccaacatcatcacctcccatttcctccttcccctcaccatgcacctgcacctttgccccacttcaccatggccgcatctgggggccagtcatcacccaccctaccttcgaaatcctgaattcacatatttcactttctgaccacagccattaaccttttcatcttgttcattttctcaatcacttaaacagggtcatggcacccactgagacttctattcccttgcctcttcatttcccccagtccatttccgtgctcatctgccttctcatccttcctcgtgcagcctggacttgatgcatgtagtccagtccctgccttcagcccgctgcctgttgaccttctgtggtgcctccatacacacccccagccctgcatcacccactctccacttgctctgcctcggggcctgggtgctaaatattactgggagaaatagtacaattatgcatatttatgtcatgataatacatgatctctgacctccctggctccttaatgatagttggccttgctgcttcatgttcctggttagctctcgctctagaactctgtgagagttgctctatatctttacgaaactctgtaaactcgtctcccctgcttctagcccttgacctagcctcatacttcccatagtgccatctctcttagcattctttctgtctctagacttaacgtggatgagacctttcctgccttccttcccaacttcctaccttccaggcttctgtggaggaagaggcatcttcaccaaggtgatgttcaagccgcctccagaccccatcccttcctgcctccgctagtatatttttcaccaactctccctgttctttcctatatcttcagtctctccataggtgagggaaatgatgcttgagagcactgcagtcatgcttacctgcaattctctccgggtgagtccggagggtgtccatgaattgggacaagatgtgtagctctgtccaaatacggccaaggtgctggctctctggtgcattcatgaggagttcttgaaaatctcgatatacccttgccaagctgtaaggacaaagcctcattaataaggaaatagctgttatttttataacagtaataatatctcatgctattttttttttttatctcgctctgtcacccaggctggagtgcagtggcgtgatctcggctcactgcaagctctgccccccgggttcacgctattctcctgcctcagcctcccgagtagctgggactacaggcgcccgccaccacacccagctaattttttatatttttagtagagacggggcttcatcgtgttagccaggatggtctcgatctcctgacctcgtgatccacccgcctcagcctcccaaagtgctgggattacaggcatgagccaccgtgcttggccatctcatgctatatttaaagatactatgtgtctggcctagctactacattgagtatccttacaatactgccaaggcaggagaaagagataattttacttccttgtacatataggctaactgacaaggatggtgagcgatctattcagtctcccagttttggcagggtctgctcgcctctcggtcccatgctctgtgtgtctcttgcccagagaagccttaaacagggtgacattggtggatatcactggagggtttatccagtttttacccaattctctgagacctgcccttccacccattcacgcaggtaggctctgacagccatgcttcatccacaaggacctccctgcacacacacattggcacgcatgcacatgcacgcctctgccaaggctgatgggacagggagaataaagctgggtcaacccgatttgttcccaggaatttggatggtgttcagagatgagcttctgattgcccaggccgaggtattgtgaattgcatgaacaatggcagcccaggcattgaggagcaggggagactggtccatggagagaggtgaatggagtagatacagaggccagggctggcaggcccagatggaagagagttgaggaagcagctcctgacagctctccaggtcttggcctgcctctcctgagccccgccttgctgcccttggctctgtgagaatgtctagtatccaaatcatagatttccttctggggtttaagattgcttgaatgggtttccgtgccttgcaagcaaaagaaccttgaataagccaatatttcactcataatgtgagtgcaaaacatgaaacccaactttccgggttcaaatgccaagtacagctagagtctggagcccccttctccaactcccacccctcagttttccgcaataacatctatagacactgccagggccgttcccaccaaagctccatgcagcctccactgagctgtcttcaggcctccctgatcccaccatgtgaccccacacgatctctctggatgggcaggtgtttcttaagctgaaagtgcagttgtaaactaaaactgcaaggcagtgcttgcagcaatatgagtcctgctaaatgccacttccttgactttgctaggaagacagatgtttcctcttctatcatctggtaatccaggggtcagcaaacataaaaattacaggcttacagatcatacagtctctatcacaactactcaactctgccattgtagggcacatgcagccatagtttgttcacagtggggaaggccacctccaatcattaggttgacctatcaaactttttttctttttagtctaaaagcaggcttctcctggaagaatcatactgagctcccccaaggaaaaaactaaagtaaccaggtatctcagttttcacctagcctggtgtttatacaggtcgggtaaagcctgctccccaacaggcctttgctggtggccttcaggtatgggctgcacaaggtgctgcttaaggtcagcacagtgggtgagggatggccctgtccacaccctaagcctctgtctctagaatatgctcccatgatgttctcccaatgctctgaaagggaattccgaaggcagaccctcttcctgtgggattcgacttgaattttgaccctagacctgaggctactaacctggcatctacaattccctgaaatcagatgtacagtgtaatgtttggtatgtggccatttttcttggaagaggggtcattggttttcatcagcttttcagaatagcctgcaggcccacagtgaagagccactgcacccgagccatattccgagatctcaccactccagggggccgatggcaattataacagaggatttggaaattgtatttttctcccaagaagtaaacttgactttgtaaacctgacttcatttaccttcccaatgctccctgacatttttcctagcccttagatgtccaagaaagcttttaaaggaagagagatctgtccaggttgatcagggtgagggaactgagtttttctcctacaatgattcactccacccaagcaggtcaatgaccagaaggcagtggacacatctctgcagcgggctgccatcagactccaggtcacattctggggatataaggaccaagaaattttgtgcacgtggccttagcttggagatttctccccaagtgccctgacagttaacagaatgttccagagaggaaacctgctctgctcctaagaggttaggggctcagcaaagccacaagaacactcagtgctccatgctccgtgcacgcacgtgtgcatttcagcacgtgaaggggtgtgcaacttcctcccctgcatggtagggatctcaacacttacatggagttgttatagtttgacacaattccaggagattctcctggggtggggctttgaaaacagggattgttcacattgcagaagatcccctggagccacggcagcattcctgctgagggcatcgccttgttggggaaatggcctttaaaacagaaaatgaggacaagacgggattagtcatggagaccaagcaggatgcagacctaggagttggcctttttgggaaggggcccgggcccctctgatgtcctccttcattctcagcatttaagaagcaggagcatctcatgtgtgccagtccctgtgctgggtgctagagacatggcctcttctctcaagctcccggtgtagtggggagacagacggatgttgtaataggcatgggtggaaatgtgaaggggaagcaaggggggacacgtcattttgtgccgagaggggcataggagtgttagttcaagaagactccacgcagttgctgctgctgcttgagcagacgctcgtctattccttcaaccacggtgaactgagcacctaccccaagcatgcagtagggctgcaggttatgggctcctcggggagaggtaaagaagagtctgatggacaggaggctgattcagaactggggcctgaaactcatgaacgagaaggtgaagatcaagaatagaggactgggcagatttgcataacgcttgaggcttccacattcaccacatagagggccggaaaccaggtgaaggctttcccacaggggcagagtgtaaaagaggctctcactaggttcctttcaggtctgcagacacctcaggggtccaagaaataaaatttttcttcagtacgattgtatagcatctcttgtcctcatttttctctggcaccatgtataacatattctctatattgattcctgaaatattttcgagaactcatctacaaatctgttctctttaaaacgagagagtttaggtataaaaaaataaaaactagcaacaacaaagcaaacaaaaataagtgcacagtcccttagtaactacacacaagtatttgcttagaatgtgtaggattaaaacatgaaaatttgggctggacaaggtggctcatgcttgtaatcccagtgctttagaacgctgaggtgggaggatcacttgaggccaggagttcaagaccagcccgggcaatgtagtgactctgtctccacaaaaaacaaaaaaattagctgggagcagtggctcatgcctataattccagcactttggaagcccaggcaggaggatcacttgagcccaagagatagaagctgcagtgtgccatggtcctaacactgtactccagcctcggcaacagagtgagaccctgtctctaaagactttttaaaaattataatttgtgtaacattgataaatctgttacatgcatcatagacatgaaatgatgataagcagatctgatccccacactcccaccccaagatctttctagacaaaaggcccagaccaaagtctcttcagggcttgcccaagctaccctgctatgcttacattcatgatggctgtagagtgggttggcattccttaaccagatcaagaccagaaataaagataaaggccacacgagttccaccacaaagcgaatctggaaaaacaaaacaaaaagagagaaagttcagtggtgctaagagattatagaaaacgtaaccagagcagacacagccctcctcagatcccatgtgtgcagtaggactttggttgtggtatctttacctaaacagtttccttcctttaccccctccccaccatacaccctctaccttgttttattatatcaaccagattttgtgtccatctgggttccactctgcctctattttagaaaactgcattagcatgagactttcataaaggatcatcaagatcatctgcttcagtgcattttagctgtcactatgcacatgaatgcagatttgggttcagtatggccccaccagagcttgcatttctaacaagctcccaggtaatgctgatctaacaggtagtaaagatttctctgtagccactcactctgcagttaaggaaagaggctcagaggaggcaggtgacctgtgcagtgtcacatcagcagtggcagcatcagaaccaaaatccagcctcctgtttctggggccagtgtcctttctggccctccccattaccttgcccttgcaaatgtggtcatttaatgaatcagtgaatgaatgagtgaataaatgactgtgatccattgcaaagccaacaaaaatctggcctaccaacatgcttccttcaagtttctattgcttaaagaaacaaagcagggcacactgccatgggtttttacattggaagaggctgctgatgttaacatatggttgaaagttggtatttaaatttcggttccatttggagcttaaggactcttgattccaaaagcagatccagtggctgtggcagtccacaccctgtggcattgcacataggggtgggggttggagatgtggaattatggagaggaagagggagagggacatgtgagttggagagtagaataggtctatgcaacccttactccagggaccttaggaaggaaacacataagatctgaaggagatctgaagcagctggccggggaatagcaagtttaatagatcagctaggggctattcacatggtctttcatgtaaccctttgttgttttcctctcaaagaaatgtaaataggctctcagcaaaataaaagacaccatagcagaggctcaataaatgctcctttcctgctagtaagaacaaaccatgttctgctttttaaaaaacagcctactggcaacaagattataagaaactaaaaaataaattgatgggggaaaatgatcgtgcattgaagaaagaaaaagcaaaaactatttagggacaggtggtgattatgtagctgtaactttttacaagatgttttactcaaaatatatatagggaggatgtgttggaggaagcgcgcacacacacacacaatatgggaagaaaagaatagactctccgtgaggcacttttttttttctttttgagacggagtctcactctgttgcccaggctggagtgcagtggcacgatcttggctcactgcaagctctgcctcccaggttcacgccactctcctgcctcagcctcctgagtagctgggactgcaggtgcccaccaccatgcccggctaatttttttgtatttttagtagagacggggtttcaccatgttagccaggatggtctcgatctcctgacctggtgatccgcctgcctcagcctcccaaagtgctgggattacaggcgtgagccaccgcgcctggccctggacttccgcttcttaacacacaccgcacttcaggttcatcactcctccaagtaagtgaagccctcaagggcagtaagcttcctgaggacaggaacctcatctgtcgttgtcactactgtgattccagcaccccacatggggcagaactcataataggtgcccaataaatatccacggaatgagtgagcctttgtcaagactggtctaggaggcttctccaggaaagcctttggtgacatggggctcaggtcaccaacagtctgtagatttaagaaacagcctcccccagggtcatgtacattggtgtcttgtcttccattctggatcattccatcagtgggtaaggctggggaacaagttcagtaagatagcaacgttgagtgataggagcaattgatgaaacctggaagttgtttccagtgtcttcaccaaagaaatgagacatccagttcaaatccaacacatttgactcctttagacgactgcttgcaatattggctttctatcacgtagatcggctgtcttccatgcggcaacatctatctgggagaggtctggtacgttaaacactgatgctgatttgggagttagtgggaagatctgggttaacaaccactttggggcttgcttaacctctgagtctcagttttgtcctctctgaaatgggactgctcatttttcctacagtgtacactcagggttaagagaaggttactctgaggtcaagttactggggttcctatccagcctgttccatcttagctatgtgaccttgggcagcccactcaactcttccgtgccaaatggtctcatctgtgaaatggatgtgataccaggacctacctcccagagcagtcgtgagggtgaaatgagacaattgtgttaaacacgaaagcacaatatggcatgaggtaacactcaataaacatgagccatttgttattgccttacagggttgtcgcaagatcacagggttgttgcaaaggcagaagagtaaggagacagaattaagcttatctgcaaccttgtaggcctgccctccacttacgttcatctccctcctttttggattcagaactccccagttgccaacttggaaccatggtgcttgctaagaaaccagccacacaccgtcccctgctccatatataaagagggagggctgtgtatcagggaggggaccagccagcttggcctgcctgttccaggggtaaaatttccaaaccaagctagtgcattgtcatcctcccttgcaaggcttgtcacgcactctcctggcatccacccactccctcactcactcattcttgtatttttgaagaatctggtctccacaaggcacggtgacttaaaggcctcctctcaggagtaggggagggatcagcacctcctttctcccttccttctttgtctggccctaggactgttcccacctcacctgtgccctcttctcatccttgaattaggctgtttttttttgcctatagtccccgcccctcaaatcatcacccctgttgattaggtcagcacttctcatgtggctgcaggctgaaaacatgccggggtctcagatcataccccagatcaactacatcagaatcttggggcatgggacatcagggttcttctttttaacacgtctcaggtagttccaccgtgcagccaaggttgagaaccgctgctctaggtaatggttggttggtaatctttgaaaaatatttgttgagaggtcactgttgttctaactctgtgagagtgtgtttgtttttggcggggggcgggggcggttgctgcatttcacgcgtcactccctggtcaaagaccaccagccattcttttcctagcctgacaggtctggttttcacaatagcctcttctgccggcttccaaaatcatgctcagcttcccctccccagagcggcatccctgtccttgacgcttaactgcgtacaggcataccccagggagaaattccacagtataattaaaaacatgttttctcagcagctcagactccccctaccctgccctttacacatgtctgtaactttaattaagcccagccaaggctcagaagggctggtggaaaattcttttttcccaaactggtatttccttctttttttctttttcttttcttttcttttccccttccctccctccctcctttctttctttctctttctttctttctttctttctttctttctttctttctttctttctttctttctttccttttctttctttcttcttctttcctttctttcctttctctctctcttcctctctctctctctccctctcacctcccctcctctctttaccattcaatcaacatggggaggaggggtttctggcaagggcacagttgtgcttgttgttttagaactgagcctgttaaattttcttccttcctgctctgttttcaatttaacagaaggcagccaaggcctaaaatgagccccatgattcttccttctgcactgagaaccaggacagaattcttagcctggacaaacatgacccggagcctgggtacactggagttggtgcccagcctctctttacttgccacatcctcggcttgatgctgaacccaggacaaaggccacagctgtcccaggtgctccagggtgtggtgtccaaaacatgattagcgccccactttcatgagtcctcaggcccccccacagatatccatcctaacccagaagctgggatgaagggatgacaccaagagacccacctagtgatcttcataaaccctccctgacacagcgccaggtccacagccaacacgggcagatgtatacttgtcttgtgcagtggagagagcgctcgtcattgggaatgcacgttatcaggatgaactccttgggaagtcttctctcaccctctccagccccggtgcctcctctgagctcacagacctcctcctcacctcccatccgtgtttccttctactccacggtctccacgttgtgctgcacagtaattatacgtgggagccgcccctgcctggttctgaactccatgaaggcagtggctgtgtctagcttaccttggtatagggcaaacacacgtcccagttttccaggtccagtgttggtttacatttattgtcccagtgcaattattaatagtgctccctttcacttgcaaaactgccctgattggatgataaattatatggccactctatcttagtgatatcagtgaccagactattggatagatctcgatccacgggggtcagtgtggtgtaacggccatgcctgcctgtcctgggtcacgcagcatgggtgtgaatcccaggtccaaccccaccagttactaatccttctctggagcctcagtgacctcatcagtaccggggggatcacagagaggcctctctcgtggaactgttcggagagttcagggaggtgatgcacttagtacagtgccagacacttagtaacacttgacaaatgttaacagaggaagaaaaaaagagggaggaaagcagagatctgaagattttcatcttatgcccttagggattgggagctgaggaatgaggaaatttggtatctgattttactcttgctctgcttacaggagacatggaggtttgagggaaaacctgggagctgaattatgggctgggtggttgtacttttcttagagggaccatcttctagaggcagaagtttccagaagaaccgcaagcttaggaaggagccacagatccctctcagagctactgaatctgttgggggtgcctctgtcttacccagacatcctggaagctcctggaatgtggtagcaggtggggagccatcgggaggcgtgccagacagaaatctcaatttccaggccatcaggatggcatccagtgaacgccagcccagaccaggcccagccctgggaggtgccctggccaaggccctcagcccgagtggctccatctccctgggagcacactgtggagaaggcagagtccctgagcaggagtcgcccacccatgccagcgaaaggccagattgagagggagggcaccagagcattctgaaaacagggttattctctgtcacagcgacatgagcgccacaggaatgggctcattttaggccagcagctacagtcctgttatcatgtgaccccctttgagggtcacaaagagcacagtgagaataaaatgaactgagaattgtaatttcttatgggaaagagagaacaatggcatattggattttcctccgcagtccacagatgcctcacataggcaggggctgggaggtcttgttgccattgtataccaatgaacctagcacggtgcctggagattattttttgatagaaggaaagaatgaatacatgaaaaaatttaatcatgaggtttttttttccagttttatcaggattttcatgcaagaagggaagctcctagaagaaaggactgagtttctgattactcttaatacttggcccctggagacaacagataacttcagcaccaggcttgacagaggaaagtgacctgaggacaatggtgcttcccagacaagtcaggtttaacttgtctcttccccctgcagcctccctgcgtcctgggccagccacacacaggttttggagccatccatgcgcatggttgaagcgtgtcccatgctgctctcttttatgctggttgttaagctattgtccctcggccccacatgcaccaacctgccagggctttctcctcaggggtccagacccgaggtcaggttcagagatccagcagcagcctccatgcacgccttcctcccaagtcctaatgtcagctccacagacctctcatctatgctccaagtcttaataattcctgtctcttcccttggttctctcagccctaggggtgggagctgtgtcctgcaattgctacctccatgataccttagagtttccttttactctctcaggtaccagctctgtacttagctaacaccttttcatattaaactctaaggagaccctaactgagacactcattcataggccttcacctgttccagttggccccatcacctacatgaacttattctgaaccgagatttggaacaaatactgttctcttctcgcctaaagcaggtctccctccctttcctcctgatctctccagtggcttgcagctcccagggtcctaatctcacccctacccagcccccatcccttatcccctccttcctctttcagctcctttagtcatcggcatttgcacaactctgcaaggctgtagcaaagtgcattctttctttacagttctatagtcactccttatcctttcccagaaaaaattgcacaaagccagttgtcatttacaagtacagtcttggtgttctctgatctccggcaccttttgctcgcacttctcatggactattccacctatgctactttatgttgctcttggtctccaaacgtactttgggttttcccaggcagaacagaagccagtccagggtggaatctgtgtcgtgcttttagggctccagtctaacccaggctggtgtctgctcattgaaagagttcaggaaatgtgcgtgatggttaataacgtattgcatctcacagaatctaggacgcagtcaattgtaagacacactgttacttttctgcaccactaagaaagaaaaataatgtgtccagttaaactgtgacttgatcgtgagctgcatcccaatttcagaaatgctaacatgtgaaaaaacaatgtgcctcagagaatcaatgaaataaggcctcactaagctgggaagctgttcgagggggttcttgcttgcctttggcctgctcttcagggcttaaagttcttcccactgctcagcgtggatgccctagagagcggtagactggacaggcaggtgtaaaacggggggtgggggaggggcgggcaggcaatggattgacaggcacggtaggcaaaagattttcatgtggctgaggacagagaaacacatcttcctgggaagggcactgtcagaggggcccacagaaaggccgtccagctaaacactgcttcagtgctaatcggcgacaagcccactgactgctcacaaccccccaccctgccccaccaccctaccccaccaccccaccccacacttccaacctgtttatttgctccacacctcatttttaaaccacagacagtaactgttaccttttgccttttccgcagggtccagttcttccagagcaaaagctgtatctgtctcacgaagcccatgctaatgaccacacgaagaccagattggtcagagctgaggcccctcagacagcaaaggacataaacgccgttaagagcgcctctggctccggacgctgtgtccttctcctggtgattaaaggctacttttccccttcaaagcataatcccttttaattacacataagcccttagttggggagaggaggccgacactgtgttggctcccttttatggagagaaagagaaccctaaagacacaagtggctgggcaccagggaaattgaggtgggggatgcaatgggaaaccaagaccctcaggcactctcctccatgagaggggttcctgagggggatgtctttaggtatctttgaccttaagtttggaacaaaatctctttgcataaatataggctgggcatttgtcctcggcaagagcctgccatgagccggcagtcagggtttgactggccctttaagtccaatcgactcactcggcagatctgaagtgatccctccctcttttagtcttttatcttgctccgtaatgactgaagtcattatggtcagctagttgggttatctctgagcttagcagagggtaatgatgtttatctcttgtgctgaaattgatcgactagtagtggctgcttggtgctgtgatggaaaaggcactggaacactccaggcccagcaggacagagccgtgactgacttgcaatgtctgactggggtgcgggtatgaggagaggcagcaggtgggcccattactgtcattccagccctgcaatggggtggtgctgggttgactcatcaccaggtgggggatctgtgatcccaagggacaccccaaacagaagcctccctggcacttcgcagtggaactttttgtctctgcctcctcaaatctcagaatgtgttctctttgaaagactctagacccttgagacctggatggggcggagggagaaccacagagaggaatggatgctgacttcatagagtttgcggtctggttgtaaacacgggacttgaactcgaataactcaaggagtgtgatgagggcccataggctgtgcatggtggagcttccaagaagagagagatagtttctgcttatgatggcaaaaaggctccttggaggtgatggcatttaagacaagcttgcagaattacaaaataatattttatagtaagtttattatttataaactgcttttgcatatgttatttcattttagcctcactacaattttgtgaggtccatatttgctgttttacagatgaggaacgtgaagcttagtgagattaagtactttgctcacggtcccacatggcaacggtgggtacttgaacaagtgagtcatttaaactctgcaaagacagggaggaatagcttatcttgcccaggaaaaccacaagtgaaacatggctggagtgaaggctatgaggctatgaatggaggatgctggaaaaggagacaggaaccagactgaaaaattgatgatgatgatgatgatgatgatgatgatgatgatgatgactgattcaactgagatttactgagcacctgtgaagtgactggagtggcccacaagtgcaggctacccccaagcaagctctggcagaatcattaagaccttgttacatgctaaaggatatgggttttatcatgctgaagatgatgaaagattttaatccagtggctgccaagagtagtcagttcacctcggcagcaatgtgggggtggtttggggggagccagagagcctgaaccatgcagtgacagccatgatggagagaaggggagggactggagggataggaaggaatgagacacagcagtgcctgatgagttactggaagagggtggtgaggaagaggcagaagtcagctagatggagtttggggcttgactggctggctagtgagacggtggtgctcataactgaggagggaatgccagaggaaggccagtggggagtaggaggcagttggggggaacaggggtttgcatttgatatactgaagctgaagttctatgacatctgaccacacgtattcagcaggcagttgaatacttgggtctggagtcaagaataagcttgtgagatggagacatagatttgtgagtggtcaacatataggtggaagattaagtcccgggagtgattaaacaggtgacccaggaaagagaagcttggagagtatatgaggttgctgaaggggagccacagctggtgaaggaatatgcctccttccaattcccaaagacatcagctatataagtaatgttctgtcatagtttcaaaatggtccattcttccttgagctagaaagttaaactatgagcactttgttaatattcaattgatgatgctctaatagtattattcgcatctaaccagtttccttgcctgaacaaatctgtttgttgagattgacacacacatgaaataaaatgtatcatttgaaccttattttaagtgtacagttgagtagtgttgatacattcatattgtgcagccatcagcaccatccatcttcagaactttttcattttgcaaaactgaaactctgtatccattaaacactaactccccagagttccctccccctagcccctgccaaccactctattttctgtctcaatgaacttgactactcttggtaccccatctaagtggaatcatagaaaagcataatctttaaagttcatctatgttgtagcaagccatcttaatctgtttgagctgctataacaaaataccataaactgggtggtttataaacaacaggaacttatttctcacagctttgcaggctgggaagtccaagatcaaggtgccaatagatttggtgtctggtgagggcctatttcctgacatgtagatggtaacttcttggtgtgacctcatccagtggaagggaaaaggggtctctcttgggcttctttttatgagggcactagtcccattcacgagggttgtaccctcatgacctaatcacctccacaaagcctcacctcctaataccatcaccttgggggttaggatttcaatttatgaattttagaggaacacataatttagaccatagcagatgtgtcagaatttctttttttgttttttttgttttttttttttttgagatgcagtttcactcttgttgcccaggctggagtgtgatggtgcaatctcagctcattgcaacctctgcttcctgttcaagcgattctcctgcctcagcctactgagtacctgggattacaggcaggcgccaccatgcttggctaatttttttttttgtattttaagtagatatgaggtttctccatgttggtcaggctggtctcaaactcccaacctcaggtgatctgcctgccttggcctcccaaagtgctggtattacaggtgtgagccaccgtgcccggccagaatttctttcctttttaaggtcaattaatatcctattgtcagtatagacctcattttgtttatccattcgtccatccagggtcattcgggttgtttccaccttttggctattgtgagtaatgctgctatgaacataggtgtacaaatatttgagattctgctttcaattctttggggtatatacctaggagtgaaactgctgaatcaaatggtataactgtttattttttgaagaactaccatactatttcccttagcagctgcaccattgtactttccaatcagcagtgcacaatggttccagcttttccacatcctggccaacacttgttatgctctgtttttcttcttatcaccaccatcctaaagggtgtgagatggtatttcactgtggttttgatttgcatgtccctaatgattaatgatgttaaggacatttaactcttttttactctttcaatattatagatatttggtaggatttttctcccaaggtaactccagttgtttaaaaattatgtcaaactaaaagctgtgtttagttttttcatatatttctgaggatatacctagtgagtcaaaaatgatactgataactgtacatttcattctcatagttatcaccattaatacacattgatcagggtgaatatgaaattgatgtggtcctggcagtagttttgagctacgaccctgcacatagattaagagttgtggtgttaagcgatagaccatatcaattcacatttacattcagaattataaacaagtcaaggaaaatggtgaagttttaaagatcttctcacttctattcctgagggttgaactaggaagaggcattctgctacttacatcagttattctgcaaacaaaaattcagtagtggagagaagtaatttataactttttacagtttctatttggaagaaaagctatggaaaaatatatagactaaattactttgaaattactgtaattttggagtggagataaatttgataatgaaaccaataccaaaagatcaccatcaattcacttgcaacaagctgaagaaaatagaatgtccccaaatatatcattagacatatgtttatttcaaacagtgattacaggtggaatgagaagacattatgaatctatgtcacaagcataaaggcagttttgggacatcataatgtaagatgaaaaatatctgatttttaaatttgattttatttctaccaaactcaaaactaaatcattgtacaattaaaacttgaaactccagtcatcatgaataacatgtttcctcagcttacgcaataatatttcatgagatgatagtgcaaaaaataaataaataaggctcagtttatgaaagttacacatagaaaaaactccaaggctgagtggaagctgccagcaggttgactgcctggctcacaaagatttgctcttttctaggagtgactccaacaccaagggaagagtctgcagtaggcttgttaatgccaaagtggactggtcatgtgcagtcacatgatcttagctgggccagtcagggcctattcacagaaatttggggcatggatctgtgagaagcatgggttaatcattacagaagtacagaagtgttgagaaattagaggccatgctgggtcactaggttcagtttgtgtacgtaggggcctaagcaaagactggggactggatttcacttgtttttgctaaacaagcccgggaccctggtatagggctgcatcctatcaaaggaggtacctttttcctttcacaaaggcgtcttctgctcaccaaactatacaaccacgaggctgcatccacccagaggagcaccttttctaatttgcataaaaatgccatataggctagcagaggacctgaggctgtgttccccaccactaggagaaatctgatctgcagtaacagagaatgaagggaatgcacagagaggccgaggtagagagcataggtcccagttgtagctgagtccctggttccagctgtccctgggagacagctgttccctcctcttcaggcagattagcagtaagacactccaatcctttcaataaaacctccttttgcctaaattagttcaaatttggcttccatagtatatgaataaaattcctgggtaggtccatgattgcaataataatataagtattataaatactaacataatccaatggagttgcagcagaatttaaagaagagaggtactgtcatgagtatcttcaagaaagtaaaagaaatccaaaatacccaatatcagcaattcctgcatctcttaagaaaaggcttacaagttttcaaaacttgctaagcagtgtcaagccaagtaggaagatgtgtggcaagttcaaaatacatcaaccattgcacattactagctggaacggaagtgctttcataggttacaaaaacattaaaatgatatcatctgattctccaaatcctttcatggccaatgaatcaagtgaaatatttgtttccaattctgaatcgacttttgtttaaaatttatttattgttcactcagcattaccagaattctttctaaagcgcctcaaagtggaactgtaaaaatatttttcctttgttttaaaaaatagaagcaatatcacatagtttaccatcagagagaagtgatggatatttcaaaaccatttggcacagagaagaggaatttttccagaaaaaatatctccaaaattcccatattttaaaatatctttggaggagaaaaaacttaaaattgtaagatttggggtaaggcatttccccctacctcctcaagacagaataagattaatatctaactgtagcttactaactatatcagtaaatttaaattcatactttttttctgataattataccaaaatgaaaataatttctgaattattgaataacaaaacacttaaaaaaactttacaaacttgatgcaaatgtaattccagaactttacttttacctaaaatgcctatagctcaattttacttattaatcaatcttgactgttctcatacttgacatggtcttattagtaagccatgtggcttggagctattgcatattgctttgatttggctggtcattgtagcaagaatggcatgcccaattttctacctttcattgctaggaaaatttacacagcaaaagaggtcccctcatctctaattattgtggagcagaaattaatgaccaaactaatagaactaaaggactcagtggtattgtggaatcattgggcccatcagctgagaaataaattttattttactaattgaatttcccctataaaaatcttgcactccagctggtactaatttcactttgcctgtaataattttggacctcaggttgttgttactattggattgacatgtagatattgaagtttagcttatgaaaatagtactatttgcaaaaacaatactcacttgaacattttcatgagtttttcttgggaatgagaagagagttactgcttttatgtctaaacaatctttgtccatcacctcctccaaatattccagagttcctccaaatattccaaatattccaggggactatgtagggggaaaggtctaagatggaaatctagggaactgattatttaaaaggcaggtacacaagtgttcatcacaacatcccttctaacagcaaaacttggaaatatctgtcacagaagaatggataaatgaattatggtatattctctcagccaaatctctcactgcagtgagcatgaataaaccacatctacaaaaatacaattttcccatacataatgctgagcaaaagaagcctggcagagcattcatagcctacatttacaaagttcaagcacagaaaaaactcatctctaatgcttgaagtcaagatggtagttactcttcgggggatctggtggctggaaggggcacaagaccatttctaagcgtgctggaaacacatcatcttttgatctcagtgctagttacgtggagtgttctgtctgtgaaaatgatcaacctgtgaacttacgatttgtgcacttctctgtatgtatacttcaatcatagtctgttatttatttatttatttttaaacaggtgaaggaagagaacccagtgagggaggctgagcaggatgagctagagatgatggagaaaagtctggaaagaggggtgccctgggagccacagaaagaggatgtttcaggaggaaggatcagtctgcagtactaaatggctcaagaaaggcctagaaggataaagactgaaagctgcccattggatttgacaactgacctctgaaagaacagttttaatgggaggcagaaacaagacagcagagggttgaagagcaagaccctggagatgggagctactctttccagtggccacagcagctgcagggaacgagaacactgggtccaggaggtcttttccctgaagacaggagagattgaaccacgttaatgtgtgggagacagctggttgagagagagatgctaaagttactgggggatggttgatggggttcccgaggaagtggaggaggtgggattagccctgggcaggggaaggggctccttgcattccacagacactgcaggaaaggaggccaggaagtaagtacgattcactgagggagtggaggctgagagttgagggagctcatcctcatgacttctaacttaaatttgcataggaggtcaataaggagattaagtcagataatgagaaatcttatgtgcagattcattgcctcatcttaactttgctctcctttgatcatttctaaagcaaagtgcagtttagtcagtcatctaaaatggaaaaaaaacttatagacagtgtgtagaaatcttagggggacaaattattcacagacaactccccctcccttctcacccagacacatacactcaccattatatccattttattaattggcaaacgacagataaagagtattgttattcagttcagcttgacagtttaacccaataattagcaccaataacaatgctttctggaaattgttttcccaggtacggtttcttctggcctaggacagctaaatccgttcagaggtctcttggccccaggaaaagcaaggtcgagtttgtgtcctgcagtggaaccaactttcttctcaatcttcagctgctttggggcttctgctggcaccccaagctctgctgaaggcagatcagtttggggtgactacacatatggaaactaaagatcggggaatgtattcatataaactacctggccaggcacctttgggaagtcttcgtggagtccagggaggcacgggggtagggtggagtccatataccccagagcgatgggctctgctttagcagaataaagctaaatcgggccgggagcggtggctcatgcctgtaatcccagcactttgggaggccgaggcgggcagatcatgaggtcaggagatcgagaccatcctggctaacatggtgaaaccccgtctctactaaaaatacaaaaaaaattagccgggcgtggtggcaggctcctgtagtcccagctacttgggaggctgaggcaggagaatggcgggaacccaagaggcggagcttgcagtgagctgagattgagccactgcactccagcctggatgtcagagcgagactgtctcaaaaaaaaaaaaaaaaaaaaaaagctaaatcaagttgttatcaaaaatgagaggcaggttgttattccaaacacatttaatacactcacttccaaagctgtttagagttttgccgatttgacacccagaaaacccacgggagtccagagattttacattttctgggcattaagtgcaaagtacttgccagataacagagttttagggggttgccaaggagtgttgcatagcagaccgtgagactgggctgttatcacatgagccgcagtgaagtgccggctgagtacagagtagggtaacacctgagaagcttcattatcagggccagatctgtcactctgagtctcagggcatcctgagctcagctgtggttgtgtatcgagagttggacattccaaaaggctatggccagaagcaagcaacccaacccaatgacaaacttaaaaaacaaagggaggcctggtgtggtggctcacacctgtaatcccagcactttgggaggccgaggtgggtggatcatgaggtcaggagatcgagaccatcctggctaacacacagtgaaaccccgtctctactaaaaatacaaaaaattagccgggcatggtggcgggcacctgtagtcccagctactcaggaggctgaggcaggagaatggtgaacccgggaggcggagcttgcagtgagctgagattgagccactgcactccagcctgggcgacaagcgagactctgtctcaaaacaacaacaacaacaacaacaacaacaacaacacatagggaaagagacgttctaatgccaataataattttttagaattagggacccagattaactcagcacatgcctttgtagtgatgcatttactatgaataagatgaatgatagtaacttgagtgactgtatggaagtgtgtgcttccttacactgccttcctttgaaggaagacttggcccctgcccgcaggaatctgtgatcaggaggctgggaagtgaaatctccacagacctggaacttgcatgtgcctgaataactttcaataacaggtacagagcttgcctcctggtacaatcttgcaacaaacaaattatcaggagaagcacttttccaatttatccactaaacggcaaaaccaaacaatgaccgaacatgacgttggtttttcagttactgtttgacctggagcgtggagaaaacagaaggaaaatggaaactacttaggcagcattttgtgaggaggtggaagcagcgtgggaaaatatttcacatggctcttgcctactcagcctgacaaagaaagctgtggtttgttgtcagattccttcaactaaatgtgtcaaagggagagaaacctctcttgagtgagagacctctctcttcaaacagatgcacatcgcctccctcctccctggctcacaccatccccagtcctctgtgtcctcctctcttcacacatgttggagctgggaaggagaacggagaagtggtccatatccttagctctgcctcatgtgtcagccttcattcctgccatctcgtttccggctccaccccagtgggatgccgcagggtcattttaataatcacaaggatagccatggaagcaacagggccccagtggacccagcaatcatcctaggatcccccatgaatggtgtgcaagtggctctgtccctgcaggcgacgcaaaaactttgatcctctttattcttttatgaaagtagattatttttaaagtgctgatcctcgatatcacttcattgataaagattcgagtgtgagtattgtgatattgtggaataccacggtctttggaaccagacaaaactgggttgcgatctcatatttgccacttagctatgtgaccttagagaggtttaaaagtctggaagctgctattaaaatgatgacagaaaacgtctgcattaaaccaggagcacctcaagtaaacacatgaagggccttttttcttcatcagtgatgcgtctttatctttctttcgactgctgtttaagctgctagattagattcagggaaagtttagacatggccatagaagtcccataacatagaaggctatattgcttttctagaggtcacatcaggtcaacactggtttcccaacaatgcctggagaggctgtcttaagcaaaagcgctgtcatcaaagacaaaacaaacctttctgtaaaatggttataactggctttcaacctttggcagccaagttgcagctagggaatggcagacccttgggcctgagctgaggagctaatcccagcaaggctgttacaaatcttttccagagcacttaggctttccctctgaaagatgttggatcaagacttttcggaaattctcactttttagagtagagactcgtgccccgtatagaagatgcagccatggtttgtatcctgtaagtgatacgggatgaaaaactgtatttcttagggtaggaataaaacaacccttcggggccatctctactaaaaatacaaaaattagccaggcatggtggcatatgcctgtaatcccagctactggggaggctgaggcggcagagttgcttgagcctgggagacggagattgcagtgagccaagatcgtgccactgcactccagcctggccaacagagtgagactctgtctcaaataaataaataaataaataaacaaataaacaaataaaaataaaacaactctttggctcccattgccttccttatggggttggtgcattcaaccagagtaggggtgggggcgcagggtaagctttggggagaatgtcaacagacctctttatttatgactattattactgttgttgaagacataatgagatcaatagagatcaatcagagatagccttgacaaacgcctctgagataagcctttgttttcaaacacagcaggcttttgtcagtgcttcctagaatcatttgtcttccacttttactatgttcgccatatccatggaacacctgtactttattatatttaattgattttcaattgactcacttaaaa

SEQ ID NO: 3 - DNA, 159602 bp, Mus musculus
ttttcagtagggcagtgatggcacacatttttaatcccatctctcaggaatcagagccagacagatctccgagtttaaggttagcctggtctacagagagtgttccaaaacagacagagctgcacagagaaagaaaccctgtctcaaacaaacaaacaaacaaaaacaaaaaaaaaaaccccactcttttgttttaaggactgggttttatctatactaagctggctggaactatgcagctgcagatgaccttgaattttgaccctcctgcgctttcctcctgagtgttgggattaaagctgtgtactactgtgcgttacagctacaccccagccccaagaatagcacttttatataagttagggttttttcccccctaagttttatttattatttcttaagtacaccgtagctgactccagacactccataaaatggcatcaggtatcattatggagggttgtgagccaccatgtggttgctgggatttgaactcgggaccttcggaagagcagtcagtgcgcttaaccgctgagccatctctccagccccataagttagttttaagaaaggaacagagaagcttctcatatgttactcgtgggggctcctgggataagggctggaacgggggtctacctgaacgtccatttgctaaaataaccatgtgacgttttcagtggggcagagtcggggaggagtccatggtggggccaaggctgacacacaacttgcagctccgcttctcaatctcttctctcttctgcttccgggcctcaaggaataatcgagaaagagacaggatcagggccagtgagtcactaaggaagaaggggggaaggctgcgtggaaatcaagttctctctagagagccagtttctccctcttgacacatttaatggaaggaatctgaaaacaaatcacactctttctttgtcaggctgagcaggcaggaaccacagacatagtttcccacaccgtctgctctggctcacagaaagctgcctcgggactttccggttcccttctgttgtcccaagctcaaggtcagatggttgctgaaaagcagacagcccttgtggtctctggtcgtcattagtgggaaagccgtggagaagtcactgttgatatctgttagtgaaagtcaggcgggcacctgcaagtcctgagtctatggaaatgtcactttccaacttccggaacataaattccccagggcagaggctgccatttgcctgtaagggttttttttttttttttctttgcctgcctttgtctcccaagattagcttgtttatctcattcatgttaagaggatcattaaaaagaaattgttctgaatttgtctggtgctctgattctcacaaattatttcctggcactagaatggctttctgtgttcattgtgtcgtttgctggtgttgctagcttctagccagagccttttagaatgtacgacccttggtgcccaactacagctgagtttagggactcccacacttgcctacagccccatccccaccacatttcccacccctctgatgcccattcagggctcttctgaccctagaagagtggtgcttagggtttccaggctatgcttagtgataacagcccagaccaatgctcttcttcgaaccacccctcctccacaggcccttaaaatgcttatctggcaacttctccgttatgtgtgtaatacccagaaaatgtaagacctttgggctcttcgtcttttctgaatgtcaagctagcaaaactaaatagttttggaatgaacaaataacatgctctgggggatatcaagccgccccctcgtttgtgataacgccttggtttagctttaccctgccagccaaagaggagttcctcaccctgggaaatacatctcctctaaggtgctacctcctgaaacccaggaagagttttccaaaggtagctgacatttctggtttctttccagctggattgttttcctcgggttagtgtgatctgagagccagcctgtttctactgacacaaaattccagagaaataactgggtctgtacgaaaatggccaaagtgcacagggagcctttggggggctggcaacaggcaacagaggggaatagtctgacctatcactaggcctcacctcccaagggccagcagctctctgcaaaggttcagttatcctggaccagaaagaatggcaaatgggccgggcagtggtggcggacacctttaatcctagcacttgggaggcagaggcaggtggatttctgagttcgaagccagcctggtctaaagagtgagttccaggacagccagggctacacagagaaaccttgtcttgaaaaccaaagaaagaaagaaagaaagaaagaaagaaagaaagaaagaaagaaaagagaatggcaatgggagacgaccagagtagttggttctgattatcggttaaatgatcaagatgaactgaatagccaccatctttctctgtgattttactacaaatgacagggctggagcgttggggaagaagagtggtagactgaagaatttgccccttggaccacactgtagacagacggttctttattagagatgtctgaacgaacatcttagctgagaagaaaaatcaaggaagtcaaaagaatgatgcactagtttctcacttttgtgaccacacaggatttccacagcatctcccttaatgtctctattcacctcccgctgaaggcaagggctgcagagctagctttgtcaggtcctgccctggctccctttgtgaagctgcacctgagccccgtggcctcctttcccacagtgtccatggaatgtaagatccccttcccctgcccaaggctaattcctgctgctgccatccttgggacctatcaatcactcagcagtaatgttaacatctctcattcagccggcttccccatatattaaaaaggtctctctctcctgtcctaagggaaatgaagacctccctgacctgctgtgatccctaggtatttactgcatctctgactcttcttctcaatcaaattgtatgaaagagcagctacagagtcgggtgcttgtggcccattctgcgatcctctgctgtctggtttctgccttttgcctcctgttaaaactattctcttcatggtcagctgtgagatccgatgggcagttttcagcctttatccttcttgactcttttttgagtcacttggtatggtggactacttcctcctccttcccctccccctccccctcctcctccttgacgcatttctccttcagtggtgtccagagaaattcctcctttcagactttctcaccccccacagtctctcgatccccctgctcagcagcctttagtgggttttcctcctcttcctgtagtttaaacagcctgttgaaacatcacatacatgcacatgagtgctcaagttaaatttgtaagctgagcatgcccatgtggcaagtacccaggacagacgggagagggtgcctagcacccctagaaacacaccaggcaccctttctagccactgtccatcctctaaaaggcaccactatgcctccttccagcaccacagataagttctgcctgtgtttaaactttatgtgagtccaggctgtaagagagctacctcatgctctgttggcttggtgtgcaggaagtgcccggtttttttttttttttttttagagttctagcttgttctcattgttctaagagagttgacagaaagaacataactcttagggctgacaagatggtttggcagataaaggcccttgctgccaggactgatgacttgaatttgattcctgggacccacctggtggaagaagagaattgattcatgtgaattattctctgagctctctcatgtgctgtggcacatgagacatgcccatatatatgtatatatgtgcaactttatttttttcaaagcctattttcaatgatggttcttaaatgctttaacctcccttctaacctgccacccaccagaggtagtgaaaaagaaaggatacaggggtagtggacctgtttagaaattgttctttggaacaattccatctgggctgtcaggaaatcagcattttagttcacaggtcagcagtggcagctccatccatttgcaaacccttcacggatacaccagcagtccagttaggtagtgttgggatcacagcagcagtagaatgacctaacaggaatggcccggcctcagctgaattgacaggagtcagcaggagggaccagggccaacaggagcaccagaagttctcagctgtgcctctctcagcaaagcaaagatcagctaagacaaaagactaacaagcattgcacagctagctgtaccagcaagccaggccgaggctccatcacagtctgttgagttctatttgtagtccctccaaacaccacatgtcctccataggtcttgccttagcatgtgagtctgacttagcaaaactccatgttagtctatatcagctgacatcattctgccaattggcataagtccaaggaagcatcaaaaagttgccggcataccaccagaagagttttggtgtgtttctctctatggagtcccaaatggagctcaactatgcaatgtaaggcagactaatatctgtgtgctgtgttagtgaagaatccttcatcatgtgtcctttcaagtgcttgctttagcaagacatcctttcacctgtgcctgcttcagcaaaacgctccttctcatgtttgccccagcaaaacaccatccaacacaactgacttcccaaagaacccttaagtgtccactacatgtatgcatatgcataggtagtatatgtatatatatatattatacatgtgcatgtgtatgcacacatacacccaacagcaacaacaatagaatacactatagtttgtttgttcatccatacttctgtgatggacatttgtaaaatttctggattttgcttttaaaaagaggtaaagaggtgaagaaatgtagaaatgtgtgcttttttttttttttttttttttttttttttttttttagaaggccggctccttccatctcctgagatactgagatatcccctgtgaaattgcccagagaagtctggaaatttggaggatgaggtggccgaagactgtttagatgtaaaaacagtaaatatttcttctctcttgataagaaagaagctcatggaatgttcaggtgtggttttttttttcccctcaaacacagtttttataaactaaagttttctatctgcatttttaacccaacaaaaacctgaaagtccatccagaatcttctcaggcaagattaaattattttcacctggtgtacaaaattcttacagcagtgattcatttagtaaaaacctctttcttttcttcctgctgatagaaccaataattttgtacagtgactagagtccttaaactctcagtttgatcattaatttcttgtgtgtatgtgtgtgtatgcacatggacacatgtttgtaagtggatacacatatgtgtgcatcctggtgggagttgaagaaaagttcaggtgtcatttctcagcattgtccactttttttttttaacgatcttgtttctatgaacctgaaactcaccacataggatctgctggctaaccaacaaaccccagcggtctgtctctcttcccttccccggaactgggattatacccatataacatcttaaacgtttattctggggactaaacagatcctaatgctcacatagtaaagccctgatcattcattttcttgtttcataacaattagtaattgtgcctggaccttgtcaataacactgtgaatgtgcttagcaagactaagtagaaaacgaacctgccattcttgtttcaatgatgagccaaatcaaagcaatccaaaatggctctaagctccaaggctcaatataaacacagcccaaccagtgaggtcaagtcagtgagagaccctgtctcaaaaagtaaggtagggggtcatttaggaaaacactcgatacgccccttgtacatgagcgtgtatgtgagtactctcacacacatgtacacacgtatataaacacattcatgcaacacacaacaccacaggcaaaaccaaagaccatgtgaggtaagagaacagacaaggctgattaaacaatgaaacagggctacacagatacaggttactgttgcattctgggattgcatttgcatgacatccctagagaacagtttgcatgtcctgcccttcctgcacttgacaatacagggattactttaatttagtataattgtcctaagaaaaattatatgtttaatttaataatatagctagaaaaccatagtgatgcatgctatgctgttctgaagaaataaaagcaatacccactttttttttctccaaagacactctttcttgtgggacttttagagattttttgttgttcttttttaaatcctctgctctctgccagttctgaagcattcgtcacttctctctggtgataaactatgtggtattgcttctacttctaaacacgaagggaaagtgtgtttatattttcactctgaggctcatgcaaggaattctgttagcactcagtgactgataagtacatcttaaacaaaatccaaagttggaaacaaatactgcacttgcttgattcatcagcttccaaagcactgagttacttactataattaaatttttaaaaattttattattagtggtgtgtgtgtgtgtgtgtgtgtgtatggtgtgtgttaaatgtgtgtgtgttgtgtgtgagtgtaatatgagtgtgtatatgtctgtatgagtatttgtatgtctgtgtgagtatgtatgtgtgctgtgtgtgtgtgtaagtatgagtgtgagtgtgtgtgtgtgagttagtatgtgcatgaatgtatgtggtgtgtgtgagtgtaaatatgagtatatgtatgtttgtgtgtacatgtatgtatgtatgtttgagtgtgtacgtgtggtgtgtgtgagtgtaagtatgtgagtatgagtgtgtgtgtgtgtgtagtgagtgtatgtgtcgaggtcgcaggacaatgatggaatcagctctctccttccactgtgggatacagaaatcaaacacaggccagcacacttgcatgagaagtgctctctcctccttggtggtctcaccacacctcaattaatataatccttaagttttgatggtctatgaatgtgtttcggtcctggatcataatgtgtggtgactgacaaggaccgtgagcttgccacacattgctttatttattgtactgtcaattgacttaactagtttgtcagccttgtcttgttatgtgcagggattgataatatggactatttgagagttctagttccttttttaaaatttaaaattaatttacctttacatttttccaaattagtataagaacataaacatctgatgtgtgtatgcagacccttgccatctttctatatatgtatacaccatggaatgtttaagtcacattaagtacatctgcatatccgtcttcttaagtctttaccatttctccaaccactacctctcctcctcctccttctttttcttcttgatagcatttcatgtagccaaggctggccttttagccaaggttggccttaaactatagctatagatgaccttgaacatctgctcttccgtcctctcgctcgtcagtgttggattacagcagtgatctgccacactcagctttatgctgtgctgagggtcaaagccaaggcaggcaggcagtcaccccacagactaagcaactctctcagtcccttctggctttttgaaatgtacagttcatctttgctatttgtggtcaccgactgagtattaagtagcactggaacttgctcctaactgaaacttagcacccatgggtttcttcatgtcatgtatgtcaacaatatacatgacagacattgaggcttttctctttaacactttttagaactcaatagaagttcccctttaccgtaatactatgatcatggacctatgcaagagtacaatccgaaagtgtatgtgtgcatgcgcgtaatctatgtggaagaatgtatgttattcgtggttaatataacttacattggtcaagaatctttgttacaagtgacaggagtcaaatgtgaatgtgtcgaggcaaagggaagcagcattagcaccaggctcttacagctaaactgcctgagacacagaagcccagccatgtctaatgacagctggccaggggcgtggctgaggctgggacatgtgtcgtctttctcatcctctctgagtgtcctttaatatccccttgacatcacagtgttgttctgggaatgcagccttagggtctgtgctagcctgtgctacatatcataatatttgtaatatagcagcactactcataatggtcaaaatgtagacaggtaagtaagatggcatatacatgtaataaaataccatttggcttttaaggaaagaaatctggactcacattctatggcttgaatgtatatggcctttgaaaaatccacaaattgcgcctggtgtggtggcacacacctttaatcccagcacgcgggaggcagaggcaggcagattactgagttcaaggccagcctcgtctacaaagtaaattccataacagccagggctacacagagaaaccctgtctcaaaaaacaaaaaaacaaaacaaaacaaaacaaaaggtccataaattgaattcttaccacctagtatgatagtactagaagtctgagcttttgggagggatttgtcatgagaacagaggtctgctgagtgggaccagccatcttataaaaggctaatgagagtcctttacttcttcccttgtgtgagtacacacacagaaggcactgtgtaggaaccaggaagtggggcctcaccaggcaacgatgagggaaaaaaaaatctattgttcatctgatagttatggtagtgattaagacatatcacagcatagatatccatagttaactcggtcaaaggaacataaaaataacaaataccatatgattccacagaaatgaaagaaatagggacaatagtttccatggtctgtgggaagagaagaaggatgagttattatttattgggcacagagttttaatattataaaaagtagtttatcaagatgggtggtggtgatggataaatagggcacatgttctttttgtttggttgtttagtgggttgattggatggtttttcaggacaggatatatatatctcctgtcctcctgtcctgatatatatatatatgccttaactgtctttgcaactggctctgtagaccagactggcctcaaactcacagagatccaccttcctctgcctttcagggtgctgaggttaaatgcatgtgccaccaccgtctggcaggggacatgacttaacagtgctgaacgatgtactgactgacatggtaactttatgctatgtatatttcatagtgaaaaagagaaacagttcattccagtcagcatttgttcaggcaagaggatctccagccagagagggaggatgctgcctgattgctacccactgagttatagcagagtgagcgccattagctaaacacatccctctctaattcagttaaaagtagactgtttaaattataatagtgctgaacagtggtggcgcacacctttaatcccagcacttgggagacagaggcaggtgggtttctgagttcaaggccagcctggtctacagagtgagttccaggacagccaaggctacacagaaaaccatgtctcaaaaaacaaaaacaaacataaaacaaaattataataggagacaatttacatgctgataatctgatgcctctaacttttcccatctctgggtaacttgaagaagatctagtccatcgccagctgtctctggcccaccataacctcgcacgctttccaaatatctgccattggcaacccgatcaatcatgcttaggacttaatcatctgtctacatgctgacgagtctcaagtctctatctcctaactaaaagtgtagactcctgactccggacccaggtatccgctgcctgccggacacctcagtgcagcgatcatcatagggacttcacctcgaggaagctggatggggtagctcaggcctgacaacccaggacttgggaagtgaaggccagagaatcaggagtttaaggacatccttagttatatatccagttccagaccagcctagaactgtctcaaaacactaactttaaaaatatcagaatcaaatgcaaatctcctcctacccacttaattggcacccactgtcattcctccctcagagggacgagtcatccctcatgtccagccagtcaggctccaagccccagtcttcctagttgccctttccctcttcaccactgacttccagtcacctatctgtctctttgcttctggtcgctctctgagctcccctttccttcgtgacctgctgtcactccctgctctcaatcttcctgccccacacagctgcctttggtaggcactgaattagtgtaatttttttacatatatatctcttcctggatgataaaacacacactctctcacatggaagaagcgcttcatgattctgtccagagcttgcttctgtttggggctgccctgcacttgtgagacacttggagatctcgtcatatttgctcatttcatctatgttgagtctatcatcatcacgagtttctgagcctggtctctgtctcctttaacagcctcttcctccagggtctcccgcccattggagccgcccttcttccttgtggttttcctgagcaggataagctatttctatttctgcctctctgtctctctcggggaattttagtgagctgcttagttcagtaactcagggctatcgagagtaacaactagtggagtccttaatctcacgaggtttcagattgcttccctgtaaaactaagcagacagttacctcagaatgacagaaacaagatactcaaaggcagtttacagttataccacgtcctaagtgaactatgggtaaaatgctattttacaatgaccaaagcctatattaaatgccactacctccaaggaacattttaaacactcaaagcagaaatttactcgctctgtaattggacgcttcaccaagcacgcctgtcagccctcatgactgccccgtatattcttaggttagccaacatcccgacccatgtttacaaacagacccagttagtatccattcctggctctcgttccaccctatggaggtcttgatgtctagggtttttcaaagagaaaaacgttcctgagatttgaggaggctggggcaaaactttcatggggaaggaccggggagacatgtttggaggtctttagaatcacagctgcattgcccagtggtcgatctgtctagcaacatctccactcccatccctgctgagctagatcgctcacaagtaacgtgctgaagcctgtggcagactttgctactatcctgctgagtttggattataccaagcagccaggaccggttgattagacttgaagttattatcgggcaaaacaaagggctgaaagagaacgggttactttagctctccctcattaaggagaagcaatcaaatcaggatcctgcccggtgtcagagcactggaaggcaaacatccagcctctaggtatgcaaagggaattgtcccaaacttaaaatgcagagatatccagagcatcttcttcagaagccgcaggagcccctctgatgtccggtggaggagggcacctgaagccgctccgtttcccgttgaaagactcatttcagggccctccgtgcccgcacttgtgtatttagggcctttctccgtctataaagaaaccgaagcctgtctcctttccctcacaaaagggcttacaggtaattagagggggattatgcttgaaggggaaacgcggcctttaatcaccagaaggacacagcgggctgagctggacgtggtcctagcggcctttgtgtccggtgcttgcctgagccccagctcggggtgattctcccggtgctggggtggtccggcatgggcttcctcagacagatacagcttttgctttggaagaactggactctgaggaaaaggcagaaggtaaaaaagggagcggggtggaggagggttgggaggagggagcggggaggagaggcgaagaagagagctagtttgtcctttagttcggaggccacctttagctgctcagtgaccaggtgccctcccacaggatgacacccttctcttgtccttggctacatgaaaactattctgtcccctgcccagcacaggaatccactaccgctccccacccctccagcttcgacacctgctggcccagctcccaccacaggttggaagcttcaaggtccctgaaaaacaaacaaacaaacaaacaaacaaacacaaatttccttgacgctagagcgtggggtgcttttacacgttcatgttcctggaactgggatgtaaattcccagagaagtcacagttgcgctgcccacaattctgttctgtggaaaaataactttgcatcttccaattgtgttattaaccacagatttacccaaacctcttctgcgatcagtcatggctggactggactaagggtttaaatgtgtaacgtgcacactccccaccccacccccacccccacccccaagctggtttttcagctgggaaatcctgaagtatgttttgagaatccagactaatataaagtaatgtaggccaaatatcccaggagaaatgctgatgtgtgctgtgggagatcagagcccctccagagttgctacaaatggttcctccattgttttttttttctgtggaaggataaggagcaaattcatatccataacgaaatggggctgagagtgtgcctcggctgggagagtgcttgcatccccggtaccacacaaactgggcacagtacccagcaagagggtcagaaattcaaggtcatccttggttatctagtgagtgagttcaaagccagtctgggattcatgtgatcctgttgagtgagagagagaaagagagagaggggggggaaggaggaggaggaggaagaggaggaggagtaggagaaggaggaggaggaggaggaggaggaggaggaggaggaggaggaggaggaggaagggaagttaggaaggaatggctgtcccagagccctacagagtcctaaaaacatgaaacagcttaaggaagatgatgggaggggggagggttgctgtgcgaagcagagagggctgagattaaattacggggcccaggattgaggaagatatcccttgttgaactgtagcctccgcacacaaatacaccctaacacacatgtgcacacacatatgcattcaacacacataagcaagagaaacgaaagctgaacctcatgaagaggacaggaaggagacaggctatggggaagagcatggtttgtggtaggtttctgttggtggactaggcctctcctggggaccaaagggaacgttaggaagaaatgggactaggcggtggggtggggtggggtcgtgtgaagacctgtggggtaccttaggcaggtttggtcagagagagatgaaaacggggatgtgtcagctaagcacacaactggcagctgggaaaggagtggaaaactaaggttatgtgaaggtggccgtgccacactccagttttgagctcacccacagggacaccattgtcctatggctggctgcttgtccctgaccaggctggtgtcatttcaaattagccttgaagttatttgggacccccagggaccaagtgctaacagtaaccaaaggcttccccttcctgaatgaaaaccctgtcaaaacccgagcaagactcattgttaacttcatcgcgttcagtcattcattcggtcaagaaataatagtcaccaggcagtgtgccaggggctaagttcccaatgatagatgagacaattcagtttctgctcccagggtgcaaatgcgctgtaagattgccagggaaattcaatgtgcccgcccaccgcctcccgtatctcctcctcagccctcccctcacaccgggactgtgaccagcgatgctcccattgctggtttccagacacagaactgactcggggaaactgagcctttcgctcgaattggcaagtggattcctgttgggggatgggagccttcctgatcactgtgtgctccccgggggatgggtcattcatactgtgaaccctgtctcacttaagcctgtgtttggtatcaccttcatggcctggaaactgagatctcctcggtaccccgagatagccaatgtatccaggatgtctgggtaagatgagaacattttcctaaaccctcagtttggacctctatgagggagtctgcagctcctttcaaggcctttggatcttctggaaagatctgcatgcaagaaatggtgactgcagaaagtgaggcatgactgacccataaaacaatgagaatggacagatagcaaggtgttctctccatcctcctatttcctcccctcaagatgcaggaagggcgtcttcaagtgcctgcttcccttccttcttttcccgtcttctgttagcctttatctgatgttacaaagtacttgcctggcttggtactaaattagtcacatcatttagctctcatggtaaggactgagaggtttcggttagccctgtgggtaccaataatgcaggctacagttgtccctgtgggtaccaataatgcaggctacagttgtccctgtgggtaccaataatgcaggctacagttgtccctgtaggtaccaatgaagtgacttgaggatcattcctcagggttagcatgggttggacaggtaattaaccatgtgtgacttccggatagcagacgtgaccatcaaactccaccgccctgactaacagactagtcacagatatcacaaagaaagaatgactgggtaattaatttatcaccgaccagggcagtaaatgtaaagtaatattgcatctataaccccagtgcgtgtctgacctgcatgcctgagggagaacggagcatagcccttgcctggtggaatgtgtcaggcagaaggaggctgccacgtgattcctgagcagaagtggaagtcctggtggacggagtgggtggaagcatggggtggggaggggccgggaattcagaggcaatgtctcaggatcttaaccctcacagccctgtctcccaaaggctctgtccaaaatcctacttgcccactctggtaggccagagttagcacaagtttttcttccatatcctagaatcctttggtgtccccaggtccccacttgcagaggacaggatgttgggtgaaggcctgaggactcataaaaacaggggttcacaaccaggtggtagtggtgatggccacacctttaatcccagcactcaggagtcagaggcagacagcctggtttatagagtgagtcccaggacaggcagggctacacagtgaaaccctgtctagaaaaaataaaaatggggctcgtgtcctaaactcgggaggcgggtgcctggtattgctgtggcctttagtgctggctcagcattgggcgaaaagaacataggggtacagggaggctggcaccagctgcaagtatactaggctccgggtggcatcgggccaggtttgagtcgcgtctggcttctcagcccagaagggaggatcagtgctgttgctctccagctctgcctacctctcttttaaattgaaaacagagagggaagggagaaaacccaactggctgttttaaaacaacaagcacaactctgccctggccgggaacctttcctcccccatgtaggctgaatggtaaagatgtggggggagaggaggcaaggaaataccaggttagtttaagaagcattccacagtgggggcttctgagcttggactgggcttaattaaagttgcagacatgtttaaagtggggagggggaactctggagacatgttttttattataatgtggaatttctccctagggcatgcctgtgtacacttgagcagcaagggtaatgcccttctgggctggtggtactgattctgggggagaggaagaggctgcgaggaggacccacctgcctctgctagtcggagaatgaatggcaggtagtctttgtgcggagtggcctgcgaatgaggccgctctcgatccctggcagagaaaaaacatcagctcctcctccccctcccccacccaccccgtgcttccttgagattgcctgctatgctgagatgggggaggggctgagaggccgctgttagttttcattgtatttcctccatcatctgtctgtaacctgctgtcacccactgtgctcctgtggcccttgctatgattctatgagacataaatggtctgtgtgccaggctctgctttctgtgctgggcacgatgaacatatttcatgattacaactgctctgggagacaggacttggtatcactcctttttgacagatgcgtccctgtgacatggagaggttcagaagtttcctcaatgtcataaaccccagtacttggccccagagtagcctgttattaattctcattgtatactataggacaaaacaacatccccatttcatagatgagaaaactgacagaaaatgagcaagcccgagagtggttgaaacccaaatgctcacattcccaggtcagcacgggtggcatgtagcatcccatacaactcataggctgacacaatgcataggcatgcaagctttgatggagagccaaccttacaagcagtcgtcttgggaggagtcacgtgcaaactctctggactggttgtctcatctccctggagaagacactgagagcaacttccagtttcagcctttgcacctgtcgagctgctatcttgccaaacccgttcccccaccacccttacaggacaatctggaatgggggagggggagcagctatacgtgcctttgtggggtgcagtgtgttataaactcttcagactgttgatggcctgagtccttgtgtcaactccagcttccctgagaagcaccctaggcccgtcttgactgagacttacgcatcccagaaagagccgatgggaacttcctgcgactcctgccttgcgtggggtgggtgctgggctcacagtggaggacagatatgcctgagagtgttggtctaggagccaggatagaccgtaacaggcaggggttaggccagggaggctctgcctgggatgtgcccttcctgtggacaattaccagcaatcttaattgctagcaagtattcctggggcagtctccttaaacagcaggtgggaattgcctaatatgggtgttttgtaatcctgtggaaaaggctatgggagaactccagaaactgagcaccttaagagaagcctattctgtcttttggccgtgtttgtatgcgtgcttcctccaacccatcctcctgagttatgtgttgagtaaagtctttttgaaaagtgaccatgtgggctggtgtgatggctcaatgactgctcttccaaaggtcctgagttcaaatcctagcaaccacatggcggctcacaaccacccataatgagatttgatgccctcttctggtgtgtctgaagtcagctacagtgtacttatgtataataacaaagaaatcttcgggctggagcaagcaggaactgagcgagcagaggtcctaaaaaaaaaaaaatcaattcccaaaaaccatgtgaaggctcacaaccatctgtacagttaaagcatactcacatacataatataaataaatcttaaaaaaagaaaaagtgacctcgtacctgtaaccatttttgctttccctcaacatgtgacctatttcctaccaccaattttcagatatgttagaacatcctgggttcttcgtgtgtctgttgtgttgttttaagcagcacacccgtttgttaaacatttatggagcctctacttgctagcctcttatttcctaattccttaactcacgtctagttccataattcagcttctctccctcttcttcctaattgctcatctctgccttcccgccgtgcagggatgagaacagcgccaatctcaagcgcccgtctctttagaattgggggaactctgactctaaaccaagagtctttctataccagccttctgcgatgcttgagaccagctgcctcttccggttgtggaaagggaggaggaaccgcggcgggatttctgcttcccttaagcgatagaccttattgaaggaaaaaaatgttgagttactggatttctgttggtttcgctttggggcacagtatttcagagtcatttgctccctagttcattcattaattcaatggccaccttcaggcaaggtctaccatgcgccagaaggcaaaacggcgggaaagggcagaaagagtctggccctggaggtagcaggctggattgtgcttcctgttgtgaccctgtgcaagtcacctgacctctgcaggtctcttcgattacccacagaatgagagatcacgagacatttactatctgaggtaccagctttacataagagcttatcagaatctgtatccttagccaggtggtgaccagggcgcgcgcgcagaagcgcacgtctccagtcccagcactcctgaggcagaggcaggtggatctctgtgagttggaggccaggctggtctacagggaaagttccaggacagccaggcctacacagagaaaccctgtcctgaaagaccagaagaaggagaaaggggaaaaaagaattggtatccattcgcctagcgcaatgctatctgccaagtcctgaagcctgaggtctctcatggcagtcttgtgtcgatgttattttcaggagttgacatgggcagaatgcagatgaacccagaatctggttgatgtagtgaatcagggaggaggcagtgtaggagagaggactgaagaaggaagtcctttagataaatagtcctttaggtaaatactcttagcaatggggcatattctggtgaataccttattaggtcatttcattaccctttatggtcaagtgtaccaacacaaacctacctacagcgcagcctcctacacacccaggcagcatagctctaggggctatgtatctatttatgaatagtgtagtctattgctctgagagccataataaacacaagattaaaacaagaacaagacaaaatgatgcaagggagagacagtgaacacaagactcgagaggtgctgctggttttacagttaacttcttaacagtgaatttttgtttctgagacagtgtagtctcaacattgctatgtcttccgggcttctatggccttgaactcctgcttcagccccccaaagccctgccattacagatctgtgccaacacacttctcttcaagcttctggtttctgttactttgttatgagtagacattctctcccaattgatggtttaaacacagtaaatgtgtaagccctgtgagagtcacattatcattgactttggttttcataattgtaagtgctgtaatttttaaaactttttattggttattttgtttacttacatttcaaatgttatcccctttcctagtttccactctggaaactccctatccaaccttccctcctgcttctatgagggagctcacctacccacctacctcctgcctcactgccctagcattcccctacactggggcatggagccttctcaggaccaagagtttctcctcccattgatgccaaacaaggccatcctctagtacacacgcagctggagccctgggtccctccatgtgtgctcttttggttggtagtttattccctgggagctggggggggggggtgtctggttggttgatattgttgttcttcctttgggttacaaagcccttcagctccttcagtcctgctaactcctccattggtgaccccaagatcagtctaatggtcagctgcaggcatctgcctctgtatttgtcaggctctggcagaacctctcaggagacagctatatcaggctcctgttagcaagtgcttcttggcatccacaatagtgtttggctttggtgtctgtatatgggatggatccccaggtggggcagtgtctggatgtcctttacttcagtctctgctccactctttatccctgtgatatgaagtcaccatagacactacaatgttaagacagtaatgggcctttttcggatccatcaggacttactgggccactgtgagatatgtgatctgtggtgaagtgttacctgggctatggttgtacaacagcccaggcttggtgctcggatggtgcacaggggaaggcctgtcttccctggttatatatctcctcgcatctcttagcagttttgctctttctgactttattattccttttccagattcgctttgtagtggaactcgtgtggcctttgtctttgtttttggtgttaatctggctgaggaatgccaacccactctatagtcagcatgaatgtaagtatgaacccagaagacctggtcatctttcccttttggaagctcttggtttggagtgggaatatcacatctgttgccatttcagaggctgcaatgtataaaccaggttccccagtgctgtacaaactctagtgtcttaaaatgtgtgcagtgtaagccaaccctggttggagtgtgtgccatttgcttattcatttctttcatttggtggttgtgggaatcaaacccagccctgtgtatatagttattttttgactgctttgttgttgtttgtttaaacttacctatattacaaatttcattctgttttttacgatgactgatttaggggatttgtttgacatggtgagaggatagaggacagtgaaaagggagcagcacagaatcacacttaataaatattataccctggagcttcagggcacctgctagcctcatgggagcctgctttgtacagttgcctttctggaaggctccccgtgtcttctggacaggctggttggtgtcttgtccttctaggcagctgacatggaagtctcaagtgtcttgagagcctctgagttcccccagctcttgtttccaacttccatttctcggcccagcaaacccttgttcccttgtcactcccaggagtgcagagcctccatccttactgtgcaaagaactcgcaggcctttcctgtgaaccgccctgagcccacgtctttatcccccccccccaaagcttatcttctagcttcagtttctctgccacgtgtccacctaagctcctaggacaggacatagcctccctaatgctgtgaccctgtaacacagctcctcgggttgtggtgacagtctccctcgaaccataaaattattttcattcgtacttcatgatggtaattttgcaactgttataaatcataatgtaaatatctgtgtttttcaatggtcttaaacggcccctgcgaaaaggtcgtttgacaccctccccaaaggggtcatgacccacagggtgagaactactgctcggagaccattagtctgcgtccttatctgccactgagcctcaggacacagcacagggcctaaactatattagatgatcctacttcgtaaacaaggggagagacagagcgtccgagagtctgtgctcctggtcggtctggcctctgtgactaactccgtcttgttttcatttcctgtcttaaggccattttcccaacaaggcgatgccttcagcaggactgttaccgtggctccaggggattttctgcaatatgaacaacccttgttttcaaaaccccacccctggagagtctcctggaactgtctcaaactataacaactccatgtaagtccaacctacagggaggaacttgtgcccccttctgttcccctcccatgtgggagtgtgtgtacctaccctctgcagaatgggggcgggggatctaaagagtgtggggaaggggcagcttcctacctggaataatctactaacagcaggacacctggggaaaaccttcaaacataagccacatgatttcttcatctttatgcccaagaggggacctagaatctaacagcagccctggctgtcaagtgtccactacttgtggtcacccatctgcttgggtgggaggactatgctccttccttccccctcccccacaggccacctgtagctatctctgcttcctccaaagcctcctttagacatccaaggtctatgaagaatttcaaggaccattgcaaggaaatgcaaagtcaggcttgcaatgtgaagtttacttcttggaagaaaataacgaaccccaaatcctctcctaaactgccatcagtgacttgagaggtagaatcttgggatatggcttacacagtgcattttttaatccacaaagcggaatatccagttgtccatcttctttctccccgtccaatcagccttgatgggtatacatagagaggatttcgtggatgcagcatggtgtcaggtcccatctctaggagtgggtggtggagaggtcagagaattgtgcgaaggctggaaaaactcactggtagtagctacaaactggaaacaacagaccagagaaaatggggtttaaggtgaccttgccctgccccaaattgaattctgagctaattactcatcatctctgtcagtgttagaatcataaatatccatcaattgaggctatgctaagtcaagcaacaatttaaaaatagcacaagactgaaaatgatagctatttgtttataaatatttttgcttaaaagtataaatattaaaaatattttaaaattatgaatagaaatatatttttccttcctatagcttggcaagagtatatcgagattttcaagaactcttcatggacaccccggaggtccagcaccttggccaggtttgggccgagctccgcaccttgtcgcagttcatggacaccctgaggactcaccctgagagatttgcaggtaacatgggtgtcggcgttcccattctgtacttgcctctagcgtcaagtaagccataaactgagatctagcgaagagtggggagaatctgtgaggaaagatgccagagacacatgcctgcaatcccagcattcctgtggtgaggcgggaaggtgaaacaggagactccccagaagctcataggctggccagcctgtctcacacaccagtgaactaaaagcagttgtcctttgacctttacatgcatgctgtcgcatgtgtgcacttgcagaaacacatagacacgggcatgcacacacgcatgagtgctcacctcacaaacacacacaaagacactttaatgtacgcttccagcaatatttagtatccagaatgaagcaagtgggtctgttgagaacaggatgtgaggcagaaggattgtggacgcactacagcagatcaaggaggccctagtaacaaaaggcagaagttgtactgtgtgcattttgtctgggctgcattgagcttttatgagaaactattgacatccaggattagctgggagcgggggcggggggggtttgaaatgcatgatcagtagcctcggtggcttctagggtcctgtttaactgatgagaaaaagggtgagatggaaggactgatggctgtattcagagtgcttgaatttaggctgtcagggagaatcaggcaggatgggtactacagaggtggatgtagggaaatcgaaggagagggcagtgtgtgtgaggaagaggtgaaggaaatgagggatcagctgtgatctgacacagacacaggatgagagagagcgagaatcagacatcccagggacggagaaacagttcactggttatggctgttcctccagaggaccctggttcaatttccaacacctacaaggcagctcacaactgcttgtaactccagttccagggcacctggtgccctcatacagacatacatgaaggcaaaataccaatgcaagttaaacagacagacagacagacagacagacagacagacaaggctaggtgatagtggctcacgcctttaatcccaacattcaggaggcagaagtagccagatattggtgagttgttggcttgcccagtctacaaagagaattcaaggacagccagggggctacacagaaacctgtctgaaaaaataaattaattaattaaataagtaatgaatcagacatccaggtgggagaaccacttagaatgaggaacaacaaagaggagggccagaaatgtctcatagcctcagggggaaattcaggagggggaaaacaaaaaccaacaggggtggggtggggtgggggagacaaactaacatcgaagaagacagcactagatcttaagcctcccatgagcactgggtgggtatgtcagcttcacttagacacctgtggggacaagttgtggtgtcagaacccattgcctgagcatctgtaattcagaggctgtgagaagctaaagctccaggagtcgcctgggagttgtcataggcctgtgggtatatggtgtctttcaagaaatgcccgctagtggatgaggacacttccaacaatagagttcagaggcagcagctggtgctgtagaaagatgtgtgttcctgagacagggtggtgactgtaaagattgccctcagaggatgacagagacaaggaaaggactaccaggggaagccaaagggcgagagcggccagacagagcagcttttatccgagttacaaacagtacagttagggtggtgtgaccagccagccctcctctcctgagcttgtggtacatacaactcctttaccctcagcacacacttgcagcctgggacaggagtacattcagatcgctgtgttacattcgagttacttccaaagcagtagaggagatggtgctggccatcatttacacagcctagattataaatatctacaatagtctttactcttctgaaaaaggacatatttcagttatctcaagtatgaaggactctagaaggtagaaaccgacagcattttcttccttccttccttccttccttccttccttccttccttccttccttcccctctctctctctctccccccttccttccttccttccttccttccttccttccttccttcctttctttctttctttctttctttctttctttctttctttctttctttctttctttctttctttctttttctttcttcttctttccttccttcctatctatctatctatctatctatctatctatctatctatctatctatctaatttctgagataggtccatacttagcttagacagcctcaaacttgtgtagctcagactagactagaactcatggcagtccttctgtcccagtctccaaagtgctggagtgataagcatgagccaacttgcctagttcatatttgccttttaatagtaagaaaacacaggggcgaatgtgccaaccacgaagatgttttgtccaaggctaagcaagcagataagataggcagccaccgtcttgatctcagggtgactttcctcccttcatccagaagggtcttccatcaagtgaacttagcactgaagtgtctgactgaaattgagtctggctgcagggagtggaagagaacccattccaagcagaagttttctgtggttgctgcaatttctaggagaacccaaatcactactttctaagccaaaacaaaaacaaaaacaaaaacaaaaaaacaggacttgaggatgactgggcaggcaagtggatctttctgcaggctctccagctgtgggggaatctcctaaagggagcatggctgggcatcaggatagccttccaaggttttctcagaagctggggacagaaactaacaggggtccagggaccatagctaagtaaaggatatggtctcgggaggaaatttgggccaggcactgatgtctagtcgagatggcagaaggagtaggttctaggatgtttgttgctgaaggtgaacgttggagtctgaagttaccatgagggtttcagtctcggagttgggtggacagctgcagccacctcggcttttgcctgtggggttcccagtctcctgggaaagtatgtctgtgctgacccagacagcactctcctctcacagcaaacctgtagggctgcattctccacaggggagggttaatggggagccaccagctgcagatagacatagccccctatccccagccagctctgtggtctcatctttaagcccctcttccggaagcctcaccccgcagctaccctccaccccctaccctcagcctccaacgttcccagggaggagaacaagtagaaccacattttaaatgaaaatgtaattttctttccccagcaaccctctctccaccccctccctgcttcacacttctccctcaggaatctaatgaagggcttgtctggtatcaccctgtcactcagaccctgggccccacactctgctggcagggtagccccaacaccctcctcaggtgtgtgcttctctgagtccctgcccttctcctcccaccccgcccctgacccagccaggccacagttgtatgatactcaggcaaaatgactctctgtcttgccccttctcccaaggcatttgtatgcagcggcagctgagtgtgttaaagaataactaaaaaataaacagccgaatggggtttcactctcaggataagagcacaggtatttattgagtgcctggagtcattcagcagacatttattgaggccttgatactatgtcaggccttaaagctgggtgaaagagataaaaaataagagagaaagagagagagaggagagagagaataaatatgaccttgaggtcttactcctgtatattcaatatggcttggtaaaacaagggatgttaaaaacaaacaaaaaaaaaccacccatgcacgcctgtatgcacatgtttgtgtgtgcacatgcatgcactctacggtgtgtagaatactacagcgagggtctgtaagtctgtatctaaaggaataactataagagaacagttgagatgacaccccagcggtaggagaacagggcgctgcttggaaaaaagacaggatctgtgttacccaaaggaaaggaacacaaagattgaacacagtaccttctcctaggttctgctattccagggggacccctaccttcaggttcttcttacaaagtctttggaagtttcctgtgcaaaggagagtgatagtgggctactccctggcccagctctcaaagacatccaacctgacaagaggctgctgtatggaaccatcagggacagttgctcccaccctggacagtggcagatggataggcttgacccctgcgctgcaagaggaaattatccttcgcagtgtggatctagtcatgctgccctacaggaacatcacaaccctgaaacagcgatggaggttgtcaggcacttgcctggagagggaaaggtttgggtgggaggtgtagctcgctatgaagctggagtcagaaggagaaagggtgttggaagagcatggcccttggagaaatactcacagcttagcagggtggcaaacacatggaagacttggaccataatgaccttacatatctctggtcaatatctcataaactgtagcggtagccagtttgattctgatacctgcccaggaagcaacagaagaagtgggtgctggcatgagtcctccaggaggggtggggatgatattaacactgtcagaataagcatttattgagtattaactaatatcaggcaggcctgggaattaagtgcttcagattcctttatctcttgttgctcctacaacacctagtctacatggtgaccatggtcacatggagagaggctgatcacttgcccagggacaccttcacagtaaagggtcctttatgcttccttgagaaagaatttttgcttctaaaaggttctaagtgaagctggagggaatgtggctaaggctgaccaggacaagccgtggggaacaggcctgaaacaccccctgatatgaagttgttcttgtccttcattgccctgttcatgctaatacccaaagctttaaccctgagttgagctaacaggaaccacagaagggttctcatccatcaaaactgcagtgagaacagattggacatctcctatccagatacaggaattttttcctttgcttaaaacaattctttttttttttttttttttttgaggcaggcgttggtggcacacacctttaatcccagaattctggaggcagaggcagacagctctctgaattccagcccagcctggtctacacagagagttccaggacagccatggttatatagaaactctgtcacaaacaaacaaaacaacaaagaaaccccttaggctgtcagcttgatggcaggcacttttacccattgagccatcttgccaaccaaggtgttgagcacttctgcacgcagctactgatcacctgttcttcctcttgctgtcggtttgtgctagctgcccacttactgattggattatgtggggtcgatgtttagttatttgaattctttaaatcgtccagatattaatattctactagacatatagcaggcagagatttcttcccatctataggctgccctctgccccgctgcagttaaccatttccttcgttgtgtagaagatttgtaatttcatgaaattccatttatcaattttcggaattgacttttggaaagtccttgcttgtgcctatgaattggaacaaataatttcagagattcaggtctttgctaaggcctttgtctcatttaaaatcgacttttgtacagagtaagagatagggatccagttcattattctgtccagtttttctagtactatttgctgaagaaactgttttttcctccagtgtatgcatttgccatttttgcccaagaaggaggtggctgtaccgtgtgggtgtggttccggattctcatcccattggctaccgtctggcttgtgctggtgctattctggctttgttgctatggctcaattgtattctctgaattcttcatccacagcatcaccttggctatttgaggtccttttgcttacatatgaaagcaaaggggttattgggtattttttctaattatgtgaagaatgtagctggaatttctatgggagtgacattgaacttatagacttctctgggtgctacagccatgttcaccacatgaattctgcaactcaggatcataggagatcttcccatcttctagcatcttcttcagttttctgacctctgtcccaatatgttatctggatatggaaaaggcactgatttttattaacttttttaaaaaagatttatttgtttatttatttatttattatatgtaagtacactgtagctgtcttcagacacgccagaagagggcgtcagagctcattttggatggttgtgagccaccatgtggttgctgggatttgaactcaggaccttctggagagcagtcagtgctcttaaccgctgagccatctctccagcctgatttttagtaacttttaactgatgtttttgtcctcctatttcataggaagttttcaaaactgaattttctggtagggtatataggtagagtggggcttcccagccttagcacccctgacatttgtgggggagagaaactctttggggagtcacctgaccactgcattgttctgcccactatgaatgtttagcaatgctactggtctctctccactgcccaaagatgtctctaaatattgccaaatattcctcaagagacaaaattcccctgccgttgtagttccttacccttcactctcttgaaagccattgtctcagtccaggcctgaacatcaggcagcacccaacctacttaggttaacttttcctaccttctgtgccttcgcactgtatggtgccagggctcttcagtgagacagtccaggtggcagatactagcaatggcctcaacctcccagagttcccaaggaaaccaagaacacagccttcttctaagagccaagcagaaacgattctagtcagttctagctgctgttctttttttgacccatctcccttcaacagtctgttctttcattcacatgcaggaagaggattacaaatccgagacatcctaaaagatgaagaggcgctgaccctatttctcatgagaaacattggcctgtctgactcggttgcccatcttctggtcaactcccaagttcgtgtggagcaggtaggtaaggccctttgaagagggagaaacaccgagcctgagaaagataaagagtatttggtttctgttctcttttgcttccatgttcagaatttatgactcatgcgccatattcaggggcacacctgagggtttttgagtcaacaagcatcccctcacaggactcggaagcagcactggtacccgtaagactcccctgtcttttgaaacgtgaaggaagcagagcaatcacgaggcttagcctaccctggagagtatgggactttcaccatttacttactactaatcaaatcgtgaaggccagctataagtactggagcagtgtgggccagacaggcaaagcctatgactcaggacactgacatccacaggagggtcaacataaatagaggctctcttgtgtctcctggctgttaggagtcactatgttagggcaagagttccttactaaggagaaagtcagcctgcaagcacttaagggaggagctccagccaagaacttctctctctctctctctctctctctctctctctctctctctctctctctctctctgtgtgtgtgtgtgtgtgtgtgtgtgtgtgtatgtgtgtagcctccagtatttgaatgcttagtcaccagcttgtgaaagtatttaaaaggattagaaggtttaggtatggccttgtgggaggaaatgtgtcactgtgggtgggctctgaggtttcaaaagcactcaccaaggcccagtctctctcttcctgcctgcaaatcagaatgtagttttcggctactgctccagtccgatgagtgagtatccatcccatctttcccaccataataataaacgactaacctctgaaactttaaataatgatgcctcaattaaattctttcttttatagcagttgccttggccctgagtctcttcagcatacagagtggctatatagaacaaggctaagatgggacccaagtgtggtttccagcacccctgtcagttggcttacaacctcctgtaagtccagcttctgggggctcccacattcctggcctctttgtgtacctgcattcatgtgagcacgtctctacacagagagatacacacagagacatataattaaaataactcttaaaaaaagagaacatggtggatagagggtgactctaacatttatcacatctgacaagggcagaaggaccacctctgtattcctgggccacttgttttctagctcatgctagacatttctgacccctccataaatttatttcattcattttaataatttcctgctattgttattattgtatattataatcattattattacattaataattacacaaatacatgactttaacattgatttgctgctttgtcccttacagtaatcctgaaatgggacaaaaacatgggggaaactgaggcatctagtggtaaagttattctgcacacagttcaacaactaaaagtgccagagcccaagtgcttcccatgcctggtcccacaactccaacataataaactgagctggctctcacagcccagtgtccattagggtcagtggcataggagtacctgttagaaatgcaagttccccagccctatcaactcagttgagtccaaacttttgggtatagggctatttgtgttagcaagctctctgggagacgaacaagcgaatgccggaggaccattgctcttgtggacaggacagccgcctgactccaggggagaccagaacataagtcgggagtttcagagcatgaatcagacttgaaatgaaggtctacacaagatgctgctatctgagtccggatgagggaggagacccatcccgcctggtgggaacagctgatgaaggggtttttagctggttcctcacacctcgatgaaggatcccatgcctgctttctgatcatccagactctatggttatccctagaaatagacaggcaaagtagagtcagttcctgatgaggccgagcagctgggctggctgcctggcacggcctgccttctgtcttcatcacagggagttgtcatcagcactgacgggccagttttcccgtttgctttttcttcagctcgtaaaacttcagtcctggcaatgcctgtgacagtttccagttggtaataaaagggaggccgagataagggttggaatttaggggaaatttccttcaagagtgttcagccatggcctttagagttcaagtgactgctgccctcttggctccaggactgaggctctttatggcaaggacaggggccaggtcaccaggttgtgctaccagctcctgatcagtgtagccaatgcaatcagatcagcaagttctaccacttccctgtcatgcctgagaggccactcactgcccccacctggctccctttgtatctcccaggccaccttgcttctcagctggtcacccacccttccactctcatcttgacttccactccatctgagctctgtgacctttacccaacatggccactagaacttgcaggcacaatgtcgacatgccttttcagcggccccggtggaagctgtgattcatcatctttactaagcagggactctttgttcattgccatcagtagtttccctccgggtcctttcttcctggcacagctcgggggtggagggtgggacatcccaatactgctttcttctaagaaatcattgaatgagaagagtccaaagtgtccagttctgtctcggtcccatctgtccagccttgaagacttctacggaagcttcaggcccctgtccaactgatgcatcatcttcaaagatgctcataagcctcctttccttggccaatcctcactcctccttactctctagttagcaagcactggtgagtctctaggagtcagatctcccaagaatgcaccactctatgcctgttccctcactacgaaaatgcctaccgtacatggtggttataaggagagattgaaaaaaaaattagaatatgtgaaccacttagaatgttgctagacatacttaataagcaccaaatattttgtcaccattatttttgagacaggctgtcatgtagcccaggctggcttcaaattcactgttagctgaggatggccttgaacctctgaccttcctgcctctaccacctgagtgctgggattataggccagccctgtaactgccatggctggtaaattctaggaactttgactagctattctcttgctgtctcttccctccccttctctctcccgccaactcttcctctcgacctctcttctatggtaggtgtgacacccagagtgtcacacatagtaggtaggtattctgccagcgcgcttatctcagccatgaccgaacttactgattcttcccctttcagggtctagtattgatctatttgatcttacactcatactgtctaactgtccgtatatgcacctagttagagagctcttcagagaacagggagcctatgttatccacctctagatcctcagacactattctgatccctgaacaatagttcagtgaataacactgaaagagtaatcgattggataagtggagatttgtcaatcgggtttttgttcgtttgtttgtttgtttgtcagtttggcacaagctagagttctgtgagaaaagggaaactcaattaagaaaacgcctccataagatcagattgtagctgagcctgtagagcattttcttaattagtgactgatgaagaggactctcagcacatggtgggtggagccatcctgggttctaaaagagagccggctgagcaagccatgatgaacaagccagtcagcagcactcctccatggcctctgcatccgctcctgcctgcaggtccctgccctgtttgcgtccctgtcccgacttccctcagtgatacacagtgaagatgaagcatactcctgataaaccctttcttcctcaagtggctttggtcatggtgtttcatcacagcaacagtaaccttagtgaagacagtctccatcatattggcatgtaagcaagcctgtggggcatcttcttaattgctgattgatgtggaagggcccagcccactgtaggcaatagcatccttgagattgccaggtgggcctggggtataaaagaaagttgtggagcaagctatggagagcaagctcgtaagcagcactcttccatggcgcctgttccagttcctacctccaacttcctgccttgagctcctgtcctgacttcccctcatgatggactgtgaactatgagatggaataaaccttttcctcctcaagttgcttttggtcatggagtttcatcccagcagtggagagaaagctaggacattagctaataatccctatgtatgggtgctgtggcctggttccctttcatcagctccttcctctgcagtatgagaggaccagacaaagtgagcttatgaaaacggtttcaccttctggctaaaaagaagatggggttttgctcagagatacaaaatgaggagggggcaaaggcggaatgatctgtgggaacacccccactacagacccccagactaatcatcaacagctgatctgccatcagcctgtgcctcatggagggaccagtgtgttctccatgtttctgtgagggtgacagagcctgggcctgctctgttttccagtgtggaggtctgtgtgattaggagttaaacggtgtcttcggggcctagtcttatgaatttgttccatggtacagaatctggaacgatgggtgcaggcaacactccaggtgactaagaagccttgatcagggttgggacgtcttcctttccatcttagttgtgtgtgtgggggggtggggggggggcgccatagtcgtggtgctccaagtcactggctgtgagcttctaaagggggtgtgggatgtgtgctatctaggccaagcattgtggataaaatacaagttatatatttgatgctaaatttcagagaatcacaaaaaaaattaggcataattatgctccctttggaatttatttgagacatactaaaagttatttgttgtgtagctgaaattcacatttaactgtgtcaggtatggtggcttgctcctgtaacgtcaggagactgagacaggaaaatgacctaagctacggaataaattccaggtcagcctgggctagcgtgagaccctgcctcaaataatcaagcaaaaataacaataacaaaataaaagccaaattgatctggccatcttatatgtttatgtagtaattctagtgagaagaagttggtcaatgtcactgtagatgttttccctactcctccacttcagccactgggagaaggctttgatggcacattagcatcctcttccaaggagagctcaaaatcgccacagagttttctgataaagtaaggtttgaggtagggtttgcatttttattattgctgtaacagacgacacactccaggcgaccaagaacctggaggtttaaggcaacacaggtttattctcttatgactctccagatcagaagtctgaaagtcatgggctggagagatggctcagaggttaagagcactgactgctcttccagagggcctgagttcagttcccagcaaccacatggtggctcacaaccatctgtaatggggtctgatgcactcttctggtgtatgtctgaagataggtatagtgtactcatataaataaaaataaatgaatctttaaaaaaaaagtctgaaagtcaaggtgccattaagtcacattcttcactgggatgtctaaaggaaaacctattttctcatcttagccacctctagcagactgtacacactccttggatggaggttccctccatgtgcaagacaagcaatggcctgccaagcctttctttctcacagcacagtacccgcacagcttttcttctgcctcctcccaacgtcacgtacccttatatgacattaaacccacccagatgacctaagttaatctgttgttttgaagttttgtttgtttttattttttttctgtgtgtagcactggttgtcctggaacttcctttgtagaccagggtggcctctaattcacaggtctgcctgcctctgggatcaaaggcatgcactactatcaccacccagctaatctgtgtgtgttaaaccaactagttagcagacatgctcgtctgctctgtccatcccctttgctgtgggatgtggtctgttcggcaggatgtggtaatgttcaggagagtggtaatgtcttccaacatggagttctccagcatcttttctcctccctgcagtttgcttatggagtcccagacttggaactgacagacattgcctgcagcgaggccctcctgcagcgcttcatcatcttcagccagcgtcggggggcacagacggtacgcgatgccctgtgtcccctctcccaggtcaccctacagtggatagaagacactctgtatgccgatgtggacttcttcaaactcttccatgtggtaaggaaagggttccttgcatcttgcttgggaggcgactcctgggaacaggcaggccattgaagaattgacattaaggcaggtgtgtgcttgatgctcatggcaagccttgaggatactccagaaccccagttcttctagaaagagcagcaagggaaaggagttagtttacccctgagcatgtgatagggtaggtgtacatccacaccaaacgtgaaaagaatgctctccatcctctgcagactagtgagttccccgctcgtggttacaggcaaggcattgactctgtcctggtcccagtgttcatctagacaacaagtatgatacttcctgggtgcccaactttttgacgctgtaacatgacatcgtcatctacaggtgtattgggattcctacatagctatcttggaatctgcagcctgtgggccataggttggacatacctgtgtataaaatagtaggaaaaggtagagagagaggaaaaaaaactgtacaaagctttcatacattttaacaaatgagggagggattcaaattctttcttatggaactgcacttgacccccaaaggtgctatttctagatagaaaaacaaaatagaaaagttcataatctcaacatttgggaatgctaagccagccttctgctctagagccatccagactcccaaaatccataaatgtctccttttgctagaagagtatggtggagcacagaggtgtcaaactttaagatgtatggaatcgtcagaggttgctgaaacatgcaagttcaagtccccagccctgctggtggggagctgcctcaatccttaggagattcttatgggggtccctagaagccacactttgcagtattcattagactcttttagaaaagatagactgtttctagcacccccattgtacgtgtccttttgcctatattttaatttctgaacctgtgccatgaggaatgtcactaagaaaatcactaagatattaagctattctaaagttatttgttggttatggtatttacattttttgctgttttcatggctgttttctcaaatctcagaaaatgtacactctcctctctctctcactctcattctctcccccttcctctagccctctctcttgctctttaatgcttctctctctctctctctctctctctctctctctctctctctctctctctccctctctttctctttgtgtgtatgtatgtgtagccctggttgtcttggaactccctccatagaccctttctctagccttctctcttgctctctctctctctctctctctctctctctctctctctctctctctctcagcttctttaagctggaaacagggttgttgctgagttggtaggagtgtttgccttccatgcacaaagccaggattatctccacagcacatataaccatctgtaatcccagcatttaggaggtggaggcaggaatgccagactttaatgatcatctccagctaacctaggacacaggaggccttgtcttttgggatataatacatagaaaaagaaaggagaaggaaagaagccagatgaattctttaaaatgaatcaaaataaaataggcctctcaggttctggcagagtttattttgaatttcctttgggagttactctgcattttccccagctcattgggcgggtctccaaagtaggtaaaagggatcaggacccgaggaggccaccacaaaaagcctagggcctcagagatggtcttgatgctttccgtactgcagagagaactaacagcctgtgaccagaacatctctctcctccagcagactccaagagcaacccttgcctcctctggggtaccatcttcagttcacgtagtcctggatagagacagattagattgtatctggacaaaattatccattagtgactagaccttgtgttagtcagtcctgcattaccataacacgtgccccaatccgtcggagacagggcttcctttggttcacagttttagagattccagtctgtgatggatgggactcatcattttgggtccagtaatgaggcagcacatcgtggctgaatacacaatggaacgacccactcatttctcggccaagaagcaaaagagaacaagcagaggacttggagttcccaacatgcccctcaatggcagaccttctgatggcccaaagatctcctactaggccctgtcccttacatatccaccatttctactagtgtcaagatgggcctttgtgtgacactcaagatacaaacctaagcccctgctggggccactgagttgggtgtttacttattaaacaagaccagaaaaccttcctagcttgggttttgttgctgaagagacactatgaccaaggcaactcttttaaaggacaccatttaactgggacccacttacagtgtcagtgtcctcattagcatcatgatggtacacttccatggcagtgtccaggcagacctggagctgaagaaggagctgagagttgatccgaaggcagcaaagatgagactggattccacactgggcacagcttgagcacaggagtcctcaaagctagctcccacagtgacacacttcctccaacaaggccacacctcctaatagcgccattccctatggcaaaacattcaaacacacgggggccattcctagtcaatacctttcttctgcctttcattgggtttagaaatcagttttactagtctctctcacttagacgtgcctgcgctgttcagctgcagcaggtactggctgagactgagcaaaggccatggcgccaacagtgagtctcctagtctcactcagctcacaaacaatccaacccagccattcaaagcttcccagcggatagagctcagcacacacttgtccctgagagcaacagccgtcagcttagcagaacacaggatcagcgggaaagcttcaacagctacagtatgtggagatggggataccgttcagttggagagtgcttgcctaaaacgcctactaggccctgggtttgatctccagcactcagcactgtaaacaaacaaacaaacaaacaaacaaaaaacaaaaaaataaccatgatagtgtacacctgtaattccagtgtgtgtgtgtgtgtggggggggggggagttagaggcacaaggataggaatttaaggtcacccttggctacaggaggcatttaaggccaggctacactaaatgagaccctatctcaaaaagaaaaacaaaacaaagcaaacaaacaaaaaaacaaggcacactttgagccccagagtccagagatcctgagtcagttagtacagtacaggttacttgggtattttcaagatctttgcagataattccaaattccagcaaggtcaaaaattatcaacctgaacaaaggtgtttgactttacaagctcagtttctatagatgtaacagtactgtgtgtaacccaaacacctctgggcttcaagaacgcagtgcagtgcggagcttctgaagtgctcagcccactctttctcttaaagagagttagggaggcaaaggtggatggggcagaggaaaccccccagtgggaggcagcaggtgacctgcaccatcctccttgcccgctgccctcttcagtcctgcttctgcttcaatgaggaaaaagctggtaaagtagaactcgtgagctcctagcaaactgtaaacaccctgtctagtagtctggtgcccttgaaatgtgccttccccagtccaaacgaacagggcagctaaacattaaaagcaaataaataactaataaagaacttagaagaaatagcaagcattaaatgagattttgctctcattgtttcctgttcccatcctgggagtggttttaggaaaatgatccccaggcaggcacagggtggccagggcagaccccatggccccctggaggaacatggctagcctctgtggcctggctgttattgcagctggttggcgcacagccactgtcattccggccacgggggtggggatgggggggacgctcggccggcccttctcctgggttgtttcttgtgtacacgtagcccttatataaataaggttttattaaatgccaagtcagttctcattaacaaagaaagaggaaaaaaatctcagtaaaccactgtgaccggcacctgccctgctgggtacagagtaagggtgggggtagggtgggagcaacctccagacctgggaatctgtggctctgagggaacatagtgggagttagcaccaactggggccagctgtgtttttcctctttcctttagagatcagaactgaatgttgtcatcttcaaataatccaaaagcagttctctgggccttgctctacccaacccagtcacatagtctctctctgtgggtgtctctgtgtctctctctgggtctctcactgtgtgtctctctgtgtatgtgtctctccgtgtctttttgtgtgtctctctctgtctctctccctcccctctctctctgtgtctctatctctctctgtctctgtctctctctctctctctctctcacacacacacacacacacatttgcatattgagttggggaagctcagaacaaatcaggtggctggattctctccatggctcagcctctcttggattcacctccaatagccatggtgtgaagacgttcatcttcacctgggactttttcaggctaacagcaggcaacttgaaacccagaggttcggagctgagccctgggcatcattactgcctgcatacctaaaatgttcgcacctcattaaaaaaaaaaaaaacacaaaaaacaaaacaaaaatcaaaacaaccgtgtatccctttagtactttagtctgtctggtgaggggttggaggtttcccatctgattcgcccaggttgcgcaggcccctctgtccctcctccatcccattttctcctccaccccagccctctgtccttcctgttttctctcccactctggtgcacagctttgacatcttgctgagaagcaaatctgtcccttgtctgtggatgtttatttgtggaaactcagccgaggagatgaggcagactcgaagacctccattctgctgggaaatcttgagtttccagtccttttcccccttctccgtggctgtggatggaggaaagctggcttttgggctcacagctttctcctctgtaaatgtacctactgtagcacagttcggcttctttttttccccctctccctccatctctacgccactgtggcttttactttgcactcctgtccctgtgactcttggctagccgaacattgagttccagagaagaaaaggcccaggcttgggggtcctgactacacactgctgcccgtgtcctgcttcactcttggctctgctccctgaattcctgagccaccgggaataaacagggggcggacggacttcgcattgcctggtgagagctggccttgctttctgctccctggggtcactggcctgcagtttgttaaatttcaactctgtgttccaatttttcgagtggctttttgctatgcacaattctctgggggaaccccacatctcccgggtttaacaataatgtcacattagtgactttacctccatgatatattccctccctccttcccttccccctccttcctccctccctctctctccccctccctctctctggattgctgtgtgtacctaactttctcctactttgggaagaaaagagaaagaaatcaaattctagtgcaagcagcagtgtacatgtgttgaagagaggtgggggtgggggtgggggcagggtgtattggggggtcggtgtgtgtgtgtgtgtgtgtgtgtgtatgtatgtatggtgtgtgtgggtacatggcaggcagaaacaaaactcagacagaaacagagttttaaaaaccattaagccacactagaagtatttggcttatggcatttgtagtccctgcccccctacatcaaatcagtggttattggggttcgggtccccttgacaaatagatttcaataaagaaggaattagaagagaggtctttaccgtgcctggggctaatgatcttatcatttgcctgtcttgatttccagtaggctccagataaatacagtaagctagggcttgttttcttgacagaccagatgcgactttatagactgaggaagaaagcatccctgatggtcagagctaaagtgacttgcgacagaagccagtccctgggacagctgctggttcagatggtggggtctggcatctctgcctgtgttcagtcagtatagatcacgtacttatgctatgtgatacccacatgttagataatagcttccctccagcgtaaattggcttttggaaggatttgggttcctgatgcttcagctctccacagaacagtaactcttgacttgtttttatggattaggattgtgtttgagaatctgataccagctctaagcctttccctagggaatgtaactccccacagactcgatgaggtggagacgcacgggaaccacgggagtcaggccccaggttaaaaactcatgcaatgaaatttcttccctacctaccactaatacacaagtaccccagtgggtctcatatataaaataagatatttcttttttgttttcaagagttaaactcactctaaaagtttaaagtgggaacgaggatgacagagctctgtccccaaccccagaagcacttacatgagtgtgtatgtgcacagaacctattatatacaggccaagaccacccaggacagtgacaggaccacagaacctgaacgtgtcacagctctgacaaggcagacactgagactgaagatgctctgactgaagatgctgagaacgtgtctgtgtttgggcacacaagggaattacagctaagacccttaagctgtacgaggtagaaagctcactcccatattgcaaaattaggagagcagcagaattcagtcatgagggagaccccatgtcattgtaacccagtatatactgagctacagagctcagggcgacaggtagaaaatcataacacagatgtgactgcacatctggggtccagcacagtgtcagctaactcccaggactctgagctgctacttcagcctagcctcagcactggccaggtatttcttccttctgaggacaggcaggtgcagaaagccatgctggtttctggtgttgtcactgaccttggctcttttcataaacctcctcagcactggctcttgagtgtgagaccagtggtagaggccgagtcctgggccacctgctgacacacacaggcatcccctagtgacccagacactgctttctggctactgtctaacaatttggggttgtttctagggaccattccttccacgtttgtgaaattgacagtaagacccatgtgacacctgtcatgggattgcagtggcatttgtattagagaaaagatgggaaacacactttgaaaccaaagatgttttgcttattccaaagtgaaagggtgggctggggtgggtagttcagtcagtgtcttagtcagtaaagtagttggcctacacatacaagggtttgtgttcaatacttagaacctatgtggaaaagccagatgtggtagagcatgcttatagatccctgcactagggaggcaaaggaaagtgtattcctaggcctcactggccagccagcctagcatacttagtaagctctgtgccagttagagaccatgtctcaaagttcaaaattgaataaattcactcattcattcattaaaggttgaatggtgcctgagaaatggcccctgaagttgtcctctggcctgtacatatgtacacacacacatacacatgtcacacatacacacatacactacagacacacatacacataccacaaacatacatatactatggacacacatacacataccacacacacacacagacatatacacaaatacatacaccacatacaccacacacacacacaccatgcacacagagacatgcatacatataccttccacatatatacatcacacacagagacacacatatacacacaccacacatacatacatatactacagatacacatacacatatatacaacaaacacaaccatatatacgtacaccacacagcacacacacacacacacacctaccatatgcacatacacacagcacacaccacacacatacacaccacacacacagacacatatgtacacatacataaattatatacacccacatacacaaaaagagatacatacacataccatatacacatcatatacacaaacacacacacagacacatgcataccacacacacacacgtatacatcacacacgcatacatataccacatacagagacacacatataccatatacacatacaaacacacagcacacacacatacacacagcacacacacatacacatagcaaacacacatgcatatagcacacacacagacacacagcacacacacagacacacatacatatatcacacacaaagacacacatataccatatatacgtacaaacacacagcacacacacacacatacagaggaagagggggtgacaggtgatgggggagaatacactatgctttgcagcggcccctctctccttcctcagaccccagcattggaggaaggtctatctcacagaataacctttccctgctgcccgctctggattccaagctcagttttgctttcatcagaaacagacagccgggcgtggtggtgcacgcctttaatcccagcacttgggaggcagaggcaggtggatttctgagttcgaggccagcctggtctacaaagtgagtttcaggacagccagggctgaacagagaaaccctgtctcgaaaaaccaataaaaaaaaagaagaagaaacagacactggggcagaagttgtcaggagggaaggaggcctagtttctgtcgcactaaggaaagtcccgtaacttgactgttcacataatccagagcccaccctctgccttagaccttcagacactgttcctcccagtgtaggcagacagcacgtctggatgacctctcccagtggaaacagttggcatgtccctcacccctcatgtaactgagtctgaattctccactcatgacgcatttcctagcacgcagggcgcctctcctggttgccccctcagcaccaaagcagtttcctctctttttatccaatgcttaacaactgtcaggctgcaacaaacatgctttaaatccacagtcatccagttgcctagcaacaacttccctcccggataaacctgggcttcctgtagcagctcctgggaaaggaacctagcacgcagggctgcctgcccagtgtccacagcctcactggctcttaacttctgttctagatgctttcgagacaagttacgcatccccgagtccagaatcttccactgtctcccagaggccatgttatcctcacgaagacactttaacctgatcctacctaactacccactcattgggtatatgttcagcttagaaatgaatattgtttccagatcagctcctttgagttagagggggaaaaaaaaactattaatcataggcaaatcctttcctgtgctgatgaagtgatagccactgaatcagtgactatcatcgagatgtttaaggagctggtacacttcatttcacactggaaaacagaaagcagatccaaggggaaggaatagactttgtctttcaagaatcttaacagaggtctttaggagccccaagtgaggtccttacatcactttcttaagtagagcttcactgcccaggaaccactcagaccaaccacaattaatagagatagcaaccctatctgtagatccagtagtccgtaagaagtctaattagaccttgatctcaagttatcagtgccaaccccaatgatgacacagagttatttgtcatttgaaatattaagagaacttgcatatataggtgtctgggacatatgtaatagtagtatttgccactttggtccttgaccccttttctggaagtgtttccattcaagtaaagttacagcctggttcttttggcaggagcaggtcttatgaattggaattgataacggggagagaattcaaggaagagtgagccctgaggaagttatcttgtaatttatagccacatggttaagaagctggtgggtggattcagagggaggcttgctgggagccagctcgttctgagatgtaaatggcttctccaaaacatgtgtgccttagcatttatcgtcccgtggaaaataactaggaaggagaatgcaggcgggccactaagcacacaccagaccattgcttctcaaccttcctaatgctgtgaccctttaatatggttcctcacgctgtggtgaccccaaccataaaattatttcattgctccttcataactgtaatctttctactgtgatgaatcgcaatgtaaatatctgatattcagggtgtctgatctgtgacccctgtgaacctcccctttggaggtcaaatgacacgtgcttagcaaatgtatgattggtggattattatccaaatgattagcaagattaagaaaagaaagtgttgaccagacacaaaaatgcatctcacgccctggccccaggctcctgctcctccagatcctaatctcgtttttaccaggttctctatccaggctgatcgatgtctggcttcccattcctctctccacctggttgcagagtccccaacccattctgtgcacaagatactgccctcaactcatccttacaatcatctcagacccttgtcaactcaagggtcaccttcccaataggagtagaacagtctactgcctccctggcagagatactgctcacaggacccaaaatctcaggagatcctatctcttctctacaacacgcattcatggtttttcccttcctctgggagtcttgtctggtgtcactgaaccagcaatcagaattactctgctgtattttctgttaccatgagtctgtctgttattgactggctcagcagggaaacttggaataggagcctttgatttttctggatcaggttaaagaattttgtttccgaaagtgacattatagaactacagttgtagaggaaagtgtagcttgcgaacatgtacaaaatcagatagtacttgtgtgtatgtgtgtgtgtctctgtgtgtatatatgtgtgtatatgtgagtgtgtgtgcatgtgtgtatgtatatgtgtgtctgtgtgtgtatgtatgtgtttatatgtgagtgtgtgtgtctgtgtgtgtatatatgtgtgtatatgtgtgtgcgtgtgtatgtatatgtgtgcctgtatgtgtgtgtgtatgtgtatgtagaacatatttttgtgtagatgtttgtgtgtgtacacctgtatggatatgtctgtgtgcacatacacgtacagctggaaacggacattaggtgtctttcttagttgctcttcatcttgttttttgagacagacctctctctctctggtctagagaacactggatttatctagactggatggacagcaggtcctgaggatccccctgtcactaccttcccagcactgggattacatgtttgtgccatcaaacaggattttatatgggtgccagggaccaaatcatgtccccatgcttatcgggcaagcacttcactgacttagccatctccctaggcctgtaactacagttaaaaacatgttttttcctgttgattccagctccccacactcctggacagcagttctcaaggaatcaacttgagattttggggaggaatattatctgatctgtcaccaagaatgcaaaaggtaagaggcccagtgtcattaaccactgttttgttatgtcatcagaccatttttaatatattcattatatcaactaattccactgtacctcttgcctgttaaggagaaattcatcggctcttcttatccagtagtctaacagcgttagctcatgtcctacaccatctgtcctcctaggtaggaggggaaaagaaaaaaacccattcttgtgatgctccatcaagacataagcaccagtggaacccacaacttgtctgcagtagcttgactcttcatggacttgcaagtgtagctaaggctttctcggactgagtggtggagcagtgagccacgtgccgcccacaacaatagcaaatgcttacacagtgcctcattattgtgcttatggctacagtctttagtactttaccctcatggatacacttcctccctccagggtgactgtttcgtgttgtttttatgacatacgtatacaacgtaattcatatctgattccataagacttctcaaatgttgaaattggttcctccacttaggagttgattgttgtatgagccatgaagagactacacaaatacagtcacaagccttattggatacacagacaaggaggaagagaaggcatctctttatgtgtgatgagtataaggcaaggagaagtgaaatggaaaaccttttgttgttttttctccccccagacttttcccctttggttttcccagctgccttggctcagccaacttgggaaagaacatgcttggaatctgtgtttataaaattaaactcaatcatggcaaagcagaagctctgcctggcagggagagggagagtgaatactgctggccacctgctgccgtgggagcctctaacattttcttttctccttctagcacttaaaaaactcagctctgccgggcgtggtggcgcacgcctttaatcccagcactcgggaggcagaggcaggcggatttctaagttcgaggccagcctggtctacaaagtgagttccaggacagctagggctatacagagaaaccctgtctcgaaaaaaccaaaaccaaaccaaaccaacaaaacaaaacaccccccaaaaaaccaaccaaacaaaaccccaaaaaaactcagctctgtgtactaatggtgaagtgggtagagcatgtgaatagcttcccaaagcccatcaacacttcattctgtgtgtgggtgctccggaagatttccttgcctgtttagataagacgtctcagcgtttgagaaccaggttaaagcagatagcccagtgtgtattaattgatatcagaacatttgaccccgctacagcccttcatttctgagaactttgattaactaagcagcataataatgataatagccccttctggtcataagacccactgttgttgaagcaacctgagaatctgactttcttactgaggcgtagactgtgattataaaagtgactcactgtgtggattccacacggcgctcatcagtttcggaaagcaagtgttggcatgtgtacaaagagagagaccacaggtaaacatcgctgagagagaagtgggagaatgttttccgtcacgcctggttggatcctaatggttttttttttttttttttttttaatttccaagttccttagaatgtgactagtaaggtgtggttagggaataaacacagcattgtttttatttgatattttccctaaaatgaagccaagtggcctgataggaaccaggacactggtgccacttgccagtgtcccccagatttctcagcatcacagatctacttttcaaagatgaagccacgggtaccatgacacccaccatgaggagagagatgagaagaataccaggttcctcttagtggacatagaatttgagatttttcatccaataagtgagacatctgttctttgcttgaatcttaaaacatacacacacacacacacacacacacatacacacactctcttgagctcaaatgggggtggggtgggagggagagagaacaaaccacacgtttcagttgaatggaagcactcacatgggataaaatgaagttaataagatattttgaggagccagagaggcagctcagcgattaagagtgcttgctgttcttgaagagaaacagcgatctgctccaagcatccacaaagcagctccctgtaaatgtgtaatcccagttctggaagaatcaacagccccttctaacatctgcagtcatctgcatgcacatatgcacatacagacacagacagaagacacacaagtgcacataaataaaaggaaagcttacaaaggataattttccaaatatagaacaccacattctaaagttttcagtcgtagaaatttgccatggctttgcacttctggaacaggagaacgattaccttatggtgatagagtctctgcgtttttccaaggacacaatcccaaggaacccgaacaaaggaaaacagaccgttgttagcgtcttttgtgttcttgcttatttatcttcaggtagatgacagcaggttttttttcttcttctgcagatgaattaagaattgctgagaaaacttatgtttccctttgagtaaggaaaacggccttcattctgtctgcttttagattcttccgagccatgctgcaatggcagctcggttgttaagagcactggctgagtttccagaggacccaggttccattcccagtaccccccaggtcacagacatctgtaacttcagttctaggggatctaacaccctcatacagacacatgcgggccaaacaccaatgtgcatgaaataaaataaataaaactttaaaaatctaattcaaagccctttccttatccttagtttatccatcggccaagtgttcaagacttgctatgggtgagcagacctctcctgcagaacggtggtcctgagaccttcacacagctgatgagcatcctgtctgacctcctgtgtgggtacccagagggaggaggctcccgagtgttctcctttaactggtatgaagacaataactataaagccttcctggggattgattccacaaggaaagaccccgcctattcttacgacaaaagaacaagtaagtcctctgagtcctgtaggcaaagtggcctctggtgtgcattaagacgatgggtcagggatgtggggaagctgggctgttggtaaagttctcgctgcacaagcacaaggtccagagttctagccccagaatccactgagaaaaacaaagccagatgtgatgccattggtaatcacagctgaagccaagacaagacggtgggtttgctggtcagctgacttaccaggtcccgagttagtgataaaatgaggtacatggcacaccccaggctgccctctgacctctacacacatgtatatacatgcatttacactacaatacactacacacacacacagatacacacaaagatgggttagcatgttgggttctcaacctctgggttgtgatcccaccaaaaccatagaaacacacagatatttacattatgattcataacagtaacaagattatagttatggaatagcagtgatataattttatggttaggggtaggggtcaccatatcaggaactgtattaaagggttgcagcattaggaaggttgagagccactggttaacacttttaagaaaccccagtgccagggttgattctccttgctcttgttaagtggccttgggcaaagagatttctcccagaaatcctccttccccttgtagaggagaatggtgctcatagaagactgggcatgagccatgggaggcaccccgcccacttggaaagggaaaagaggggacatttcccactgatgtaactgaactgtgacgaagttccaggggcagagaagagtgatgaaggagaaggcaatgcagagttacaataaagctcaggccaatagcatcctggcaagcctacagggctggcacgcccctggcaagccttctccctcactttcactattttgttctgggataggctctgcaattacaaaaaaaagacagcaagagacacagcagaaggagttgaaggccgagacagttacacacaggaagagaaggagttagtagatgtggaatgacttgagactacagctgagattgcagctgcagggctggggtggggtggggtggggtggggtggggtggggtggatggtagggtgggggatgagggaagatttgggctttcacttcctttggtctcttgcaaaaatcacaagccggttccttagcccctctcttttaagcagaaaaaagcacaagcgcagccctgccctctgtctcagcccggaggctgctgttaagagacactaccgcagtctctcttagtgggagcttgttattagtagggtccagcctaataacttagattatttctcaaaccatccagtgtggcattgaatgggagttaagcatgtgacttgatgcactaatgaccttgtttagttatgagcagtggggagctttgaaaaaaaaaatgtcccttttctcttgacagcatccttttgtaattcattgatccagagcctggagtcaaaccctttaaccaaaatagcctggagggcggcaaagccattgctgatgggaaaaatcctctttactccagattcccctgctgctcgaaggataatgaagaatgtaagagcccagctggtatcgttctcttatatctgggacctcccagaagacaacggtgtgcatgtgtgtgcatgtgcatgtagagtgtgtgtgtgtgcgtgcgtgcgtgcgtgcgtgcgtgcgtgtgtgtgtgtgtgtgtgtgtgtgtgtgtgtgtttaaataggctcctgccaatgactcccctctggcttattttcccctaaatggattcctgggtttcctccctgaagcacagtcacagtaggaatgcctcgctctggtgccctgcctggacccaccctctccgaagtagcctgcaatcctgcaacggacttttctttcgcactgtgtgacttatatccctaatggaaatgttcagcattttttgatctctggcttcctagaacaggcaaagatggggaggataaatatttgctcactagaatcccaagtacaactcaatgaggcttggaatcagtagcatcattattgtacgtatctctgagatactaacaaattagattctgtcaatcctagagtctgaggaatggcaatattccaggaaaggaaaagcacttccaagaagccccttgtgggttggagagatggctcagctgttaagagaactggcttctcttccagaggaccagtgttcgattcccagaacccacatggcagctcacgtgtggtatataggcatacataaagacaaaacacccatatacttaaaatattaagttactatttattattattattattattattattattataaagaggaagaggaggaggagaaagagctttgccttaatataacaccttaaaggtttatggtgagggctaaaagacagaagcaaaggttcttacaatttcttctgtttgtttctgtgtgtctattttaggccaactcaacttttgaagaactggatcgagttaggaagttggtaaaagcctgggaggaagtggggccccagatctggtacttctttgagaagagcacacagatgaccgtgatccgagtaaggatgctcacaacataggatggggagggccgtagagatagttcattccaacttcagccaggccaagctatagcgacagaacctcaagcactagcctggaaatgtcaccaagtggcatctctggtgttgagtggggaataggcttcttaaattctgtgggacaatttaaaagttgccacaaggtcagtatttttcccatgaattctcttgaaggcctcaggttcaaagaggtgtctcctcaaaaggccagctctatactgctaagatggtcacttttgtctgtctggcctcatttgcaattttgtaaagctcaagaggcaagagctctcaatagcaaggcaattaaaatgagaacaaagcagaaggccataaaaaggaaatcttctatgttatttttacatgctcagcaatacttctcccatactctgccttgcctctcctctacatagaagcctttgtgttagaataagacaatagaagttcaagcctcctggcttgtttagtgagccttcacgtctcaatcagtaatcattaaaaatctgacatgatctgagactaaggccaaagagcctgtggaattcttaatttctgagacataatgttcttcttcccaaggacaccctgcagcacccaaccgtcaaagacttcataaataggcagctcggagaagaaggcattaccaccgaagccgtattaaacttcttctctaacggtccccaagagaagcaggctgatgatatgaccagctttgactggagggacatattcaacatcactgaccgattcctacgcttggctaatcaatacctggaggtaagagacagcaatcctcctgaggaccatagtgagcctcttaaagataacgtcatgggtgaggctagagacctgttagccagtcagctggtgttggattcagtctttcatccttcccacatagacataagggtccacggccatctgacagcatcttctcttctagacttgcatgcaattgtcctcacctctcgctaacttcatgactcctctggctctctccttttccctttcagcacacatccattcctagatatctcctgtctgccattgttccaatgaccttctgttggccagtatccaccaaaccttgagtctgagtctcgtcgattactggacacccttactccaaagtcttaagggcatgtcagattcagcatgtgtcaaaaaataaactcatgttctcctttcctagtaaattcctgcacttctagtgccaattaatttcagtagccttttcagattcttaagccaagaacttcatctttaattttcctttctctttcactgtcagagagagtggttctagaccgagtattacatggtgccacttctgtgctgcatgtttttgtatccacatgccttatctcgtcccccagcaatcccatagagcatgtagtgttatcgctgccagtacatagacatagaagccaaggcttaaagaggttgaataagatcccacagccattaggagtaccaaacagagtccaaatttgggtgtgcctgaattcagagccagccctgatgacctctttcttcccctgccacgcccagtcacggtgctctgtctgttttcgacctcccaattatctctcaactctacatcttgctctctgggctctggagggcttgaggccttgtaccagcctgtctgagcagctttctccctggattccagggtttgcgctgtgttaatccaggcatccctccacgcagacaccagcatcacattccaaacacacatctgcttgcatcactcaaatgtttaaagcccgaatgactcaacgcagaagcatccagcctgtttctctccattggtaatgcctcagctgctgacagccctcagcactcatccttgcaccagaaaattccacagaaggaggggaacgcctttctcacagcataagcaatacccccaaagggcctcctcccacgccccactccctctatcagacttctgggtcttaatgcctggggaggggagtagttctgactgggaggcctggaacacatgccactgtgggggactttaagcaagattcctatgaagtgagggaggcattgtcccaaaagaagatgaaatgtgtgtctgctcaagcctatagtgactttttcttttgctaccatctacctgttcattcttgtttgttttctttgtggtactgggggtagaacccagggcctcatacaggccaagcaagtgccccaccacagagctgctgagtctcttcagtcctacacatctgcaatttgagactttgccctcaggtcttccttctgctgtctcacaggcttggaaattcattccttcatgatctgcagccctcccctcagacccttcaggctccttttcaagttcaagtaggaataagctgtctgtgtgtccatctcgggcttgaccgtcaagatgggttacctggcattagtgggcacattttagtcatcttcagagctcaacctcacagcctccaagattttcacacctaaaggttgatcgcacccaatgggctgggcctcagcctccaaaaaactaaggccattaggaggctgaagtttcttctagaaactggaaagggagttaatccgaggcctctaggaatgagctcttctgtcccagatggtgagtcctcagaataactcactggtgagaaaaggcctggctctgtgttcttggctgctcttgaggactcccgctgccccggggccacggcattccctagaccctccttctctagaaccctgacgctgacatcactgcacacgctcctgaggcatcttcttagctagtacgaagcatggtggccgaagcacccgagttgaagcaatccccatcttacctgaagacaataatgaccttggatgctttttctaaaacatattctgagcaccaacccagaccagctgactcagaagtccccttgattgccctggtactgcacgtatacttacagatctggggcatttacagtgaccaattgatctcttcctttcttgcagttaagcccccatccccaggcccaccattgctaccgctgccccgttgtcttaatcttaggcagacagagcctgcgcatgggtatgggtctgccagagagctgatttgctcctatactggttctcagcaatggttttgtgaggtataggaagaataactcttgtctttgacttgactttgtattgtgtatgaaaaattcctttcttccttctctccttcactcccttcccctccctccctttgtgtttccctctctcccttctttctttccttccttccacaccctaccaactgacctatataccccagccctaaaggaattgtttttttctaagcatcttgtgtttaatacagtagcaatagatgcgtaatgagtgtcattctcttaaacagttaagaattaagtctctgggttgagatttcgctagactcaattatctactgtttgttcctccgtctgcatagttgtgaaatgtggattttaggagtattgacccgatacttggctggttctgataattaaatgagctatttcatgcaagacactgtcatataagaagcactaatcactgtcaaatcttaatcgaagtaccaaagaacctggcctaagtggaatctggcccccagctggtggtgagctctgtgctcatgaaactgctgaccatatatctagtttctcagccactgtgacttccccagggctttgacgtacagatcactgtgaccaagagtcagtggcctccccgtggggacccctacaaggcttttgataaaggctgtggtaatgattcggtttcttatcatattgcccttgggtgggggtggtagtggtgagggaagcaaagagttaagggacaggaaggagaagtcagagtgggagagacagtgagggacaggggccacagcggtctgcctcagctcttcagcatctgctcttgtgttttgggctatctggaggagccttgaaaaccctgagtagcacgcttgccgtggaacccctctctgatagttgtaaaggtttctccaggacagggaagctagtgtgttgccaccatgccttatttaagaatgccagctcggtacctccttttcaatcatgggacttgcactaatgagtgtggaacacttcctcatgggacaatctaggagcctacatccgtgcctattctaaaaacagaaaacaaaccaaaaacacttatggaaaattaggcaaatgaattctgttacccataacaatgggatgcttaattgtgatattgaaaaacaacagaagctctgagaacaaagaagacatctttaagattttcctcgttatgggaagtgagagtgattcagtagattttcttctcagagaccagaagggctaagtctcttccttcctgcttagggtgaggtctgttccatggacggagtgccctgtaggatatccactctcctgaatctgtcttgtggatccaggttaaactgccgcacatagagcggtccgacctgtcccacagggcttatggactggactctctgcttcttatgagttattctgagaaatttgacactctaaggcttgattttcttgaatgtacaattctaagtagggatacaaggtcattgtggagaacaggatgtgagggagcacggcagcaaagcacttaacacattcatcagacctgtgtgcaaatgctaggctttgggggctcttcatttagaacatttaggaccaatacctcttcagagcggctgtggagatgacatgagacactctgggctcacaccaagagcatgtatgtacacatggcagctgctgctctgaaccatgaacggagtaaagactgtaccttttcttacactcgaaaatgcctaagcgttagtcatggcgtctcatgctgacctctggcttagcccgggtgaactggcttagagtcacagttgggtctgtctatttccagagcctaggaggacagctctggggcacgctggacttggacagtgaaccaggggctgagaaacgtccgtatcctccagctaccttctggataaagctttctggtgactgtccctcatcccatagccaactactggctttctgctgaccctgagaactacaggttgaagtgaggcaaacctcttggttagaaggtggacagttgtctagagacagccatgctagtgtggacatttgtacctgcacatctctcacatatagagtggcttttcccggacaacatcccattacccacatctccaaatctagggagcctgaaatttagtgaggactttataggtaataatttatggggagtatgttggtttatttgttatttactttgtgtgtgtatggtagagggctgtgtagggtgtgctatgacatgtggggaaatcagaggacagcttgtagagtgatttctctccttctaccatatgggattttagggttaataaattcaggttttcaggcttggtagcaagtgactttacccacggagccatcttgctgatccacatttaggtaaacgtcataacttcatatgcatgcacattttattcgtaacctatagatgtctctattcacatgttttccatagaaaaacacaattacaaaaatccacaaattatccttctgattaccctttagttgaaatatttatacttctcctcttcaattttttttttgttgttgttcagcaaaaggttaagcctagcataaatcaaatactatttacaattcacagtggatttaaatttcttagtacatttgaatttcaggtcttaagtttcatatcaggaagctgaattcagccaaactttaaaataaaaatatctctaatcaaagcataaaattgtaccttaatcaataacagctaccttttgctaagtcttgagaaaaaaatgtagtcactaattgcttttctttggctatcagctcagccagtgtgcataactctttatgaattggatggtggttattttcttgaattatcagagtggttttttttttaactacttttccttggcacctttaattcttctgtccacatgccaccaccaccaaccatgatgttctcaggaaatgtatttttcaggctaacttaagggggaaattggatagagagatgaggtcagattgggtgttgtagaattagatgtgcaaatattggctgggtacccatgttactttcttctgttaactcaatgaccccagagactgggaaggtattgtgggagaattagagagggaaacagaatccatgccataagcgcaattattatttcaagggctataaattaggtcctaagcaactcacaatcactgtattttatgcctctttgatctctcaaagacctagaacttacacagagaaaagcaaacaggtggaggtaggcttgggacaccagtggaggagagagatgtgcataggccctgggggaaagagctgtgctggacgctatcatctcttgcagccctcctctgtgccaggtaaccataactgctgtcactatatagcgtttaaggcaaagcctctaagaggcttgactccctgccacgtcacagcaggtaagtagggacttcagagttctaacccagatctgtactgacttcagtgatgaagttctttccctgttatatacaaggtccagaggccctaaaatactatttgctcaagttacgtattgaatccaataaagatagcaactattttacaatatttgaggtgagttgctccttgtagaggcctgtcgtctctcctagcccctccccagcccttcaggttcctgctgcttctggacagctcccacctcctctccaaggagatattgcttaaacccaaacccgctgtgaaatatggcttaccagtcctcaggaatgtctcatcactgtgaaagtaaatgcctccacagttctttctaccctatgagactgctccagacctctcagcttggctagagcgcccttcccttacttctctgcagacctgcctggccgtgcccacatccacgtttcaggtctcagtagggttggtttctagccttcttctctaggccttcttccttccacaggagcccagccatgatctgtccacactcgacctatgctggcctgaccacgtcaagggctcaaattctatcttgtttttcattttgatttctcagcattcctgagtagatctctagtggcataaagtagacaccaataaacgttaaacctaagcagaaaataatgtttgccctgagcctcaaaggttaaagccactggctaaggaaaccagaaagataattttaggcagaagaaaaatgtttaaatgagacgcagaggtatgaatctaccagacaagttcacatgaagcaggaacctgagcagagaatagatgtgacattgaaaaatgctgattgaaaaagtaactttttttttttttttttttttttccgagacagggtttctctgtatagtcctggctgtcctggaactcactttgtcactttgtagaccaggctggcctcgaactcagaaataggcctgcctctgcctcccaagtgctgggattaaaggcgtgcgccaccactgcccggcaaaaaaagtaacttttactctgatgtcattgtctccaaggctttctgcctccatctgccaacctaggcttagtactggaagcttctagccaccaaacaatctactttaggcctacaatgttttcagcctctgagacttactgctaagtaagctcacctgttctagtttgttcggacttctggctggctggttcactgttctggctcaaactcttctccatgctgactgacacaatctggcttctctcttggcctctgactttttgctcagcttagcctaaaactaactctactgatcagctctaatcttctagctcctgttcattctctggctcattctatctttacctttgtctagggtgttttctcttcaacctctctctgggtaaaactgtctcctcttttattttctcttgtgcctctgtttcctatatgtttttgtgagagttgggcatatcatattctgtcaaatctttctccaatttgtcactttctctgtcactcaattagacatcatttttaaacacgggtgcttccttctacatactaactttgccatcattacctgggcatgtgtgaattccagccagagggatttaaggtgtgtgctaagggctgagtcacaccacaactagaaacaattttttttttcagtaaataatacaatttcagagcccactgtgtgagtgtgaccaaaaatcctacaactggtgatgtctgaacttggccagcatggctcataaaagcttcattctgtgtgtgacaagacacactcttcaacacctatgtctgggctctgttactggggacaacatagctatccatctatctgaaaaatgagtaaaacccaagctattcagataacaaccactagtgggcagaactctgtttgtggtacagaatggtcctactggtcagtgcacatatagccccattattattcaacacactagccctcacccccaggtgttgttggaacaatggaacaggaaaccaggagagctaaacgttgggaagttattagtcaagtgatggtgactttcattgaaaccagctgggtagaaaccattgccctggtggcttcgcagggcatttgccctggtccttgtgagtcctcattcttcaacctcagctttttattcatttcaatactctatctatctatctatctatctatctatctatctatctatctatctatctatctatctatctatctaaccacccaccccatccacccatccatccatccatccatccatccatctatccatctatccatctatccatctatccatctatccatctatctatctatctatctatctatctatctatctatctatctatctatctatctatctatctatctatctaaccacccaccccatccacccatccatccatccatccatccatccatccatccatctatccatctatccatctatccatctatccatctatccatctatctatctatctatctatctatctatttatctacctatctatctatctatctatctatctatctatctatctatctatctacctatctacctatctatctatctacctatctatcttctttattggttagccacaattcaattcactctttgtgagtgaatgtttcagaagcctgttcacactgcctgatttattcttgcctctaattcaccatcccaaacaacccaaatagcccagagtgatttttacaccgtggctttttccatgtagttggaaataaattgtgaaggttgcactttacatctgccaggaaactaattctgggatctttgcccactcccatggtgtttttcaaaaggagccccaggtgtctgcgtgaatgctatcgggaccacaggaggcttccactagagcttatcagctgttttggagagatgtaatgcaggattaaaaagcctcaatgcctcccttatctcccaagaccgacctagatgcctttgaggtttcatggacaaaatatggctatttacgcccaactgtcagcacaatgtgccaggcgcctttgattatcaagttcaaatgaaaagaaagatgtttcttcacagcctctgctagacacagtttaccatgtaatagataattccatgaatctatgacttaatgtttatgaactggataccaagaggtcacagctcaagaagggagcttgcttcccctgcagtttctcctccaaggtgatgttttgtttagctgtgtcaacaaatgaatgtcttctggcaagggcctgggcacagctgctccagtctttctctccagcagggtggcttctctttccagaacctggccactgtgaacttcacttggtggaaggaagctgcaggagaagttgggggcggtgggcaggactaggagaccgctttgtgtgttgatcgatctctgctttgttggctgtcggagggagggcgttgtcctggttctcactgagattctgagttcctgctgtgacatttgctcaaaccttacttctgagggcagagggtactgattttattcacttttccaagtaggtatgctgggtttgtgctgagcactttactttagccaatcttgctgcccatcacacttcccacgatgacataaaacatgatggcatttaaaaatagactccatggcctcattagaacccagtgtgttgtacatgacaaacctgtcacaataggctaaatacatccaatccaggtcctctgatgagggatttgttattagctcagcctcttacagcacatacatgttccaatatacgtgcccgtcagccaaggtttaactttggggattagtttaagtatcaggagggagtcaggccacaggcagatggccttcccacgagaatacattttgaatcatacctgactcacattcaaagcagtttcttcctcctgacctcataaagaaagtttggtgagggtaatgtgatatttgtgtttggtttttataaaaccttcccctgggcagcagcagctggaagtcccccactggccgatgggcagctagtagataccaccctctctaccccattgcccaggtggccttggcttccggccacagcagtgttctggccagatggaacgctgtggagtattagctcaggacagtccgtgtcctcacacagattatttgaagaaaataactgctcgcctgccctggtgaacaactgtcattaatgaagactaaccgtggcaggaacttgagaggcgcttggttattgacgttcaaagatattttacaaaaacaagagtaaaatggtatttataaagccctcgttattcatgagacagtgcactgtactgttggggatgaaaagagattctgccccaaggggaatcagcgtattttgtgggctttcaatgaccacagtaactggccttcatgtgattctggagatgaaatgtgttcatacgaataaagcccttgggccagtttggggcatggagtaaaccttcgatatttgtagttgctgtttgtttattgttatgctttgccatgttggaaagcaaacctagggcctcgtgcacgctaggtgagcattctataccccctgtccccgctttttaatcctggtgtgaggtacccactgcagccttttacaatcactgcctcgtgtgatccttagaatgaacctctgaagttgggcacagctcaaattacagcaaaggcagcagaagccacagggaacagcaagagggggtggcatagaggatggtcggaccccaaccctgtgctgtgcctcttcccaaggtgacaagggggaaaccggcttggaggttttaaaatagatgtaaacatttgagaacctgctgaattctgtgtttctcagagtatcaaggtccccatctagggaaacacatcaggaaatatgactatgaatcagctgcctgattaaacagccaggatggagcccacgtcatcgcaggagccaacaatatcaccgaaaacatcagctgtttattccagtatattaagatataaggttcaaagagaatgagctgatgcccctggaagtcatgttattaacactgtatttgtttttttttttcctatttaacactgtatttgtttatatcagctctattttccccaacagttagaccctagttgaatcacagcaaaaagcctttttttttcttttaatgaattgctgccagttttttttttttttttcatgaaaaaacatagaattttgttcaaagcacagagggatagccacacttacagcattgtggctcacaaattcaaaccaattcagttcagaaaatacttgttgacaccctagcatgaaaaaaaaaaacaaacaaacaaaaaaccccactattccagagaccatgttgaacagaacagaccagaaggcacttattacccctggaactgtgctgaccccatagcaaccagcagccccacgaacctgaaaactcaatgcttaggatggcactaatgaaatctgtaatactcaatagccacgtgtcattactggctgccatattagacaggacagatagagaacaagttggtcatcgcagaaaattccactagacagtacagctctaaggcgagagaccttcagtaaagtcaggactttgcatatggcctatggcttagttcccaaaggaacaatggggaacacccatgcacacaccggggcttccaaggcccacaccgaaggcatacgtgcagattttgcttctgagctgtggggaactaaaacaaggcttttcacgcctctggtcccatctgttcctggtaaagcaaggacatcagagcacagacctctaggaaacgtcatcctagtgccttgcaatgccgagtgaatgtgcagtatccatgtgaaactgcctaaaagtgcgttcatcttcacagataattttgattttattttagaaatttaacttcaaattcattctaaatgttgccttttttttttagagagacataatagttataaatcattatggtagtgtagtttgacagttgaactcatatctacgatgtacagaatgagagcgattgccagctcttctctcctcagccactagtctttcctgtactggggatcccatcccaggatgtcatgagccatagctactctgctgcatggaaagagaccccacagtgaatgctcccctctctgactcggcctcccatcttgaatgtcttcctgggcccttttcctgctatacctcccaggccatagcagagactcctttattcttctacaactctgactcactagtcccctcaatgagtgagaagatgtgacatttgtctgtgtctagttcatcttatttaaacacatgctacttctaaacttgacaaacagcccaaatctgattattttattgcctgtctttgtcaggcgtcgatgtcagacctaaagcaaacttaaaacacgtgtttcattttgttttgtgtacgtgatttgtttgtttgtttgtttgttttgaaacagggtttcattctgtacccctgtccgtcctggaactcctccgtaggcctggctggcctcaaactcacagaaatctgcctgtctctacctcccgagtgatggcatttaaggcatgtgccaccactgcccagatagtaaactcgtgttctgttatctccttgtagcagctcacacccaaagtgtccttgcccgactagcagctgctgaacctgtctcccatagtgatggtattgctgttgggttaaatactgacaaactggctgcagctggcttccccagctgttttaatgatctatacattagatacacacacacacacacacacacacacacacacacacacacacataactatgaacagagtattagctgcttctgcctggaagagatgaaaattcattggcgtgtgatgtactaaagtccttcgtcttgttttagggctggcccattttaagcctagcaagtaagtcctgtttgcaagacagtgattgactgaagaatatctatttcctttagctctgtgacgtgagtgtctactcttgtgtttcttaaagaaataccaatctaatttccttttaagattgcaagccctttaagccctgcttggccccgttggtcttcacatgcgctgttgatcctccccatatcatcttgaatggaccttcccttttttcctggaacactgagactcagaggtcagaaaacccagtgaggatgggtttgtaacaccctccaaggagactgctcttctaatcctctgcaggaagaagcttcagaagtgaggggttcacagggcgtgagctgggtctccttgctccttgccagtacagtagagcttagctctctggtccttgtgtttctggttttttttttttttttaatttctccttaatcaagtgactaggggtttgacaatcactctacgactgcctagaagtttccagtcctctggagaaatggttctcaacctttctaatgctgtgaccctttaacacagttcctcatgggtggcgaccccctccaacacgccattgctacttcagaaatgtaatgttgccgttgttgtgaattgtaatgtaaatttctaatatgaaggatatcagatatgcgacccccaaaggggttcccaccaatgttgagaaccactgctcttgtggctaactttcctgggctactggataaactatattcactggtcagcttacaggacattgtaagcacgtggaagaatccatccataagccacgcaatgctggatgtgtgcagtaggctatgcctcttagccctggtgtgccaggaagaactctgggccagagagagagagagagagaggaagggaccctggttctatcggcccttaacccaggagcatctctaccatttcttccctagcacacataagtttccagccactcactcccaggttctcctggtggagttaactattctttaaagccagaatatactcaacagtctagcctagtgcccctgtgacttccctgtctgatctcattgtcatacttttgcttagaaccccacggtgacctgatgggattttagggcttggccagaattctcttggtcttagcctgaaagtgtgtgtcctgagacacccctcagttggtcagtcaaattcccaaacctagcagagtaaagggtccggtcccaaccactcaccatgtgttatgtattgtgactacctggggagggctttgttgttgtctttgtcttttaacaaaatgctagtgcctggccttgcccctcaagattttgaaataaagactttggtgtctttttaaagccagccagtgctccaaagcttgagggacggtgggaaccacggctctattcttgcaagtcccctaaggccacagtgctgctcctcgtggtcaagccgacctccattttccttcctctgcccgctatccacgctcatgggttcactacaaaccctccaccatcaggtttgagtttgtctcaggaagagattgtcatcttctctccttgtacctgaggagcctggcaggctctggcacgttgcatatactctgtaaattttcgtcgaacaaattaatcaagacaaggctgtctgacctcttgtgagttacattctaagaatcatggacacaaacactccccccaccccgtgtaaaacgaataccagtacaacataattacttcagcaagtctgtacaagtgggcaacctctcaatcctccattgaaaggaaattcttagttttgctctctcttatggatctctctctctctctctctctctctctctctctctctctctctctctctgagaaaagagatattgggataattccactctctcaccatgaagccatgcatgagaccaagctctcagatgagaccatttttttggctgtctgttcctttgctttcctcttcctggttcgtccctcagctggatagcctgtgtgtgtgtttggagagagccaggaagattcaatgccaggaatgcttctctctttaaaagtcttttatcctcaggctttctgatcttcaaagcagccctgtgtccaccgtgaccccactccctcgcctccccatgctggggagtgagaaccttgagtatttgtgtcgttttgaggacttgcatatttggactgtcttggacatctgggcagagcagtctccattaactcttcagtgataagaacctgtcatcatttccagggcccttgcacgcacgcgcacacacacacacacacacacacacacacacacacacacacacaccaacctaggcacacaaagaaattaatggcagaccctgtaattaaatacatagttggtgtatagttttttttgtgggggacccatcccttgagcagtagagtttcttctgcctttttgtttacatttgggcctcagactctccccacctttgtgatcctccatccacagtgtctggtcctggataagtttgaaagttatgatgatgaagtgcagctcacccaacgagccctgtctctcctggaggagaacaggttctgggccggagtggtgttccctggcatgtatccctgggccagctccttacctcctcatgtgaagtacaagattcggatggacatagatgtggtggagaagaccaataagatcaaagacaggtgatggctcagtcttgaaaggtttctccaaaactcatggtgaattatatttggtagcgagtagaggattaagggcaaatgcagcctatggatcaacgaagggaagctaaatgggagaaagtatgatttgtgcagatggaggtagaccgaagcaatcacctcgtgagtcatggccatcggagttagcactgtgaccccaaagtagagctggctagtttgggaaacatgtaggacatcatttctcaacctgtgggtcacagtcctttcacagggctggccccagaccatcagaaagcacagatatttatatttttctaacagtaacaagattacagttaagaagtagcaacaaaaataattttatgcttgggggatgggtcaccccagcacaaggcgctgcattattaaacgatcgccacgttaggaaggttgaggaccacagcttgaggagaattcgtcaagggaccgagttgtggggtaacctgggcttgtgaagtgagtgagttacccactcgcacttacatccttcccccttcatcctgtgccttcttaggtactgggattctggtcccagggcggatcctgtcgaagatttccggtacatctggggaggttttgcctatctacaggacatggtggagcaaggaatcgtgaagagtcagatgcaggcagagcctccaattggagtctatctccaacagatgccttatccctgctttgtggatgactcgtgagtcccagacctctatcttcctccctgagctgaaaaagcagtaaatgggggtgctctcaaggcttcagcatctcccgaaggaaccccagtgatgagggaagactggggagcatagggttctgaccgaagaagatgctggctctgcactccagacggaagcagagggggaaataaatgatagggtgtcgggggtacaaaagggaaattggaggttcaaacaataggagtgaggttgaagtggggggatgcccgctgtttaaatttccacttcgtagtatgtttggtatgtggaaggttctggtcagggcgttttcccagtgattgccagatcagcagattcagactgcgtggcaagaaggcctggtacctaggagcctcagaataatgcagctccttccccaattaacattcctatgatgtgtgtttggtgaaaaggtagaggaatgtgttgttggatgagctctggcctccctctctgaccacccccatcctaacgcctgtccgccctttgaccagtagcatgctaagcaaacagcctgctgttttgttgaaaatagattttggagtggtggagaaagggacagagggggagaggtgctcagaaggcttattatcatggtagatggggtcagaaacactccctgacctatagttggctaaggaatttaactcctggggtgttgagatcacgggaaagtcactgtagcacgagtgtgtgtgactgtgggatccgggaagcagagatggcaaaacgtggtgaaaagagtcccgtggccagctggagagattgtaaaataaagcccagtgtacacacgggaaagcagtgctcgacactgtggccccatcaggtctccagctctgcagaagactgcagagataacggtcgctgttcagaagttagttttactttggataagaggcagagatgggaaggagagcccaggtccacttgcagggtcagaaggggaggggctggcaggaaaacgggtgagtgtggagaacctgtgggaatcggagtcattcagtatgggagagccctctggcggccagcctcggaagtgcatgatttttggttggttggttccctccctagggccattttgagtgaaactatcctcccacgctaggcactgggcccttcctttgacaacacccaacagtttcaatagataataatcccaagggctttaccagtgcattattcacaggggaaacctgtaacgcttaccctaatgtgattccatcgtgtcaaatccgtcctgcttgccgagagcctatcccaggatctactccacttacgaatggatggctctcggaatcaatgactattggatcattgccttgttcagatcacaacccacaccatcaggtctacagtctttcccacaagccttcatggggaagatctaaatatactatatggcatatatactataaagagatggtatgttttattcctacacatatagagcatcctccatctgggctgtccagaacggctccattttgccttaaagaaagaaatgacaaatgagaaaggtatttaagagggctcaacccagtgagggtccaacgatttatttttctgctctccttcccttcgggcttcattctcaactctccattcaataagtattttacgttgattctaccagggacagctggctctgttctgctttttcctctcgcttcagcttcatgatcatcctgaatcgctgtttccctatcttcatggtgctggcgtggatctactctgtctccatgaccgttaagggcattgttttggagaaggagctgaggctgaaggagaccttgaaaaaccaaggcgtctctaatgctgtcatctggtgtacctggttcctggatagcttctccatcatggcgctgagtatcttcctcctgacgctgttcatcatggtaagccgggtggagaagacagtctttaaaaaaaaaatggcttcattgtttctgctctcctcctgttggtgagcaagtgcttggactagttagctgagcattaaagacagcaagacaggtaattcctcacctttcaagcaaggcaggacccttagagagccagcaccctcaattccctgcctcccccccagccatgtatcgttatctcttcccctctcctcttcttgcctaagggcctcactcactgtctacgtaggtttcccagtctgtttcatgaccacgcggagaccggagaccgctgtaagcaaagcccagggtagaactgttgtgtgctcaaaggttgcctcttctttcaaagacaggaatgagcttaaaaggagtgtttcctagaattatcattccaatacttggctacagttagaaggtggcaagcgctattggtggtatgaggggaggagatctggacaattaacctgtcaatcatcctcatggccagggcgttagcttcactaagaaacatctttctgcctgcagagatctccagtgttagcatttcctctaggttctgcccaaccattacctagcataaaaggactttccatcctcctctctctctctctctctctctctctctctctctccattatcccacatgttcatgcctggccacaagttccctgctggcctctccccttctttctctctcctctctttctgtccttctctgtaacctttctctgcttttactctctttcccagacccccttcctatgtcccagataaactttcttttatactaaacctgttgtatagttgaagcctgggggaggggggcggtctcaacatgggcccactaacatctaatattatatactaatataatgctgccacgttataaaacatattatccaaggactctgtttgaaaggatggaatttggagcctgtcttttcttagtgataggggttttttttttcccccattaaggtagaattaaagataggacgttgtttcgcagtatgctgccatcctgtatattttatatttttagctccttcgtagaagcagctccttttgggcttgttggaatacgagtgcacacacttggtagttgttgatgctttattggatggaagtcgctttctgttgtagacccagtgagcctgttcagcttcatcgctatcctcatgtcaagtgtcatgaagatgtgcggacaggatgcaagtctcccattccatgttggatcatggctacctgacctaagaacgccccatcatatatgctagccaactaacacatacccgtttcatccaagccccccattttgcagtaaaatgtccctaacctactgcgttctatctttgctattacactatgaccctgtgggttgtggtgtcaatcaaaacccatcttagagttcccttagaaccaatgctggggtggaggccattctagtcaaacaacctcaccctacaaaggataccagagctccacagaggtgaaaggggcagccccgcccccttcttagccaccataggccctctgctctgccccacacctctttcaccagtaggtgatttgtatctttagaattaaaagagtccgtgagtaaacatctggctgaatggctggcttctgactgataagcgacacagagacctgcctgcccaagaacgaggttttaggacttcaaagctcttgggacgtgaggtaaagagtgttcaccaagagcttcgagcacaaagacgcttcttctccttgtgggaaccagaacgctgttccaataatgacggaaacagagcgttccacaccaaaataaggttttcctttgaatcccccccccccccccccgtgtgtgtgtgtgtgtgtgtgtgtgtgtgtgtgtgtcccttcctccccagctctgctgtgcaggaaagaagctgggggcaaagacaatgggaaggttccattgttactcagtccacaaggagcaacaaggaaagcgggtagaggaggaagctggggacggagcccacaaggctggctgggtgactgacatccaccaaagctcgcagtctagacgtttgcaggactttgctctgggctcggatagaaggttgaattcattctacagagagcagtaaaaaccctccagtccagttctgactttttttttttaagacttcctcggacttaggttcaacttaagtacagcttccttccgtccctcccttccgcatatctcctcctcatctggttttcaatcgattccctcaatacccaacaggcacgagagcatgaaggagagatggtgaccacagcagataagacacacattagttccacttggttctcgcgggctccagagagatatcgctaattggtctctttcctttctattgtggagaaagcagtgattcagggaaaaccttattcgtagatcagagcccattcatgagacgaagcacttccataagatggaggagcaagaagaaacacgcgggagggagagcacgaggccctttggcctcgggaatgctaggctgtgtgacttgtctgtgacccccattaccccactattcaactatgtcccactgaactatgggaggtggcctagtgaacagtgactctgctctgaagcctgagaagggttctcagcattcttgtatctttgtgttcccaagaaaagaatgagaagatctatgtgtatttgggaatgcagaatttggatggaccaaaggggctgacctttttataggggcttttaataaagggggaaccagaagaagaggggtgcagaaggcctcatacagttgaacatctcagtctgtcctacagtgtaactaggcttgttcagaaaaagtcgctagtttgttcctgctttctatatagacagtgggaaaaatgctgagtcttgtacttagattctatgaagagcattcatggatggggaggaccaatccacttccaaaggctctagatccattactaatgtctccacctgtgtgagtggcaaacctcagagagcaagcactcataaccagtcagcaggccgagccccaggcaaaggaggagacttgtttggagtggatctcttctgtattgttgcagggtactacaagaccacctaacactcagagtactacaagaccacctagcactcaggtcttcctcttttgcccacaactaactccttcccaccatgaacttgctgagttgatccataattactgctgaaagataaacttagtcacattaagatatgttacagagacaaagtttctagctaaggatagactagccagagactacctcacccggggatccattccataatcagccatcaaacccagacactattgggtatgccagcaagattttgctgaaaggaccctgatatagctgtctcctgtgaggctatgccagtgactggcaaatacagaagtggatgctcacagtcagctattggatggaacacagggcccccaatgaaggagctagagaaagtacccaaggagctaaagggatctgcaaccctataggtggaacaacaatatgaactaaccagtaccccggagctcttgactctagctgcatatgtagcagaagatggcctagtcggccatcactgggaagagattggtactgcaaactttatatgccccagtacaggggtacgccagggccaagaagtgggagtgagtgggtaggggagcagggcggggggagggaatagggaacttttgggatagcatttgaaatgtatataaagatcatatctaagaaaaaaagatatgttttattttttaatatttttattctttgaaagtttaatacatgtctacaaagtatatcaataatatccacctactcccaaccatctccttagggcccctccatgccatgccccatccccgttcgtgtcctcctttatatgtgataacccctgagtccacttagtgatacctgagtgcacacggatgtataaatatccattgtggcatgaacaacctacagaatgcccaaggacttcagggactctctttccctcagtagcagtcaactgctaattgcacttcggatggggtggggcccctgggctcctccccattagtgctgggatgttgcctggctcatcttttgcaggtgaccccggctgctgtgagttaatgtgtaccacagctgtgtggtgtcagcagttagcacttcacacttctccctctctgctgggcccttccattccttgcaccctctcagccagccaggaagttctctgagccttggctggtgggaggttgatagagaggacccacccattctctgcgttatttagactctggccagttgtgtgtctctgcaagcaaccacactgcccacagcaagggaagtttgtcagaccaaagttgagggcaacacaaatctgtgggttcagacataaatatttagaacaccgtttgatcgaatgatctcttaccaaaatgttagtagcttcttaccactgggcctattatcaccgggcttcggaccagcatccatggctcatgaaccaggcagccttagaccacacgtggctaaggacttcactaaggagctggggaagcacgacaaaggaaatttgattggttaaagtccccactcagagctcagatggcagttgctgactgggttgagttactgggcagttgggttttggtttactggcttaggaacccagagcactggagctggctcagcttcgtggtttcccagtttaaaatttttttttaaataaaatgttagcgtttactaacgggcatgggtaagacaaaagaagtcagtgctttggggtgttcatgtggaaatgtaaggactagcgactggactggcgggcaggagcaccttctagggcggcgggaccctgcctctgggcacaactgaggatgactgatacgtgatccctttggtttcagcatggaaggatcctccattacagcgatcccttcattctcttcctgttcttgttggcctttgccactgcgaccatcatgcagagcttcctgctcagtactttgttttccaaggccagccttgcagcagcctgcagtggggtcatctacttcaccctctacctaccacacgttctgtgctttgcctggcaggaccggatgacggccgacctgaagacgactgtggtgaggtccctacagcttaccccagcccaggatgtagattatggcatagcttcttggcttggtctctaagatgctccactttgccttttgactctgtaagaggcgaatacacagcccaaaggtttaggagcccgagtgaaagcagccttcgccccaagtaacgtagcagctgctccccactacacctgcttgactagtgtgccccaggacactgtggggaaactgagtcagctcctggcttcccttgtttctgcatgaggggagaaccaggtggccctttttcttcacccttctttgcttccggtttgagaagcatcagatgagaggaagcttgcccccctactgtctgtctgctcagaaatcataagtaaaatggggctcattattccaaaagaaattggatcagtctctgtgtctttcccgttctctagcagtgtgtgcaaaaaggatgcagaaatgacaccccctcccccaagagaagactctcaaagctgactttggatggcttgagagacctcttagttcagaattcccaaatgaatataggccttttctctaattgtttccaagtgggccatttctaccctctcattagccagggctaatcagcctcagccctaaagggtgcagtttgctgcccctccagaatctcccagtctcggtgttacatcagtcagtaaggacgactgcctgcctctctgctagaagaacctgttctcaggactccaactctggggcatctgcctctcatttctcatgttaaataagaagttaattaccactatttatagcgctcggttttctaagacgatcacaatgggtaataataagaaactcttctgactcaggctgtgggcagagctgggcaattttggtaatcgtatggttgttacatggtactgggaagccacagccagcttctcggacccaccaggaagcttcaggtctggcaagcacagataagagctggcttgagctaattttaagtgtgtgtgtgtgtgtgtgtgtgtgtgtgtgtgtgtgtacatatagcaagaggattttttcttttggctgagagatagtctgaactctatccagggtcttccaaattacagagaaactctcatcaaaggcaagtatgctctgagagtcagggaccacccatggcgacttggcaggggcacttcctcttcagccttctttttgtaccctttcttgccactgaactagtttctgtggagaacctaagaggaggcctagagccctcgctggccacaggaaaactatgactttgggcccccttcctttgagtctcacggagcaactcaatttatcatcttcactctgcccagaattgtgtggtcttttgaaagtggaagagagaggggaaggcggagtaagaacaggaggtgctcccttcctttggagtcttgtattttatcgcttcatcttcccactactgcctcctttcattctgccgagcaggtgagaggtggctcaggaggtgttaggtaggagtttttgaggtctgccaaacatttccagaatgctcttcccaggagaagggcactttacgccctccctgagtggccttgcagtcagacacaacacagccatctttggccctcgtccctcccctgcctgatggtcctctgggccccgttgctgtctgtttgccttattgtctctgctcattgcagagcctactttcttccgtggcatttgggtttggcaccgagtacctggtccgctttgaggagcaaggcctggggctgcaatggagcaacattgggaagagtcccctggaaggggatgagttcagtttcctgctgtctatgaagatgatgcttctcgatgctgctctctacggcttgcttgcttggtatcttgaccaggttttcccaggtaagccaggaaaagtcaggctgctgtatctccccacggtcaagagaattagactctttagatgcagaggtctggcctgaccttttagcttacactcgatcccctccagactatttgaatataaactctcagggccggcattagaatttacatctagaagttaaaactccatcagcaaattatcgtctccactttagaaacaggtctagaattggagctggggagagagatggctcagtaggtaaaagtacttgctgtgcaagtctgaggacctgggttcaagtccccaggacccacataaaagctgagcatgtctgcactgtggaagtggagacaagtggatcacaggaactctttagccagccagcccgaccagaacagtttccctttcagtaaatgatcctgcctccccggatcaggtgggaggtaacagggagacagccggtctaacctcgacttgtatgctgatgagtatatgcacccccacacaggtgtatgaacatgtgtacacacacacacacaccttacacagggagacagacagagggaaggagagggagtgagaaggagaaggaagaggaggaagaagaggagagaggaggggagggagggagagagaggggaggaggaggaagaagaagaagagagagagagattgggaaacaggtctggattctgcttccttgtcacccctgatccactttcccactccaagcctccctccgcagctgtcaccccctacagctgtgttctcctcaggtgtgcagatggagccttttgcaatctggaccagatggtgtcaacaccttctgttcaaatcccttcatgggcctttccccttattcagagtaaaacccagtgtccaagcccaggcctgctaaagctttgttatctggttcctcctactgtcagcatctcctgcccttcccttctcccctacatctccgctctagccactgtgaccaccccactcatgttcaacactctgagctctccgcatgaccgccacacctgctgttttcactagcagtgtcttttccccaggctatccctcctatctgcaggatcccttcctcattttgctcagggtccctgttcaaatgtcaccttatcttggtgatctttctggactgaagattgctagagctttatccactgtgtgaccagtattccctccgtggctctaactctttagcctactttttaaagagcactcatcaccacctgacgtgatgtaaccttgccgcccttcctagaatgtgagccctcaagagcatggccatgatttgtgttatttcactgtgacagcctggaagccctggctggtgcttggtgtttgacggacacgaactaacctgaagcatacaaaaatcagctactggatcaaaatgagctatttacaaagttttgtatccacttggcagtaacctagatttttccttcaaattagcattttctatagctaggcaagtcttgtttcatctgaatggcctccttgtcaaccaggagccttcactgtacactgacatctgggtctagctcttgacactgtggccaaaagcagacaggggagagtgaggctgggcctggtccctgggaggaacaagtggatggttctcagaaataagcagatggggccagctggggtagactgtgactccaagtgcagccgggattgtacagcgagatcttgtcacaaacaatgaactggatcaaacaaacaacaacaaatgggcaagaactctgaatgggagaaggtggctaggtgaggtccggaagcttgggtctgtgttccagctgagggaacgatggtttttctagagttgtcataacaaggaccatggatagcatggcttaaaatgataacgttttttgagctgtttttatctcattgtctgaaagctagaaatcaatggtgaagccattgggaaggctaagttttctacaaaaccaagcttctagctttccttggcttgtaggcatgtgactctgattctccacgttcacgtccatcttccccgtgtgctggttttcatgtggctatcatcttacaaagactctacatggcgttaggttagggccatccttctccagcttggtcccacctaacttaactaagcacatccgccttctaaacaaggccacattttgagctataaggttgagatgctggtgtcttgttttctcttagttcttgaacactaaatgcatgttttcttttcttgttttcttttttttttaattcatttatttattttatgttatgtgagtatactgtagctgtacagatagatggttgtgagccttcatgtgattgttagggattgagttttaggacctctgctcgctccagtcagccccactcagtccggcccaaatatttatttattattatacataggtacactgtagctgacttcaaacgcaccagaagagggcatcagatctcattgagggtggttgtgagccaccatgtggttgctgggatttgaactcaggaccattggaagagtagtcagtgctcttacccactgagccatcgtaccagccccaaatgcatgttttcttaaacacaatcaaattctccttcacccaccatttaattccattctgagaagatcgagaattagggtcagcctgttgggctttttggtttcatctccccatgtcactggaaagagatttggtaaacaaaagctagttgtgttggaataggaatttgtgcattggtttagccaagccaaagctttcatttcatcaacaagtatttactgaggagcctctatatgtagccatgttctgggaaccagggtgtttaggctgaagatgtagctcggtgttggaacgttcagttagcgtttacaaggtccggggatcggtcttagtatggagggcagagaaggtccacgtgggctggggacatgactcagtggacaagatcagttactacatttgatgacctgagttcaattcccaaagctgaattaaaaagattcatgcacaaaacacatttgtaatccaagcacttctatgggaaacaggggtgtgggggtgggggagtcaggagaataggaacagaagcagaaacaggaagagggcagaacggacaacttaagtcatcctccgactgccgtgtgagcctatgccagcatacgcacacaaccaaataaataaatacacaaataaacaaacagactctaaagaaagcaaaatacccaggcttgcccctgaatcacattctagcagtggcaaaagccatgatacgtgactctttaaacagcattgagggctaaagagaccactcagcagttaagagtacttactgttcttccagagaacccagttcagttctaagaacccacgtcaggtggttcacaatagtctatatccccagctccacaggatctgactctttaggcctcagagggcacctacacttacgtacatgctctctcacatgctccctggtgtgggtatacatatccacacacaatttaaaaactgaaaaactataggggaaaaataagtatataaattttaaagggaaaaaagtgacaaagagaactgaaccaaaaggctggtattacattagctatgaatggggcagatggctcgaagttagtgtattcaatttcagcatccttcagactgatattaattcccaattcctagggttgctttcagaaatcaatgatgttaatacatggaacgtgtacaatatgcctgttatataagtagagtccagcaaatatttgctttcgacaacaactattgttttctggtaactgcttaaaaaaaaaaagacatgatttaattcattaaaaaacatttatttcttggaaaactgatgtcaaccaatatcatcatagttagtgttgctggtaacacccaaaaacccccatggtattttgactgaaatcttattgaaagaagtggtctgtcagatggcctttcagtaactacatactggcttgtgaccctgaacacctgtaagtataatttgagatttagaagggtgtttgtggggcttgtggagtgcagtgggatggggctcactgctttctctttgttttcctgttttcaggagactatgggaccccacttccctggtacttccttctgcaggagtcctactggcttggtggtgaaggtaagtttgttttgttttaattaaaacagtcaggcagtggagatgcacaccttaatactagcacctgagacgcagagacaagagagtctctgtgagttcaggaccagtctggtctatagagcgagttccaggacagccagagctacacagagaaaccctgagctggagagatggctcagtggttaagaacactaaccgctctttcagaggtcctgagttcaattcccagcaaccacatggtagctcacaaccgtctgtaataggatctgatgctctcttctggtgtgtctgaagacagcaacagtgtacttatataaaaacaaacaaaaacaacaacaaatcaagcaaaacaaaaatgagaacaacagaaacccttcaggactgaaactacttcctttccttggggtacatgtaagatgtgtggacctttgtcaaggtgtcaaggtggccctttgtcaagtgcatgatccctgctagtcagctgcctgccgtgggtacagggtgtcacagtgtcacagcctccacaagtgtccctttgatgaatcccagagccagagtaaatggcagaaacttgacagttggtcctgggagattggatacttgttgaaaagggtgcaccatttatttcataagcccaatactcttccaactttcaaagcagagatctaggaggcacaaagggagctttgccttcagcttttgctgcctccttcttctccgccatgatgccccacattctccaaacacacagtaattcactctttgaagccaagacggaggctgcacggttgatctccaaggctttcttatggtggaagaaggcaaaagggacattggctgacaatgcctcctaagtacaatttatcctccttccaaaaacaaaaacaaaacaaaacaaaacaaaaacccaaaaaacaaacaaacaaacaaacaaacaaaaaaaaacaggaggcctagaattttctagaagtcagaaggaaaacctcatatcatagtcttggaattctgagaaggcagagaaactccagatcagtggctgccaacctttccaaagctgcatccctttatgctgtggtgaccctccccagccataaaatgatttctgatgcaacttcacaactgtaatgttgtcactgttatgagttgtaatgtaaatatttctggagacagagaattgccaaggggcctggacccacaggttaagaacaatttctctagagctgtaagctacagtctctcccagaactgggaggctctgaaagaaaaccccctgctttccagggttagagctcacccttccccgtccacacttcactttgaattactgggcctggggcacgatttagcctttaagcactaacaaagggatttagttttcctttaactttaaataccaggttaaggcatttaacctggagccttttaaaagcttgtataaatttttgtttggctggtattttgagggtctcccccacccccgaggggatatatatatatacatatatatatattaatagttcacacaaacattactttgacaggccagtattttcccattatattgttttgtgcattgtgtttatctacaaacttttaaatgtccactataacaaagttatcaacctctcttaaataagcatatttaacatccctggaatgttactaatgtcagtgaacctaggggctcatgtgctccccaacccccaccccactatcccaagagatactctgctattcaagaaaaaaaaaaatcttgagaaacgtgttccttgaaaacgagacacatacactttcctgacagacgtaaaatacttctcacctgtttcataggcaagaataaatacaatccctcacactatctaagatcagagagcagctgagtcacccccctaactcccctcttcatagttgaagaaatggagagccagaaacatcaatttcctgttgaaatcccactggacactggggcaaaatctagaatagccgaggacggttcacgaggagagtgtcactccagtggttatttaaaaagatatttgttcttgctgctgtattactcatgagggcagtatgatagccgggcagtgtgatcgccggcacattgacctcggaaattgtggagaataaagtcaaaactgcttcaggaagtggagacagaagtacaccagacagcactcctctcaccattaagcctcagcctgctgctctcccacattctgcaaatctagaggccctgtcgggcactgaggatactccctggtggttccccatgtgtgcttaaagcagagccctaagggcttggtgctagtggctttcttttcttcctgcttcctttatggctggggctcctttctgcctcttccttttccagggtgtccttgacacctccttagaccgaatgccattaaaaaataaaatctgtggtgagtgtgtgtgtgtgtgtgtgtgtgtgtgtgtgtgtgtgtagggggggtgtggggaggaatagcatacacccaccaggctccaccctggtattaccgtaagatttctgaatgtccgaataggtggccttttaaagggagccatttctccagctcagatctaaactagctacccaccatagcactacaggtggatttttgctcagggctcccatgactgacatgttttagttggagcaaaaaggaccaggtggtaggctaaagaaaacaaacctattccaaatttaatcctgcgatggattttttgatttgtctgattcccccacccccaccccctcaaggggacaacattcaagacagggtttctctgtttagcccttgctgttctggaacttgctttgttgaccaggctggcctcgaactcagagatccacctgtctctgcctcccaagtgctgggattaaaggtgagcactgctcagcttgtttttgtttttattacaatttctgacatgagcagtctgccacattaaaaggaattgccgaggactgcgaatgtggcttagtgctaccaagcagggagttcctagtttgattcccagttccccctaacaacaatgtaaatcaaaactctccagcttcaaggttctgatttaaaaagtccctgtgggccctgcgaaatcggcacaatcagatttgagtccctcacggctgggcagcaggtcagagctggaggccatgcaggagacgggtctcagagctatgatggctccaacctctggagggagctgtcccacccttgtgatgggaaatgcatctgtccccactgcccctcctcttctctcctgtctctcctgaagagtaacgttggcgtctggttggttcaggttgttcgaccagagaagaaagggctctggaaaagactgaacccttaacagaggagatggaggatccagagcacccagaaggaatgaatggtaaccccccaagaccccccacccccatcccaaaagacagcagaacggaacggaaagcttcagtagtgccagagccaaaccacaagacgagcaacatgaaggaggccaggaagctgactccctttcttgactggtgttaaatctcatgtccagctgcacacgaggggaatgaatggtccaacccagacattagtgcatatttcctggagaaagcagatcccaggtctgtagtgtgtttgtgcccttgttaggcaaatcccaagggaatcgcacaaatgtgctgacttccgaggatttagtcagaacaatgacttgggtcactgggacttgaagcggatatgagctacaaggaaagacaaaaataagttccgtaaggggaaagagcctagcagagctgactgcacttcactcaaggtttacaaacccagagcccattcactgcaagcatcaaaagcctttcctggtggtggaagttacctaatcacgcccgggctgatgggcagggtacataagactcctttccctggcctttgctgctttgtcctcactcttgaactaattctcctaatgtttctcatccctgactgtatgcatggcttgggtttagagaggcacacagactccgatttagcctgatgttggcacgagagggtccagcttctaggcgcccctcaggtaccactttgcaaagctgatgttggagacctgaatcctcacagagctggtttgcaggctaaagtaactctagaagatcctcctcccagagtggtatgataaggttccatttcagctttagttgtggccaggagacacaggcagacaatgcaacgggagttggggacagagcaagggaccattagttaattagacttaatactctgacagtaatcttgactctataagtgaacttcggaaaagatgctgtggtggggggtggggggtcacggggagggggagagtaggttggttgatactggaaagggcacggagcatggggaggaaggagttacgatgaggaagagtaggttgtcctggcttgaggagtcagggctggtgccagaaacctatgaagatccgatagactgagccttgaagcaaagacggaactcggggttaactcaataatagacaggagctatttcagatgggtatggaccctgggcccatacttgccacttgtacaccatgtagccttgatagaacacttgatgtctctcagtcttgggctttctaacctattgaaaagagcctagttatatctacctataggactatatgtgtgaagtgagggatttgttgggaaacattggaaacagtgcctaactcacagtaagtgtgaaatctatggccagtgcaactatgactactcctgttttgatcttcttcacaaagctgcagccacatgggcaggtgaagttacagccagagcacaggtctgaaggaagcagtgtgttcatgaagcacggcgtcattaacatgtggtgtttctacaatgtgtttttccctccaagactccttttttgaacgcgagcttccagggctggtgcctggtgtgtgtgtgaagaacctggtgaaggtttttgagcccagtggccggccagctgtggaccgtctgaacatcactttctatgagaaccaaatcacggcgttcctgggtcacaacggagcgggaaagaccaccaccttgtgagttctctgccagagaggctgtctcccatcctatcattccccggcttcattctctctccccaataactccactctgttcttccttactgaatttcggtggaaacatatacactcacacacacctcccacggtgaggataaaaagccgtggctgcccatgtccccgggctatttttatgtagcactccgtttcctaccaattaataattaggatgctttagtgctggtgtgggacctctgatgggatggctacctttctgagaaagtgtagggagaacagtgaagtagactcgctgcctggcagaaggccaagggcaggaagctttgaggctctgggtggactcctccatccatcctttagttctggaaggggtgcgagcgccacctgctgagaacaggcagtcagggctccggtgcagacctccgatgggccgatgggccggtggaggaggggtaggggtcaacaagccatgtgacagcagccatcaaatccttggcttgcagagccccgggaaggaacagcagtgtacaccctgctccggaatgtgctcccgggcctttcaatgggaatggaatgcggggctggtgccattgggcttggtactgtttccctctagtggttgatcaacatttcagcttcgaagtacaggttcagatagcatgcgattttatcagaacttgggacagaactgggcgtggcatcctaaggctatctccttgctaactcacgtggtgggaggacaggaaactccattcgagaccccaggacctctagaagacaaacacattacttcactcagtgcagaaactaaacttccactggggtcggaacacaagcgctgtcctaatgctgggaatagcataacattttaagtttcactttgtgctggggcctgtttttgttttgttttgtttttcaagcatgttcgattcacttaacttagacaactacccaagcaggtgggagacatgttttgtataattgaagaaagaaaagagaaatcacaacattgttcacatttttacatttggaattcccaaacgaatttgtttgtgttagccagtcagcagacaggctgcccagcttctcactggcatcaactgagctttggagagtcaccaaccctgcttctccactgtcaagggctgcacgcccaggcaaagcagtggggctgggtcctaaatccctttaactgaccacaactgtgactacgacagtggccacaatggctggccacatcaatagccacggagcaaccactatgacagaccttcacggtggacactaccgctgaccacagagtaaaacaacagtgaacactgtagctgaccacatccgtgaatatcactctgacagacagtcataatgggcaccacaactgaccaccacagtggccatccagtgggcactacaactgaccgctgcaatgatggctgggtgatgatggggtggggtgtctgagtctgggaatccccgaggctcttgatactggcccaggaacacttggaaataaaaagtagagaaagaaggcccttgtggtctaggcactaggacttgaagcaaggcactggtgctaagtaaaccctgtgtggaaatgttctgggcccctcagctacatcaggtttgagtttgatagagagatagggcaggtgtcactacaagcatccttctgaccctgtatggggttaccctcatcccctggtgagttctaacaaccatctcttctgccacttaaccctgtgttcggcaggtccatcctgacaggactgttgccaccgacgtcaggaactgtgctcattgggggaaaagacattgaaaccaacctggatgtagtacggcagagcctgggcatgtgtccacaacacaacatcctgtttcatcagtaagtgagctggagttgagatactcctgggcaggggtggggctcattggaagagcacttgcctggcccatccatcaccctgggttctgcccccagcaccacaggaaaacaaaatatctgtcagaaacccctgttgtatactggctggtttcatgtcaacttgacacaagctagagccactggagaagagggagcctcacctgagaaaatgcctccgtaagatcaggctacaggcaagcctgtggggcattttattcattagtgatcgatgggagagggaacagcccattgtgggtggtgccatccctgggctggtggtcctgagttctataagaaagcaagctgagcatgtgtccttcttaccggttgggacatcttctggatatatgcccaggagaggtatttcgggatcttccggtagtactatgtccaattttctgaggaacccccagactgatttccagagtggttgtacaagcttgcaatcccaccaacaatggaaacaatcacccatggaaggagttacagagacaaagtttggagctgagacaaaaggatggaccatcaagagactgccatatccagggatccatcccataattagcctccaaacgatgacatcattgcatacactagcaagcatttggtgcaaggaccgtgatatagccgtctcttgtgagactaggccggggcctaacaaacacagaagtggatgctcacagtcaactattggatggatcacagggcccccaatggaggagctagagaaagtatccaaggagctaaagagatctgcaaccctgtaggtgtaacaacattatgaactaaccagtaccccggagctcttgactctagctgcatatgtatcaaaatatggcctagtcggccatcactggaaagagaggcacactggacaggcaaactttatatgccccagtacaggggaacgccagggccaaaaaatgggaatgggtgggtaagggagtggtggggagggtgtgggaggcttttgggatagcattggaaatgtaattgaggaaaatacgtaattaaaaaaaaataagaggagaaaaaaaaaaagcaagctgagcaagccagtaagcagctccctccatggcctcatggcctctgcatcagctcctgcctccaggttcctgccctgcttgagttcctgtcctgattttctttgatgatgaagtgtaagccaaataaaccctttcctccccaaatagctttggtcatggtgtttcatccgagcaatagtagcactaagacacctgtatcctgttctccaatgccccccccccaacacacacacacacacacacacacacacttctttcctgcccaacttagcaatgcgtttgtctggtcttctcagtcaaaagcccttgtccttccaaatgtgaggctgtgctcctggtgatcagagttgagatgtccccagccagaggagggacggtaacttctttatgacactttcccttacttgcccccaaatacttgctgacagaaagaggagatatgttatcccctttacatgtggaccaccggtgctatagactgtcctgggaggggaggggggctttcatgccggcttgcttgggttttctatcttttctcccattcttcttctatcactttctttcttttccctcccttttccctccctcttttctctcttcccctactctttccttctaattaaaacatattttacattctgactctagtcctggcagagggaggagggcggtgaaggggagaagacagataaatacaaaagaaaaaaaactgtcaccagtcctttcagcgcccagaggcaatctcactgttaacacctccagatatgactcttcggacatttctctgcgtgtgtagacatgcgcaaagatttaaaaattatacgggaaagtaaaatcatacgtaccattttgtgaccccactttttgaaagtgtgggtgttttgcctgagtgtgtatctgtgcacgacgtgtgttctcagtgcccgagaagaggatctcagatacgctggacctggaattacagacagctgtgagccactatgtgtgtgctggggctcaattccaggtcctctgtaaaagcaaccagtgctcttaaccactgagccatctctccaactccataactgtttcttaatcctaaggtgctatgaatatttttccatgcgactacatattcctttaagaagtaatgtttacatatggttctgttgttcaaatgactaagtaattttctcattagctctttgggcaagactggttggtcatttcactttcacatcacgaataataccacgatgacatttctgactgctaactcttcatagtcatctttcttttccaaggtgagctgctcaaaatggaatgacttagcccactgccttttttcctcctcctgttcccacagcctcacggtggctgagcacatcttgttctatgcccagctgaaagggagatcctgggaggaggcccagcttgagatggaagccatgctagaagacacgggcctccaccataagaggaatgaagaagctcaggacctttcaggtgcttggtattgggaggagacggggtcacttacggagcatccgttgcctggcaacgcgcctcagcagaaggttggggtagcagaacagcagctcttcaacctgtaggccccgccccccccacgtcagatgtcagatgtttacatcatgattcataacagtagcaaagttacagttatgaagtagcaacgaaaataattttattgtgtgtgtgtgggggggggggtcaccacaacatgaagaactatattaaaagggtcacagcattaggacgttgagaaccactggggtagggccttataacgggagctctccttacatttctgtgaagctcaaggcacagttttcagatgatcaggtgctaggaagcagggtggtctttcagcattggtgaagcatggacgatactgtgacgtctgacagtgtaggcatatctgtggtggcagtaccaaactgtagccagatttaaagatcctccacatgtgaccagctttgggccttcctcttccccgtaccgagatgtctgtgatatcccgtgtcatcaccttccttctgcctccaggtggcatgcagaggaagctgtctgttgccattgcttttgtgggagattctaaggtggtggtcctggatgagcccacctctggggtggacccctactccagacgctccatctgggacctgctcctgaagtatcgctcaggtgaggggctgttgcttagcaccccatgctctcactgaggctgttccaggtgtcccactttctcccgcctcaaattttatagccacataccttaacagcccttgccaccaccagtgaatccaagttcaagggcaagcctgcaaacagggagtcactgatgaagtggcctatggctgaaacagtccagaaagttgggttgggagtgtttacaacgcattcacaaagccccgagttccatcccaggcattcataaaccaggcctagtgcatgcatacaatcccagcagtcgggaggtagagcagaaatccaagatgagtctcagctgtgtagcctgggctacacgaagccctgtctcaacaaaatgaaacaaaaatttcgtcctacctataatcctccaatctggaaaggtggaattgccctctgcctaaagggacccaaagtcatgccaggaagcttcctagctgttgcgtgactattccctgagagcgcaaatatggggctggatgtatagatcagcagcaggctatgtcagatgaaagtgccttaaaacgggccctttacttgtctatccctcaccttctagaggattgacatctagaagcgacatcaggcagaactcccagagcctgtccacgaagctgtatggttcatcctgcccagcctggaaagccccctcctttattcttcctgtatttctcatgcccctcactgaaggtttgcaggttaaaatcttcatcacctcgttttaataacagctccatttaatgagaaagtgctgcgtgtgctcttacaaagtacaagagcggtgtttaacagtgggaagactgtgaaggtggagtcagtccatggatagtgacagtgacggcagagggagtccatggatagtgacagtgaaggcagagggagatgagcatgtcccacccatgtgaaattgtttgagtcgtacctgagacccagtgcagagacaccgtatgtgacagtgctttgcagcatgcaggatgttagggtatagtggttgctatcatcgttactccattatgcttgctgcagaattagctactttcttcttatttattagctccaagttctggggaccacataacctggaggttgctgtgcatgctatccaggttgcctggtaaccaccctgacctcctccccacaggcagaaccatcatcatgtccactcaccacatggacgaggcagacctccttggggaccgcattgccatcatttctcagggaaggctctactgctctggaaccccgctcttcctcaagaactgctttggcacaggcttctacttgaccttagttcgcaagatgaaaaacatccagagccaaagaggtggctgtgaggtgcgtgtctgcctggggaaggagcccagcttgggcagtgtggggctgctgttctggaaataactgcccactgcacttttaattgttgggataagcttgtatctggactatttgcagacttcagtaattgtgttctaaactgctgtatagagatgctcacaaacacataccaggcataactgattttaaataaccagaggggttgggagggtataccacacatgtcatgcggtataccaggggagtaccttggccttcgaggttagactgctttaagttgttcctccttcatccaaacattcatgttccccaattaaacctgaattctaggagtaagtgaaatctaaggagagctatccttggagactataacctaaaactgatgtggggggcaagggcagccagcagagtctcctgtgtcatcctgagtagttgattttattctttgctgttgtctttcctcacatggaaaatgaagtgggtgacgctggcttctgcttcataggagggatgtagtggagacaaatgagatggagcgttgtgaatgtttccccgggctccttgagaacaggtatcccacacattcaggttgtcacaagtgttccgctgcaatgctgtttatgcctctaatataaatggatagcatgagttttcctgtcctggtggattttcacagcctggcgtccagagggcttgggaggggaacagaatgtctctctagctgccacatgattaatgacaaggcagagggatgctttgaggttctgcctctctctctctgcctgactcacattccctctgggataaaaaggccaagcagctccgccctcaaaatgctcagatgaattaacagattaaacagcgaagaaaaaaaataatgccgtccgcagctggtgatgagagacagaccgagcggtggtgacagcagctggcaccacgacgatgctatcgttgacatgatctgcatcttgtcagtcctttctgtcgtctgttgcagggggtctgcagctgtacatcaaagggtttctctaccaggtgtccaacccgagtcgatgagataacagaagaacaagtcctggatggtaagagctgggcaggttgaacctcggtgctggttcagtgagcatctcccgtgttgggtgctccctgtcgggatgcagagagaacacgtgctgtgctttgaagcccagcatcctgcagatgctcatctttttctctgagcctgtttctcattcctaacgtgattttaaagtacctaaacgccctctctttaatgaggaatccaacttgtttactccatgcccttgctcgtgttaagcttggattttacactcctgccctgtaacagtgtggacacaccccctcctcaaagtgccaaggcaccctctggctcgctctctcttttttagtgttttgtttattattttttattttgtgtgtatgactgttttcctgcatccttcactcccgcaagctcagattctccatgtaagagacatgcagggatggagtgatggctcaacagtcaggagcacttattgtgcttatgggagccctgggttcagttcctggcacccacagttcacagctacctgtatctgaagtttcagattttccaatgccctattctagcttctgcaggcactgcacacagacgactcactttcacacatgcaggcaaaccctggaatttaagggtacacactctctcagaggcctctcgctgtcaccagagagaggcagtatctaagctcacctgtcagatctgacctcagcgtcccaagagctaatgaccctttctactctcaacctctgcctacctccatgcctcagacacctctgcaaggggaatgaatgccacagggcctaaaaccctatgcaaaagaaaaattaaacttagctaccgactcagctttatgaacagaggaaagcgtgtgcttatcaaaaaagtttcctatttaacacatttccccctaaaccctaagtattgatgtgctatgcataagccctagggggagaactgggaactgggtgaggggaactgggaggaagtgcctagaacacagcagtaatcccagcagaggcagaggtaggcagatctctgtgagttctaggccatcccgggtgatatagcggaaaccctgtctcaaataacaacaaagaaccaagggaaaggccgttggttctagcaccagtttttactctccattctctatgtagtcagcactgaatgaaaagcatttcttcagtgttgtgtctctgagtctcgtgtcttgcttatcttgctgtgagttatctcctgtgttgctgaaaatttctccttggaatcttggtcaagatattgatgttctaaatgtttaattactacaaaaaataactatcaaaatcaagttggaatgtgtctttggctggcatgatttttttttaatagaaagggcatgctgccatggtgagaagtactgtagatagctatgcccccaactagggagggttccttcattgccagatacctcctcggctggcctttcactcacacacccccacatactgctcacacagtcctgagtgactcactcgcagacctccctgccagatggacacttctgagaggctgacacataactaaggcatggttcctgggaatccagtgactgggtcccacttccttcctaagagaacaatgtgtgtgacccctacaaactactggggcagagctatttcctccagtaaagaactccccggccccagtatgagatcatctaggactaaagacaatcacacagtttgcaggtgtgaaacacaagccttccatagctcaacaggctctcagtggcgagctgtgaaatattccaaccaatcaaaagacagaggacactcccctgggtgatgctgactcttacagaaaactgacctgagtagcaacactcactgggattagcctaacatgtatctgtaatcccagcactcaggaagctacgcaagaggattgtgagttcaaggccagcttcagataaatactcctgctacccaccccactccgtgtgccatcctcagcgtctccggggcttctcagcctccttccgcagtggctggttattgagtcttgttctgtttgggaggacaggtatagcccaagggaaaatggtgtggctctccaggtagttaacacaggcttgggcatggtttaggaaggagacttgcctccttctaggcctgggtcttaggccacacaaggaagagaaaaatgacttcgacttaagtcctaagctttcagtgagtgagaagcaacagcagtgacaagctctcctcctgggctgatggtcaggaatgcagtgacagctaagtgccaccactgctagattaactgcacacacacacacaccccacccccatccacacaaacagtcttggagtgggcacacttgttttccccttccacggatgaggaactggggggaggactcacccagggtagtgttccttcaggcaatagcacatctgactgaacaagtggctggccctccctccctcaggttgcagcacctggagtatgtttgtcatagagtcaacaaagctaaaaatagacttgccgagtatcaagtctaaaagaaatgacactgagagccaagtgggtggttcacacctctaatcccagcactcaggagggccagcctgtaccaaaccaagttatgggctacgacaggatgtaggataaaactctgtctcaacaagcaggtaaacagaaacacaccacacacagacacacacagacacacagacacatactcacacacacccccgacacacacacacagtcacataccatacatacacatactcaaacaccacacatactcacacaaacatacactcacataccatacatataaatacacacactcaaacaccacacacacacacacacacacaaatactcacacaccacacacacacatgagcgagacagagagagagagagaggctgagacatagagagacagagagatatacatagacacagagaaacagaggaggagacttagagaaggggaggcacgggggagaggcagggacggtggtagctatctgcccctttctctaacagggtgtagaagagaatatgagccctgggaaatctcacactcttccaggctgaatagaacaggccgaatggacttgacatcggtcttttcgtcctgtcctaggagatgtgcaggagctgatggatttggtataccaccatgtcccagaggcaaagctggtggaatgcattggtcaagaacttatcttcctccttccaaacaagaatttcaagcagagagcatatgccagccttttccgagagctggaggagactctggctgacctggggctcagcagctttggaatttctgacactcccctggaagaggtaaggcagagattgctgttggtctccgtttagcgccagaagaggcagctcacacgaaagcctaccactaaagcaaaaccctacagaagtcaaagccataattctccatccataactctctctggctccagttggcttcttcctacctcgctctacatgcatacatattttctgcagccgtggtcctcatgtgcatttattgaagcctgtgttctcgggtagttagaatgtattttttttccatggggaaacagtggaactaggtctacattttcctagaagcaggagtgcctgaaccaaatcctctcttcatgtctccacagattttcctgaaggtcacagaggatgctggagcgggctctatgtttgtaggtatgtacggtgccagagccagcggcttgtcccctgtttccccagacttgagcttagaaaatctacaggaaaagtaatgaagtagccattcacccttctcagtgccagagccccaagtaatgcattctgtgttctcggtgcctgtgggtaagagcccaaattcggctaggtaggaacattctggatggatcaggattcttagccatgccagactggtagacccccccccccccaaaattcacctcctactcccctggtctccttttttctgtcatgtcaccacagttgccctcctctctaccaggcttctgatccaggcttgtctctatgagtgatggccagcagagtccttagagataatgctgacagttaatataagccagacgccagctccagcctcctgacccctttgagatcaagataaaaacactcgtaagctctcagttagtaactgttggactttgaaacggcgagaaccaaaattcctatgaattctggccttttctcttctctgtgtggcagcctgggccctttgcttgattccttgtggccacacaaaacattatgggtgttacacacttactgctgagggaacggtcaccctgtctccatagcacaaatcacttctgatagaacaagagacaggtactcactctgctaaaaaaggcccactggacctctctcctgctcagagacaaacagtcctctgtagctgtgttgggttgctagtcgcctcctcctatccagtatggcacgtcgtaatgttttccatgcagtgtttcctccctatggaatttctgctactgttgccacctcctaagaaaatgtgggtctaagtgaccaagcatgtatcagccatgcctaaaattaccaacgtccatatatactggcccatacgtgttccagcttagatcatgtggtaggcctgctgaggtggtcatcctggcagaagggggaggggtgagtcctctgcagagggtaggagtggcttaccgtggaggtcgaagaactctttcaagttctatgcagatagaagttgaatccactcaacccatccaaagcccaagattcacattagtcaagacaagaatgaaaacacattaaagagtactgcaagctgcataggtttaaaaagtagggactttttacctgcatatagcctgtgagaacaataagtcagacctagaagactggtcagtatggggatagaaatgggtatttcagagacagttgagggtaaatgttcagagtttagccatagagtacagtagacctgagcatcataatttgatatctaaaagactttggggatggtacttagcctcttcatacctcagtttccccacatgtaaaatattaataatatctaccttttataatcactgagagaattaaataaatactgcacaccaagtgtttgcacagcaagtgatctatgaccaagacttaggaagccccccgccccaccatggtaatcacaaatcctcttagctcagactttaatggatctttatacttgacaaagcacctgctgtcactgtgttacttgatagcatgataatctcatgaggcaggtaggacacagacctggtccatctggagaaagctgagtgagcttgctgaggttagatgaagtctctgaagccacacagactaatggaccttgttttctgagctatgactctccattacacattctccccacttcccacagtacaggtggccgagtacagacaggttagcgtgagaccttgccccaaactaaaacagaaaggttattagcctccgtgtcccattgtttctctgaataatgggtaactgatgttggaaggaagaaaaatgcatatagcaacatctcttatgcttgtctttttctaattattgatccaatatcccttaggtggcgctcagcagaaaagagaacaagccggtctccggcacccttgttcggctcccactgagaagctcaggcagtatgcccaggccccacatacctgttccccaggacaagtggatcctcccaagggccaaccttccccagagccagaggaccccggtgtcccattcaacacaggtgctcggctgattcttcaacatgtgcaggccctgctagtcaagcgattccatcacaccatccgcagccgcaaggactttgtggctcaggtaccccactgtgaccagcttgggcttgactcagttctcccctgcttccgtgtgtgtgtgtgtgtgtgtgtgtgtgtgtgtgtgtgtgtgtgtgtgtatgtgtgtgtggtgtgtgtgtgtgtgtgtgtgtgtgtatgtgtgtgtgtgtgtgtgtgtggtgtgtgtgtgtgtgtgtgtgtgtgtgtggtgtgtgtgtgtgtgtgtgtgtgtgtatgtgtgtgtgtgtgtgtgtgtgtgtgtgtgtgtgtgtggtactgatcctgactttccatcttttcaggaatatttgtggggtgggggttggggagatcagacacttcccggtatactttcttgaacttctatcagctattcgtcttccttggcaaacgtttattttgattctgggatttgcaagtcttctttctaaggattgggcctcacttagagtcaaaaatgggatagtatcatattttccactattgtttctattctcatcatgaaaggtaaagttatatgtctcattcatttttcttatgacataaaggccattgtcctcttttaagatagggtctaatgtaccccaagttggcctcaaacttgttatgtagctaagcatgaccttctttttaagttttgttaggatttatttattcatatattttgtatatatgtatgcatcctgactgcatgtacacctgtgtgccaggaaagagaatcaatcctattacagatggttgtgagtcaccaccatgtgggagctgggaattgaacctgggtcctctgaaaagcagccagtgctcttaacaccagagccgtctaagaatggccttgaacttctgctcctgctgcccccacttcctgagtgttgggattaaaggcatgtgccatcaagttcaactttatgtggtgccatagattgaattcaggacttcatgcatgctgaacaaacgctgtacaccagctcagctgtgtgcctagtcctctctctatggtttccactcatgtcttagtcagggttcctattcctgcacaaacatcatgatcgagaagcaagttggagaggaaacagtttattcagcttacacttccatactgctgttcatcaccaaaggaagtcgggactggaactcaagcaggtcaggaagcaggagctgatgcagaggccatggagggatgttatttactggcttgcttcccctgacttgctcagcttgctttgaacccaggacaaccagccccagggatggcaccacccacaagctcccccccccccatcactaattgagaaaataccttacagctggatctcaaggaggcatttcctcacctgaatttcctttctctgtgataactccagcttgtgtcaagttgacacacaaacccagccagtacaactcataaaaggaactttgggtcaaagagaagcaggtaatgcgagtcattctttagacttgcctttaggcgctggccgagcatggcatatgttcaggtttatctctgggtgtaggaatgaatattctttttccttctacatatactgccttttacgtttgcctgtgctattcccccagaaacctgtcctttactgccggtgtctgaatacgaagtggaggataaatacttaaaagaatgtgtatatgggtatgtgtgcatgtatgtgcactggatgtcttcccatgggtgtgtatcatctctagctcttcagcctgtgactccatggctattctcctacagattgttctccctgccactttcgtgttcttggctctgatgctttcaatcattgtgcctccgtttggtgaatttccagctttgactcttcatccctggatgtatgggcatcaatataccttcttcaggtgcgtagattcatcccaggaatcattattatcccttaacatgtgatatgcctggactgtatgcctgctagaagggtcctgatctccctacttccctggaatcttctccaaggtggaaagagtcttggtggagctcttaaaggggaagctaatgtagtagctactgcttagcaatctggtacccagtggaaggcaggagggtaaggaatgaggatgggaagcctgggaaagggggttgaagctccatctttttgaggcacagatgatttgctatcagacgtctaggtgtgtgtggtaggctaccccacttccaggagccccacaaccattctaagtcggtgttcagtgcctcacaagcatgcctgacatggaatacacattcagcaaacgcttacgtacatgttagcgtgctttgtgcgttctgtcccagtctgactaccaggtgagcctctctgtctttctagcatggacgaacccaacaatgaacaccttgaagtactggcagatgtccttctgaacaggccaggctttggcaaccgttgtctaaaggaagagtggcttccgtaagtcccaagctaacaccaacagctcccctaggagacccaaaagccaactaggaagtgtcgggaaagacccctcaatcctgctctgtggtatctgggtcatgaccgtgtgtctgataggctcttacccagtttctcctctggtgctaggaagcctccatccttgacagctctgtgtcttaatgtagaagtattctattgtttgactgtatttgcccaaactcatttggggaaaaaaaaaaaaacccaaacaactaaacagggatggagaagatgaaggatgtgatgttatataattggaccttaaatggcaggaattacttctatggccagctctccatcattgttgtaactctggaaaagagagttgtggaagatggttgaaatccaccaggagttcagagcttggtatattgtagcaccttttctcatccaatcctccccaaagctaccgctaaagagtaacatggacacacttcagaatctcctgttattttttttccatctctcaacagcaagagctactagtcatgaaaaaaaaaaaaagtccacagattagtccctagcccatgctctgttagcctggctgcagttctgatagtccttaagtagactctaatccccgagagggaaattcctgacttcaaggaagagaaaggcagaggaagagatagccaccagctattcccttttcccagcagggaggggattaagcagtggggttgactgtgggatattttctcattttccatgagggagtacccatgcattaatgcaacctcctggaagacgccctccgtgtccccgaacatcacccacctgttccagaagcagaaatggacagcagcccacccctctccctcctgcaagtgcagcaccagagagaagctcaccatgttgcccgagtgccccgagggtgctggagggctcccacccccacaggtacctgccccatcttaacaactgcagacgattcctgtgtttcaattgatttcaaattatttcccatggttgatcgttccgatttaaattcttttttctctccgtgttaaataatgttgtgatgtatggtcaagtgttaaaatatttgcatatgggttaacagctttaattaagcttacggtggaggctttggtggagctcggtggaggactgtcagtgatgaggccctgggtttgatactcatcacaagaagggaaacaggtatgctggcctgtgtaccagacgctatctgtggagatcttcggagttctggcccagctggagcagccaaggagttgtgctttccaaagagaagagaggagggctagggtggaatagggcaggaaggatgggaaataagctatgtgcctaaggattatgtacataacacacatgaacacacacagccagcaacttatcattttcaagagtggtattgatgatacctgagcagtgctttgtttagagctctatgctatagacaaatccccatggaggctttagggagtgccttcaagggcaggagagcctggctttttctctgattggttacttgtacagagcctgccttggatggtttctcttattatttctcaatgagtggatgattcccagagtccatgtgttgtaagagaagggttcaggcatgggagttagggaagcatggtttgtttcttagcctctaagccttcttcattttctttcctggtgttgagaagagcaacacctaattatagcattatcatgagaattcaaaaaaataatgtggtcatgaactatgtaggactagaggcagctcaaatgatggcaatcctaacctaaccgtggctgagccaggatgcaggttgcctctcagctgtgtgaaagttaacatgggtggctatgaagttcttttctgttgtcctgagccccacaggtctccaactctccaggtagagtgtgggaaatgatcttgttaggcagtagagtagatggaatgaagaaaaagacgcagcagatggttcaggtgtgtgcagggaagacttccagagtgactgcataacccttccacttagctgtcacagacagcacccatcatcaacagagactgggggctgtcacctgatttctgcatagtctgtgcccgtggggaaagccacaacaatagcatcaggaagaagacataatgagacaactaaatttaccatagcatgtatcacagctgctggctcataaggaaggggtcctgggtcaatcctgctctttatattgctcaggcaatagattgtccctttgggtgacagctacattgccacattgcagatatccctgactccctaggatctgggctgagaaaggaaaccatcagacctccatgcacaggaattcatttcctaaatgaattctaacctcacagctgcctgtctcacttagaaacttaccttcagagcacctttggcctatggtccttaggaagatgctcgaagtcctagaagaggcagagcaagtctgcaagtgtatgtcacccctgcctttcctcattagcagtcacatctcctgagcaaaactgaatgtcccatctctgtaatagacacctctcctgtacaaaaaagtgcatgcacatgcttatacacatatgtacacatagatatacatgtgttcgcatccactcaccctcgtttagcaccttccctcttagccaggagtaagagcagaaggaaagagctagtccagaggaggtgaaggaaaagtgagagaggcaatgactctgagagtcagagctacagatgtcccttcctgctccaacatttcttcaacggggtcttgatatggatgcgccccaaccctgacttctactctacacagagataaagcgggaatgttatgtctggtagacgttttagaaaacaattcctcacaaactttctcaggcatctgcaattgttgcagcctgctaccctggtactcaggccaatttgagaaacaggtaatagacgcacgtacggtcagatgcaggatctgatcttagcccagccacacgcaagctggtccacttttcttagcttccctttcttggtaaagttggcttttgtgaaagcagcaggggtgggatcacacttgcagagcccctaccacagtccccggcacactgcggccactcaggggctgccacttgacctagtggaggattagatgaacgcgtgagcacatgggggaggggagggctctagaaaacaggaaaaataacttcattttgatggtggtttaataccacctagaatcctgtcagccacttctgtgtggcaatctacacagtggatgcttttccccaaggtcctggactgactgacctacgacatccactaacgcaagaaacttaacactgtgtgacattgccacctggtggccagaatctagcactcttgaattcccttcgaatctcttgattaccttccactcttagatttttttatgagagcagggtatcatatattatttgatagctgcatgctgggtactgggggcatgaaagccaacaagtcagagaaggcctctgccttcacagagacgatgtcatacatgggagagtgtcggggcactgagtcgactgagacaaagcgatgtttcatgagtgatgagcactgtgcagttgcacgggatgaagggaagatgatttttatctataaaactcagtctgacagtgggtgcagaacagaatgtggaggttcaagggcggagtcgtgggtgcaatatggaaggttctggaaaggtctaggcaaggtctaggtggtggctgaggttggggtaacaggatcagcatggacaagacaaatgtgttggagagtttgcatttaagctctctggtgatggatggactgaggaaaaaagggggtggggatcaatggtgaccccacatcactgatgcaggaactggaaagccgtcagggctgccttgagtgtttcctggcatccgagtcgatgataatttttggataagaacagcagtttcacaaactctaaggtctcattccccagatcttgaccctgtttctttgccccagaggacacagcgcagcactgaagtcctacaagacctcacgaacaggaacatctccgactacttggtaaaaacgtaccctgctctcataagaagcaggtaggtgaccccgtcacacttgtaatcttggctgcctagtgacgacatcaaccgtgccagaaagtcagtttcctactgttgactgtgaggtggcagccgagtgtgagggtctcacagcagaagatataactgcggtgtgaacccacaaggggcaactcaaggctaagtgctttgtttctttctctgtttaagataagtagccgaagtttatcccaggcactgttgcaaatgtcacaaaaaatgtattcaataaggaagccttatatcttaaggagttaagaaagataaagtttgtagggggtggggagaagaggaggggagttgaggagtaaacatggagggagagagcttgagagagctcagcattacgagcagtggctgctcttccagaggaccagggttcaattcccagcccccacgtggtggctgcttgtaactccagttccagaggatctggccttacttacacagacttacaagcaggcaaaacaccaatgcacattaaaaaaaaaaaatcttaaaaaaaaaagtggaggaagaaagaaagagaagccaagggagattgaaaggggaaagacaagggcccatgtctgggtccctgccaggtcaggcactagctggggacagcgattgtcaccctcattatcacctgtcaccaccacccttgaacacctccacagacactttgctatctagaactctcagctctgcagctgttcttatcaagcccggcctaggctggaaggccatcaagcagcccctgcacaaatgaatggcaggcaggttagcaaaagcatccaccagaaagacccttaaggaagtgtgatgtagtctccacatggtctgtggctctcaaatgaagcagactgtctaatgttaatggtacttacagttgcctcccagaccagagtctggataggtgatagatggacctaagggcgggagggcgtagcagatggtacaagcagctgccaggagggcggggccaagctggccgtgagcaaaaagagcatccaaaaatcaaagcagagggtgagtttattcattaactcaataaacaacaaacacgccaaacctggctcggtagcaagtttgcattatggaaattatgatattttacttagctgaacggtagcagtccacgaccagcttgaattctagggactagagtttccttaccacattatcttacctccaaatgcccaaaagtcagaactcctcccaaggatacaagtggttattagaatttcttgtgcactataaaagagggagagcgtcaggccctccttcacactggcgtgattgttggccatgttttctaggtccagactgggttcactggttcagcatgaggcctgactagtcagaaaggactagtcagaaagtccagcatgcaagaggcaactgagagagccagggctggaacggaacagtcctttgtctatgcagggatcgcctgggtcttcaggcatgctggattccacactacattgttcagatatcaagaaatgtggaagcatccctaggactgagataccccagtgattagaaagaaaatgtaatgctaatgctattctgatggtagttattacatgattttattttggtttgcagcttaaagagcaaattctgggtcaatgaacagaggtaagaaactatttggggggcattgaaataacttataggtgtgactgctagatcattaaattagttgaagcctgggggtgtggagataatatgatttcatgaactatgcagcaatctcatttttttttaagttaaacatgttagggcagcactgactaaggctggggaatcagggttttgggggacatggggtgctcagttcagtaggtggcactctttcttcagagtcagttttacagtgatgacccgaaaagatttcaaaatgctgtgttatgggaggtcctgcttttcctatgagacggacaccagaaacgtatggtcctggagatcaccatatagacaaaactggccttgaactcacagagatatgcctgtctcccaaatgctgggattaaaagcatgcaccattgtgcctagtcaaaacaaaacaacccccccccccttttttttggagaaatgaagttgtaaaggacctgacccagctctagagcctaccctattattcaagcattctggaggcgcaagtgttttcagaggttcaaagaatcttccagatgtgctctagaaatgagctatctcccagcctcccttaagaactggcctctagaaggaggtcttctacacctggtttctgccctcacaaagcaatctagagagtcagtgtgaccgtgtaaggctagtactggctgtttcttctggatagcttcaagaccacagcagtaaaatcctgtttttagaaatgtcctctacagggaactggggtttcggagatgctgaatcagaaggtggagacaaaagaacagttcaagaccctgagaaatgacaacttgtgtcttgctttattagtcactagtgggcgggacttagtcttagaatgggcgggacttagtcactagtgagcagggcttggtgttagtgtgggacttagttagagtgggtgggacttaattttgtctgttgaagaactggggtctcctcccgcatcagagttataagccaaccattgacacactcactttctcatctttatgtgaaagaaggtaaccccaaaggtggagacccaagttaagaatgacaagagttgacaggtggtggtggcacatacctttagtcctagcacctgggagacagaggcaggcaaatttctgtgagttcaagaccagcctgctctacaaagtgaattccaggaacatagagaaaccctgccttgataccccctcaaaaaagagagaaagagagagagagagagagagagagagagagagagagagagacagacaagagttgagacagaagagagttgggctgtctaagccaggcatgggactaagagacacagaaaggagtggtggtattggatagtgcctaaactatctgcaaagggcagagaagacacaaaagagaaatcacaagttaggcccacagtaaagtcaaggaagacatcaaaaagggctaacccagggaaaatgagcaggaattagctaggtgtttataaaagggaagagtaccttaagaaaagccagcaaagagacttggaggtagcctgaagcatgtagagtttgacatagacaggacaagactttaagggaaatgatgaagaagatggagttacaccaggataaaggtccagacaccatcttggaatagaaatgggaaagaattaaaaaccagcttagcctgggctgttgtggcacatgcctttaatcccagtactgaagaggcagaggcaggcagatctctgtgagtttgaggcctggtctatggggtgggttccaggacagccaggactgtcacacaaagaaaccttgtctcaaaaaaacaaaacaaaaaacaaaacaaaaccaagcaagcaagcaaacatgggcttaaatctggatacagtggcctttatttctagttccagtgactgggagactgaaacaagagagtcacttgagtacaggagtgcaaggctagcttgagcaatatagtaagactatctcaaaatgtgaatttagatcaacagaattgacatcaagaaaaatactgatatcactcaaagcaatctacagattcaacacaatctccatcaacatgacaatgacttccatcagcatgacaatgactccatcaacatgccaatgggccccatcaacataacaatgacccctatcatcatgacaatgatccccatcaacatgacaatgacctccatcaacatgacaattactcctgtcaacatgccaattgttggggttcagaagtcaccctgcaaaccacaagaacactaatctcagtcaagcagggatggtttactgaacgtatatccaaagactgagtgaccaagggaacagctcagactctagagctgaaagctagctgtgcgctggacatttctcggggccaacttataaaggctaaaactgcaaaacccataatgagttcatatgcagatgtgggggagctgtagaccggttggtcttttctcatgtttccttagtaatttagacagaacagttcaagccaacccctatcttgcttggtcatgagtgacggctgcagatggggaatttcttaagattaacaaaccgcagaataatcggaacctaacagggtaggtggtctgcaacagggtaggtgatctgcatgcccctgctctgagtccagttctttttctgtgaccatgactggcgggcatattacagtaacaataggaagtagctgctagatatggagcaaatggctacagctgtgctagggaggctacctcaacaccggtgatttccatcagcatgctgcagatgacgttcttcacgggaactggaaaacggggatgtgatagctcagaaggttaaggcccttgctaccaagcctgatgacccgagttcaatcctctggattcagattgtaaaaccaagagctgattgtaaaaaggaaaaaaagaaaaacgaaacaaaaacctgactcttgccaggtgtctcgtgacctccacatatatgtatgcccccaccaggataaataaataaatataatgtatttttttaaagaaatagaaaaatgatccaggataaataaataaatataatgtatttttttaaagaaatagaaaaatgacccccccccaaaaaatatatatataactacactaaaccccatctcctcgcagccagtggctgtcatgaggaagacagatgactacaactgctgatgagtatacagagggagaaggaacccttatacaccatcggtggggatatccatcgagccactacggaaatcagtgcagagattctttccaaaagctaagagtagagcaggtttggtctataccactcctgacatatttccaaaggaacatatgttaacatacagtagatactcgcacatccaagtttactgcagcactgtttgcaacagccaagctaaggaacctacctaggtgcctgtcagagatgtgatgggtgaggttctatgcacccaccacagagaaggatcgaatcctgtcgtttcagaaaaaggcatgaaaccagagagtaacatattaatccaaatgagctggatttagagacaaatgtatgccttctctcaaatgtggaatctagaatgtggctttgcttgcttctaaatttagagagtaggagaactatttggagaacaaggtgggacaatgttgtttgcctgcgaggctaagccctcccaaatccacatccccttcggaagctgaggtggcacttactgggcatgaagcatcatggcgttgacaggggctctcctactgccttgtaggtatggaggaatttccatcggaggaaaactccctgctatccccatcagcggggaagcacttgttggctttctaagtggccttggccagatgatgaacgtgagcggggtatgtaaagactttggggatgagtttttgacttgtttaaatattaagaaatggaaattatcttaagtactacagaaggagaaaaaaaaaccaaacaaaccatttctcgtttgctgtgctgttcaagggtcctgtcaccagggaggcctccaaagaaatgttagatttcctcaaacatcttgaaaccacagacaacattaaggtacctggcctgaagctaaaaattcctgtgagctcattatttgactgtttcgtaccctgcgtaattaaattccattctacctgctggagtgcggaatgcttgcttgccaaggtcttcctccacctcacgcatgctcattttcctctaaacaacctgctagagccccctctcagatgcctgcattttagccaggcccatccaatcaacctgtctctgccctctaggtatggtttaacaacaagggctggcatgccctggtcagctttctgaatgtggctcacaacgccatcttacgggccagcctgcccagggacagggaccctgaggagtatggaatcactgtcatcagccagcctctgaacctgaccaaggagcagctctcggacatcacagtgtgagctgctctcggcatctttcccatcttcttccctctctctggaaaccaaagggagggtttttcttcttcttagtgtagtgagttgcagggctgggtggtaatgtctaattgggatcatatgagcataccggtttcaaatgcttcctggaccaaattgcttggctgttctttcccctttccatttatttggaaagtaaacttacactttatggccattcattttgggccctcgataacaagttcctcccgaattacactcgtaacctccctgccagtacacagagaaaacgccaggccctggaggctccactgaggctcctttattgccctggcatagttctagattctggtaattctcctcagatctccagactttgagctatttgccttcctcgagaaggggttcgcatgtctcagctacaggcaggaagagcattgatcttggctgtgttaaaccgtttgctctacttgaggcccacagaggagaagctatcagaacctcctggggttcaggcaggattcagtgtctccctactgccaagccttctgtgtggttccagaaaccaatcttatataaccagcctcatatcccttgactttcatgtgatcatttcccgggacatgtgatttcatagaacccaagcctgtgtgcctgcaggaaactgagagcctgtagaaaaacgcgaggctaagaaggacttagaattgctgcagatgttcatttatgtctaccataatatataagtagaaatgtaaggaagagaaagattagctaggatatactcatgaacccaaaaagcaacccacaaaactgtgcgcttaaccttgattaaggcagttctgtgggatgctaagcttcaggttaggaacgagggtttgaggacacagtgtgctattggataagtactacccggagcctgatgcacacctgctctgggtttctgatcttccctatctctggtcctgctgcagactgactacttccgtggatgccgtggttgccatatgtgtgattttcgccatgtccttcgttccagccagctttgtcctttacttgatccaggagagggtgacgaaagctaaacatttgcagtttatcagtggtgtgagccccaccacctactggctgaccaacttcctctgggatattgtgagtaccaggccttccctaaccgccaaaggccagggcggggctgggcagggagagatttcacagttgccaggactgctgggggcaattgtcttgtggctgctatctcttgacatcttaaaaagccaattgggaaccaacccttgagaagaccactgaacacagtaacagccactgggtagatctttctgccagcagcatgggtctgagcaggtaatacaccccaacattcccgtcttaggtcctgtctcaacctccccacccccatccccacccccaaagggaagggacccttgtgatagggtcaccagataaatataggctaaccaccagctctgaatctcaggataaacaatgaacaactattgagtatatcccagggcaactattacatgatagcatatttatactaaaagttattggttgtctatcagaaattcaaatttaattgggtattccatgttttaatttgctgattctgggaacgctgcccagaaaccttattttacttcttcagtgtaaccaggtctttctggttactttgttgcagttaacaaagtaactcagtctttctggggtgagatggctcagcagctagaggtgctttgcaacccgagccttatgaccggagttccatccatggagcacatgtaaaggcagaggcagagaagtgctccaaaaaagtgttctctgcctccacacatgtgtgtgtttgtagtgtgtgtacccgtacatacatatcatgcacatatactcacacaataattgttttaagtgaccagatcttcactgtattacatcaggtaccatgttagggaacattaacaaaaagaaattatcagatcaacagcagacaacaatcagggttggtggggccagagaaagattaaaatgctgtatgtgttatttacaggtcatggggtcaaaaggaactgttaagagtctagttatcattatgaactaaccagtaccccggagctcttaactctagctgcatatgtatcaaaagatggcctagtcggccatcactgcaaagagaggcccattggatttgcaaactttatatgccccagtacaggggaacgccagggccaaaaagggggagtgggtgggtaggggattgggggggtgggtatgggggacctttgggatagcattgaaaatgtaaacgaggaaaatacctaattaaaaaaaaagataaaatcccctatttaaaaaaaaaaaaaaagagtctagttatcaagccgggcatggtggcccatgcctttaatcccagcacttgggaggcagaggcaggcagagttcgaggccagcctggtctacaaagtgagttccacgacagccagggctatacagagaaaccctgtcttgaaaaacaaaaacaaaacaaaacaaaaaaaggtctagttatcatgtgacagggtcattaggacaccagcccatcttttcttgttgtcttggataataagatctttgagtctttttgttttgtcttattttttttgttaaagatatatttatttcagttatgtgagcacactgtagtacaccagaagagagcatcagatcccattacagatggttgtgagtcaccaccatgtggttgctgggaattgaactcaggacctctggaagaacagtcagtgctcttaacctctgagccatctcttctgccccttgtcttaaattttgaaacaaggatctcacttatgcagccctggctagcttggaactcaataggtaggccagattgcaaagtcacagagatccagctgcctctgccagccaagttctggggtgggaggcatgtatcaccataccagggccatgggatcttcatttaatctcaacatacaaaaactacataatgataaaacatgtcggctcatggagagcagcaccaatggccctctccctgtgggctttgctaataatgctgactctaaggactcctgatgactggattcctttgacctcactcaccttattacgtaaccgccacttaacaattcaaacccggaaaacttcactagtggctgaattatttcccttttcttctggctgcataagaggacagcccctggagcatgcggatctcgagagctaaaagcttctcttcggactgtggttttaacaggaaagaagtcaggcttgcctaccttaaaaagctaactgttaaaagtgttgactggtttactgttttaaaatgcattttatttttattttgtgtgtgtttaggtatgtgagtgtttgcctatgtgtatgcatgtatcatatgcatgcttggtgcattcttgatgcccaaaagagagtatcagataccctgaaactggagttacagtcagttgttaactactacatagatactggggacccaacatggatcctttgcaagaacagcaagtgctctttactatcgagctattttcccagctctgtttttaccattttaaagatgaggtatataatttacacttgagactagcctatgtgcatctctatggatacacagagaggtctgggagcctgtaggaatccatgactataagcaatgggtggaaatcttgggtagaggtggctctggcaaaatagtcagcaggcttttttttttttttttcaaggatcagaaggtgttggctactgtatcagcaggctttctgccactctggttgtgacagggtcattgtgacaccaagctctgtggtctggagtgaaggtgttcattactcttattagtcagggacaaaaagacactgcaatccaaggagtcattgttgaactaacaatgaactgtttgtatcatacatttggcatacctgtgtccctgtaaattcctggcttctatgtgtcatctgttgaaacagtgtagccccatggaagaaggcaagtacagcttgaaaccttctgagctacctgaaagctagtttctttctctctttctttctttctttctttctttctttctttctttctttctttctttctttctttctttcttccttccttcctccctccctccctccctccctccctccctccctccctccctccctcccttccttcctttctttctctctttcttttttctttcttccttcctccctccctccccctctctttctttcagaataaaaccatttattgactctttgttctaatgcttcttggtagctgccgtcagtcctgtaattctgtccagacctctccacccttgaagtgtcaccttgtccttagtccttttccatgattttcagcccctctatgacttggaagccacattcttagagcttctgcttgaagtgtcagggcctgatgtcatgtctgtgacatcctttggagatcttggtcaaggagccagcttcagcattgtctcaggtgtatggctgctgtgctgggggcagctgctgtggagaccacttctcaccacagagggtgaactcttatgtttgccagcttggctgtatcctcccaagtggggactttctgcttcccggactttttgaagaaggctgccaactcctgctgcttgacgtcttttacacaattccaggcatcctgcagtctctaggctgctagccaggagaaaggggttgaatggtgtttttgtgtgtatgtgtgcctgtctgtctgtctgtctgtctgtgtcctctctgtctctctttcacacacacacacatagatgcacacccctcgggtgtgtacttttacaaacaagaatgcgcctccacaccacagccttgcattagctcatgttgtctcttgtctccttcaacccaagacagttcctgctcctccccttgacacacatgaccttgacccactgggagattacaaggcagttatttggcaaggtgtcctccagttaggggttacctgaggttcctcacaaccagactgaggctgggagttcctggcagcagtgtcagctgcagaagtggggctctccttgtccccttcagtttgcctctgatttccatttgccctagttctgagggtgttcactttgtcccttacggaggtgtttgcccagcttctccacctgaagattattctttaatactttattattactttgaagatgcacaaataactggtttgttagcaaacttaccctttgttcattatttatttatgcatatacgcagtcatagctcttgttaattagtggattataatacgacacaactattatctagtttaatacagagacaatcaatggtgtggccagtgggtactccttcaagctgccctttatgccctattgtcttgtgcccattgtcctggagtacctcagtgcctctggttgtacaagagaccccaggctcatgctgcaactcccctggagccagatatgttcccaagggatcctggttcatttcagaaggaagtagctttcataaactaaagtctgggcaccagatttgttcgttgccaccaagatagcactgattgcaggctgtctaagtagacggaaccacagaagacatttgcatacatacacaggtttacaccagtgttctctctatattcactaactgcgatgctcacctctaactcaagtctactgccaaagagttcatgctagctttctgactttccatgttcacaattctcttctccaagtaagaaattggctccaagtaagaaattatcaccctcaattgtttacctaactgagtgatatgtacacctgtagtaagtgctccatacctgccctggtcccctttctataggaatcccctctcctcttcctgcttcatctgtgtcccatgtgggccaacttcctatacagatacttcttcaccccatagtgttatgggtcagagtctggactgcataccctcaggttcttggctccttatttaagaatgaaaaagaagcctacacaggggatagagagagggcccagtggttaagagtgcttgctgttcttgcaggggtcctaggttcagttctctgtatccacatggtggctaacaaccatctgtaactccagttccagaggatctgatgccctgttcttgtttgttagcaaactgcacacacttagtgcaaaggcatgcattcagccaaaaccactcatgcatgtaaaataaaaatgagcaaattctaaaaaagaattgactgcaaagtagcaaagaaattttatttaaagtatgcagtagaacagattagaaatacactgtcaagattggcagcaggccaaatgaatgaggtcatcaggggcccagttacttcttggggtccaagaggaggaagagcttgcctgctaacaggtggagtgcataagtttctgttttgacgaactaggactgtataaatctttgcttaatgtgcgtgcccctcctgattttaatcctatgcttgtccagctgtacatcagcataagatggtaaatggggaatcccccctgaaagttcatttgagggtacagttctgctctattgtagatgtaccctagccagtctagggtattcaatataggtccataacctataattccaagacagtgtctcaggaagtactggaattcaaatagggcatgccaaagggcatgctaagaggaataacttatttccattgtttaaacacgggtatgcatgcaacttgatgaaagccagaatcttacgttgctaacaagtattatttggatatggttgtgtgtatagcccaagccaagtgtagctgcagactgctaagctattccttatgcttgtctgtctcaatggggcctctggcacccacttcaggtaccctgtgtgccctcctcaccttcagcacgctttcaccctggtgtagacctaatcttaccatgccgcccatctctccaagcctgacctaatgccttcagaactgcattgtttagaagagttatccccacccatgtgagcttctcagagacaaaagctatattttaagtttttctaatttctgggacatgtttagaaagaataaccatcaggacttagcgaccaattcgtaagagagtaagagatcagaaagaagttcatatacatcttttccaaagatacaggactggaggtctttgaacaggggtagaaaagagatcgtagtagagctatgaacagcttgacctgtcttacctctgtatctgttaaccaaatctatttagacaagtggactcaagccaagtccatgagttttggaggagcctggtcccctggtcatagaggtccagggtcttactgtctcttctcttccagatgaattatgctgtgagtgcgggattggtggtgggcatcttcattggatttcaaaagaaagcctacacatccccagacaaccttcctgctctcgtctctctgctcatgctgtatgggtaagccatctgggccaggggaggagaggttatcttctgacggcaaacttgggttgtcttatactggtagcgcaggcagggttagccgccagcccaagatgcttctatggtagctaatcagaaatctgcccgagtcctagtccaattagggatgaagagacacatgccatgtagtctgaatactcttcacttccaactgtggtcttgaccaaagcctgggactcagttcccacttcctcctcagctctgatctctattccctctgtgggcaagctgcccagtgcagtgtctccctctatgctggtcaagaattatctgcctatggtacaagattccaagccatgacactacccctaggtcaggctagaagatgacacagagactgaatccaatcagtttatggagtacagcacacagctttgtaatccaggcctaccacttgctatagatttaactgtgacagagaatgcatttatctgggccatagactcctcacttataaagaaggaaggggtgatgcctagatctttgtcatgtagagagggatgtcttaccaaaacaatggtctctgtcctagggcaatggtctctgtttatctctcttgagaatggactcagaagccagcttgactgagaactatgaaatgaactatgaagatgagcttgggaccttccattctgctttacctagagtagagagcattactgtgggtggcctctgggcttcatagttcatgaagatcacattcatcccttatgaaactcatgatatggttagggtaggcatcaccaacttggtttgaagacatggcacagagaccaaggaatggagtgtctctttccctgggaccctggccagtccaaacatgtcccctcatatttagaggtatgattgatgggatggaacctggaactctctccctctgagctgtgtcatctcacacagatgggcagtcattcctatgatgtatccagcatccttcctgtttgaagtccccagcacagcctatgtggctttgtcctgtgctaacctgttcatcggcatcaacagcagcgccatcaccttcgtcctggaattatttgagaataaccgggtgagcagaaccttcttggcttcttggtttagttggtgggatgttcaagctgatgtagcagtctgcagagccatggagaacagggtatgtagatgcacatacccgggagagccgggctgtctccaccaccctcgctgggcaagactccctactctggagtcttgatttatattctgtgagtgcaatggctttgtaagcctcttctataagttacatacattcactcatgattctaactttttagaataaaggtagaaagcatgcacatgcacacgcacacgcacacacacacacacgcacatacaatgacatagtcaggtgatttcatataaggaccatacacttaacagattgtgccacgggagcttctgttcaagtgactcaaaatgtaaaagaaacaagaagacataagaatgaaaaagctccctacccactttgggtcacccaacttccttctcaagactccaccttattccagttcataatgttttctgaagacagacaaacaaacatgtattcttctccaatttttttcgtacataaatgataacatactagcacataccgtcctgatcccaaagaaattctgaggacagattagggaaccctggtgccgaatgacttagttttacaagatattaggtccacttgccttgtctacaccctctgcttctttgtccagaaggaaatgccagacagaggcctttaaaaagaggggagtcggtggctacagtgctgtctgtctttacttttgatgactctctctgagttctgctctggctctggctctggctctggctctggctctggctctggctctggctctggctctggctctggctctggctctggctctggctctggctctggctctgccatgatatactatgctatggctatggctatgttatgactatggctctgctctgctctgctctgctatggctatggctatggctatgctatgattatggctatggctatggctatgctatgcctatggctattctatggctatgctatggctatggctatggctatgctatgactatgcttatggctatgactatgcttatggctatgactatgctatgctatgctatgctatgctatgattatgactatgactgtactcccagcactccagcttcctgggggtctgtgtcactagcctttccttttcttactagttcttcacagttcagagggtggccacacatctgcactgggcctccccagaagaccagagtgcctgctcttgctgctgaagccatcagagcctacttgctgatgaggagacaggtgccctcagcctccacgctcctaacagcctcacttctctttctcagacgctgctcaggttcaatgccatgttgaggaagttgctcattgtcttcccccacttctgcctgggcaggggcctcattgacctggcactgagccaagctgtgacagacgtctatgcccagtttggtgggtagcattctaggtctgtgggtcacaaccatggatccattcaggctggaaaagtgttctgatgtcagacctgcagcctagaggctgggagggcacctacatgtaggtcaggcttcaggctagaccagccacctagaagggcttaggatactcctgtttctatggccaagaaccacaggtggggccaagcacaggattttaccttccaatattctaacctggggagcccagaataatttggggtctcatttagcctctcacataaggcctgagcatatgggtcttcatgagtgaggctggcagcctggtgtagactttattctttctgatgtcctgttgcttctattctcaggtgaggagtactctgcaaacccattccagtgggacctgattgggaagaacctggttgctatggcaatagaaggggtggtatacttccttctgaccctgctcatccaacaccattttttcctcacccggtggtatgtctggctggaccctgaggtgccatggcttagtacggtgtttccaaccctaggcttcacctcagcgtggttctcagaaactgcattctgttcttcgttctcttcattctcaaggcccagcttgttcagtacacagcagggagagatgggttaaaacaggcctgttggaattagagacaagtcttaacttcaaactttgagaaatacagtggtttcattttaattactaatgtttaactttcttgtgtaattactacatacttatcttaaattggacaagaaaactgcaaatcaggaccatgacagattatctgagacactaggaagcatggtttccatctatagggggtgagacaaagctcccttgctagttagaacatcgcgtgagggcagggcagggaaagggaacaaggaaaacattgggaccttgtgccaggtgagggcaaccaggggcccatggaaaagtgaaaaaaggcaattcaacctccatcccttaatctagatagctgccaaccctaacgttaccagggcatctcagaggtcaggtcagcgagtttatgttcctgtccagccacattctctagactcttcccagcctgcctgcttcctgctgacctgatcttcatttctggagcacaccccctttagagggccacacccagggccctgcactgcactcacacaagcctgagagtcttcggtgacaatggtccgtttcctttcctcctctcaggtacatctgaccatttgtaaataaatagttccagggctcggtgcactataatgacctacttccctaatcacgcgggtgagaagactaagaaggaaaataaatccattcacatggaatgaaacagtcagcagtgcttctagttctgggtcagactgtgagaggctatctatccgtatgcctctctgccctttgccgtgttggccgtagggtttagcagagaagaggaagagagaaataattaccaaaatgaagacattagctttagacactgatgctgatatgagtgagtcctaaagagcatggaaagacctgacttctagaaacccaacaaccacacctatgtagataattaacaagcaaagagagtggaggggtggaagaaaggatgcttttggtagaagatgtttgctaggagccagccccagcaatggctaggtcctgcagtggagataaggagtcctctagggaggggtgagtcagccaaggctggaggatcttgaagcctgactaactagcagtcagagtgcttctttatgtatacagaactcagtaggcagggatagattcattttattccagaacatagaccatatcgtttttgtccctggacatgtgtttaatgtcttcctcttggtcatacatctagtcatcattgataaccagtgacagaacagagttatcgtttacaatcattttccctcatcaactccataacacaatatttaagaattttctgttttcaatagacagaaaatctccaagccagtttgggcagatcatcatgtaccaagcacactgtattactaactcttaatggtcagagtattaattgtcattaggcgcaataaaaatcttcaggccaaagccactgaagttattattcaatttctgccataatatctttttagaatttatttaggtgtctaatcttgctattcttttattccttggccatatgatatcacaatggcctaacatgagctaacttttctaagcaggggagatcttaattttttttttatcatttatcctccttattctttgtccatcagtataagcccctgtctagggcagaggtaattccagccaacctaactttgttgctgtatcttttcctcaaggggcataccatacacggccctaatcttaaatggcatacaattgcctgagtttaacctgatctactgccaaattttctagcccaccaaatcttatttaccttttaacgtttactgtgtcctgatcatcttgttcctaagtacaggggcagatgttccaaaagtatcttggagttagagccttgtaaggggatctctgacatctttatttgagtcataacctttagggtgtaataaagaccttcaagtaaggtcagataaggatatcttgataaagacaggagagataatatgctcagggttttcccagggaagcttagaagcagttctcctgggaggaggtctaaatgattcataagaagtttttcatcagccgggcagtggtggcgcacacctttaatcccagcacttgggaggcagaggcaggtggatttctgagttcaaggccagcctggtctacaaagtgagttccaggacagccagagctacacagagaaaccttgtcttgaaaaaaccaaacaagaaaaaaaagtttttcatcaacccaatatcccaagttgtacaaatgttagcgccctccaccccagcatgcaacacgtggagatcatggtttaaagtggaatacagcaaggcagcgatcacattaatcagctcagctttgctgatctttgtcaggaagctgagctggctttatgacttttgctgttcccattagacatggctgtgccaggcatggcctgcacaaaaacatggcaaccccagcgagtaagactggtatacggaatggaaggacttctagggagccatggaataggaagatgaagtggtatgggatgagtgcagaggggcacagagttgggtcacgaaatactcctcatcttgatgacttgggacccaagagcaacatgagatccctgggggtattttaaccaaggcagtgacatgaccttgccatgctgggaggtgagataggagcccatgctgatgtgcaaagagacaacagtgacctggatacagatggaggcattgggagatgatagagtagaaagggctttagacaagacttagtaatatgtcagacaaggtcagtaaggaagaaaggaaagactggagccctaggctgggcctggctaccttacggtaggcctcttgcatccaaggatagctaggatacagcataacacacttgtagatgatgatgtcatgtatcagtgccaaaaggctggacattctagatgtaggtagtcagaaagattttcagagaagggtctgtgccttgaaggatggggaagattctcttggcagggcaggagcaagagaacatgctgaggccagcaggtgggaatggcctgcatagtgtaaggaccagggtcaggtgccagtggttggcaaaggagtgagtgtaacttaaaaaaaaagtacagatggcaaaggcatagaggatctgtctgcaggacagagatgcttgaagaggttagacttggaacctatgacttggaccaagaaagatttggaacgtgtgttaataagatgccaaagctatcttgtcatcgcattggtaaggaaggctggagaaagagggaaggttggtagctaataactcacctacatttcacttgccgtagagcaacggttttaataatataaagctggctcccaagtctttcctcaggcacgactcagagttcatcttcacacaacctgagacagccttctctcccgttcatgtggttgaagaagacaacaaggctcagagagatccagggacaagcataggtcaggcatgaagaggcaggacggcagcacagagaggatttcaacagaagcacttgacctgcctgcctagtgtccctcctgacaggaaccatttttagactagacttagagaaaagaagtccagaggagtaaatgtgggggaacgggaaggatagttgggcgagaaggacggtggcatgacggttactgcacgcccagcacaatcctgcccatgccccttcctctaggatcgctgagcctgctagagagcccgtttttgatgaagatgacgatgtggctgaagaaagacaaagagttatgagtgggggaaataaaaccgacatcttaaagctaaacgaactaaccaaggtgaggagcaggtgtgggcggtattttcttggcattacaagccgagcacacaggtggcacaggaccatcatgctgtcccatacaaccccatactgtctttgtattgtcacttgcctcctgggagcacctatttcccatgacattatccctgctgttcattgtggataccacagggtctccagaagaggttctccaactgagccctggcctctgctctctgctgttccgtttgcacatggcatgattcaccctccacacctctctgtgccgtggctcctcttccaatgctgtgttaatgtgtagcctcctggtgtttgtggttttcttccaagtcactctgtgctgtcctttgctctcactcctctgccctgccctaccctattcactcactgctctacccctgtcttggtcttgaacccagtctctttgaattttacaggtttactcaggctcttccagtccagcagtagatcggttatgtgttggagttcgacctggagaggtgggtaccgtactaactaacatgaaatagctcttgagaaaaatcagccctccaccatgagtcttctccctctgaccagagcttgacagtagaaatctaatgaaagtcaaactttctagtagataaggtgtgtgtgtgtgggggggttaagtttactatttttatttcacacaatagatctaaaacaaaattttgatgtgtagttaatgtacagctctcttagtcagggtttctatttctgcacaaaacatcatgaccaagaagcaagttggggaggaaagggtttattcagcttacacttccatactgctgttcatcaccaaggaagtcaggactggaactcaagcagatcaggaagcaggagctgatgcagaggccatggagggatgtcacttactggcttgcttcccctggcttgctcagcttgcttttttatagaacccaagactaccagcccagggatggcaccaaccacagtgggccctgcctcccttgatcactaattgagaaaatgccttatagctggatctcatggaggcatttccttaagggaggctcctttctctgtgataactctagcctgtgtcaagttgacacacaaaaccagccagtgcaaaaacattactgagatatttttcatttttcttttttgtccttgttgtaagtcttcaaagccagtgtgttccacgtttagtgcccatgttggttaggattagatgtgtttcatgttggtagccacacatgaccaataatctcagtaatggcacccaggtatgagtatcccagctctcacactggcctggggtctggcaatgaagatgtccttggtcactagggcaacacctgttctctgttttctcctagtgctttggcctcctgggagtgaatggtgcaggcaaaaccaccacattcaagatgctcactggggacaccacagtgacatcgggggatgctactgtggcaggcaagaggtgagtgctctgcccttcctgttgtacggtgtcccccataggccatgtccttgtcctagcatgtggaaagccatccagtgtcatatgccagtataactccgagacctagaaagatctatgcagagaagggggcctcccatagaatgtgattcaacaacacacaagacatagatacactggaaaagccagactaaaatgtaatggttgggagtgtgctcttagcatgaattcctagaaagttctagaaaacactaagtcagtggttcttcatctctttgggctataggctcctttgagcaactgctggacactgtaccttctccctctataaggatattccacaccctccctttcactccctcctgacagcttacaaagctttgagggatgtactgagcccaggggtgcatctgtgatcccactgcagcctctggatcccaggctaagagctcctaggttgatacatcctttctctgggttgagtttctctcaatggaggtcctcatctaagggacttcaggagacccccatcatcattagccatttgcatgccaatcctttttcccatcagaccaaggaaagctggcaaagagaaagttggcctgtgtttttggcttctggagagtggctattggcctctataataatgtgagcttaagcagatctctactctgtgcggtagggcatgtgggtccgtgctccaccctaccgctggggtgctgggcagctctgctagactgcatttaccctgtgcctccactgttgggtgctgggctttatcaaagtgccaagacatctctcagggtgtgggaaaacagccaaggatgtgggaggccaaagctggggttcccaggtttctaggcatccagtcacagctggggtgccacacagagaagaagggaacaaagtgttgtgtgttgtgtcgacaacccatgacaaggccgggaccagaggctacaaactcctggacatccaggctcccgctaggttgtgtggaattgggaatgagctggggggcggggggcatgggatgagcgctatgatgacaagcccggggccaggggagtggaaactctggcttagttcatcagcaaaagtctttaggatggttgtctgggagcacagagaggccttctgcaggtgactcagccatcaaaggcattctccctgcttctcactgcagttctgctcactgtggagaaaggatacataccaacagctcagggtggaccaggtattaaatacttcttgctggaaggaatgtctgggaagggaagcttattggctaaaccttcagggcctcattatcctacagaactctgtttctggctacatgaccacaggtcacatttcctatgtgagaagtgtggcatgtgttccaggccaggaatctagtagggagcagggagctgcctactattccaggtgggtgccgggtctctgaaaccactcaactgtaccaagtttcctggtaccgtcccttgtctccccagggcagggaagagaatggtctgtctctttactggctgttcctgaatagcagcacccatgcacagtgtcctcacagcgctccattctggcttattattagtggagacagacattgctgatggctccccaacatctgcttgattaagaccctctgcctttacccaagagctctgctcaacacagcccaacaagcagggggaggctggagcatacctctgggatgataggtgaatctgagattccagccctccatggccatatgtggtgggtctgaagcaaacacgttgacaaagatagagccaggtcatggccgagtacactttatctgccacccagctatctgctaccaagcaaatacagtgataacaacaggacttatggtgagagagctcagtggcagatataggaagctattaggcgacaccagttttagtacagatgagacacagcctgctatcctgaggtaaaactgagctgtaatttagagagaaagcaaagttttaaagactggggcttacaggtgagataactcctataatttggaaaggttccttccttgcttccctgagtagtttcaactgtcctacctatacctggagtggcctttgtcacagcgggggaaactgcgcctggactcgctgtgtcctgtcctgttatagctatcctatattaataagctctgatctgtaagtggttagacaaaggtgactggataacatgctctatgcacaggtttttgttgttgttccagtcaatacattttctagtaaagtatcgatacgggattaagcagatggagaagacagaaacatattctgccgcttgccagactcctttctctgggtagttatctgattacccctctctgtctgtgaataaatacagaggatgttgttgacttccactgggaggtatcaccttttccaagctacccctcaaagtctggaagggattaagatccaggaacgatccattgatcacttcctaaacctttgcttctaagccctcaagccaggagatccaacctactcctcactcacgtggcaagtgtcaccttagctgtgtgacactcagaagaagccaactatttaaagcccagcactccggaagttcacgttactaactaagggatccccactttgatgtccaaattctgagtgtttctaaaatggagaaggtcttgccccacggccaatctggcccctgctctttggttaccccctctatgaaggaaactcagtaattcctctttcttcttgcagcattttaactagtatttctgatgtccatcaaaacatgggctactgtcctcagtttgatgcaatcgatgacctgctcacaggcagagaacacctttacctctatgccaggctgcggggcgtgccatcgaaggaaatcgagaaggtgagaaacagtgtactgtggccatgtgggaggtgggcaagctatggcctacacttatggagtacagtcatgtagagacagaaaactgggcacactgtccacccattccagcaagtgaacatatctcctgtgtgccaagtcctgacctagaagctagatatagcagcaaacaaaatgagctcatgcacagtaaattcttgccctggagtctgtttggtgaaacatgcatttgtcctttaacctcaatcagtatagcaggaaatttaaaagtggcagtttttttttccctaacccagctagctcccaaataattgagatagagatttacagatttattcaacaaactttaagcacaataactgagcagatattcctaaccctctatgctacctagctacttcccagccacacacccaagttagtggcattggcttgctctgctctagtgtgtgctcctggtgaactcccttggtgacctcctcctcttccacttctcctcttcctcttccacctcctcctcttcctcttcctcctcttcctcttcctcttccttctcctcttcctctccctcctcttctccctcctcatcctcctcttcctcttactcttcctcctcctcctccctccacctgcctcatggcccttcttcttctagatccttgcccacttcatggtgaactccttctccctgactcttctccctgggtcccctggctgggattggaagtccagcctttgtatctcctctgcccagtcattggctgttcagcctttacttaaccaatcagagataactgaggaacattctttatgccacattgatacaggaaattcttcaatattcctagcaatgcccccacatccgtgccagatctcatgcatgcacagaaatcaggaatacatggtgcacaagaccaacccccaacaaatcaacattctagagacttatcctgacgattcacataccacagtataaaatgcttatgcgcatggttattcattacacttgtgattgcaaagtacctgatatcacctaaatatttagacatggtcagctggatggtacatgtgacattctgatgctgctgtagggaaagaataaggatggcctctgtggcctgttatgacatattgtcagggttagttctaaagttgctgtatgagaacaggcaaggtgtgaaggtgaacatgtgggacgctgcttttaggtaagaaatagaaaaacaagaagcagctgtgtgggtgcttagctttattgatagaggggtacaccaacataccagacaacaatgattttgatcataagaggaaattggggagaagggcagaatggagggagtaatggttctctcaggttatccttttgtctagctttgactcatgcaggtgtgcgcatgcgctacagattcaaaactaagactgcatcagtaagaataagaagagagagaaaaagtggaaacaggaagaaagtctaccactcaatataagtggaaacaagttactctgttttaaataattgtgcagatagtggggtatttatccttagtcgtgggcaaagtagcgtaggacagagctcttcaatttctgagctattttttttatgtatttgccttttattttagtatggacagaataattctgaataattgtaggtatgtgacataactgagtaaatgaacaaatgtgttgatgtttgagatgttcacttctttgatagaggaagtagaatacatttaggaaaagggaaagcaagaaagaactaatttagtaatggatggatcacagggctcccaatggaggagctagagaaagtacccaaggagctaaagggatcttcaaccctataggtggaacaacattatgaactaaccagtacccctgagctcttgactctagctgcatatgtatcaaaagatggcctagtcggccatcactggaaagagaggcccattggacacgcagactttgtgtgccccggtacaggggaacgccagggccaaagggggggagtgggtgggtaggggagtgggggtgggtgggtaagggggacttttggtatagcattggaaatgtaaatgagctaaatacctaataaaaaatggaaaaaaaaaaaaaaaaaaaaaaaaaaaagaactaatttagaggagtgggtgggaattggtgatgtcactatgtcgtcttgaaatgttcatgtgcatgtgtttgtgcataatgtaggtgtgttcatacatacactcattatatgcatgtgtgtgtatatgtctgtctgtccctgtctgtgtctatctatctgtctgtcctctgagaggaccaaggcacaaaaatactctaatagcaatggatacacctaatatccagattttggtcctataccatccctggacaggttgtcctgggttctaacaagccatggagagcaagccagtaagcagcactcgtccatggcctctgcatcagctcctgcctccaggttcctagcctgtttgaactgttcctaccctaagtgctttcaatgatgaacaacactatggaagaatgaatgaaaccgtttcctccccaaaatgcttttggttacagtgtttcatcacagcaatagaatccctaggttaaataccatattaaagacatcaatagacagtcacctctgacccaggaagtataacaacaatggcaatataccccactgttcacccctccacagtgcctactacagtgcctgcctggctcgtgctaaatgctctataaatattcattagatgtacaagaaggttgcagatgtgtcccttctttgggggtagagtcaatgggtttgagatgcactgtcttctcagagaccctggaactcttggaaagatgtatagtctttggaaggctgaacgctctttccaagagggctgtagagctcaggaagtcgcactggtgaaaccaaaggtcaagtgtaatcttaaagtatgtactggtagataccggccagcagatggcgctgtcacaacagagctgagcctggcaggatgacctctgagaactcagccttggtccatgcctgttcctgggaccttcagttgttcatcatccaccagctgaaatttcttctctttcctaggttgccaactggggtatccagagcctgggcttgtctctctacgctgaccgcctggcaggcacctacagtggaggcaataagaggaaactctctacagccatagctctcactggctgccctcccctgctgctgctggtgagggcatcgtactctgcagagtggaaatgtcacggacgtcctgagttgagaaaattaattcagggcttgcagctttagaacggcaatagattgcccctttaaggcaaattagccaagtgtttggtcacagcacagtctgaccttcaatgcctggaaagtctctagaaggtccagaaactcagactggaaagccctgtcagctccagggaatgttgcgatctggttagaaattaggatgaggaaatctgtgtggaccggagcatctacttcaatcagaggctccggggaccctctcgtgaattggaccacagtagagtccctgagaccatgcagtctgggttttaaatgacatgggacatagagaggactgtaaagttacttgggctatccccctcccctgacccttcctaaggataattctactattgtctttattaatttattgttattgttcatattattattattatcctatttctgtatttctattatcctaaccttaattcactcacagctggcatggtcctataggtatgtaccatgtgtctgtagtctccaattccccttctacctatgtgtcctacaagacatggttctgtcttgcttgctgggaagtggctgtgcacttgtctgttagcccaggaaggatgtagtgatggagaaagaccaactccgcgtccacatctccctcttttctctcctactctgcaggatgagcccacgacagggatggatccccaggcacgccgcatgctgtggaacaccattgtgagcatcatcagagaagggagagctgtggttctcacctcccacaggcaagagatccccagggaggtggagagagggagggaggagcaccccctcccatctgtctcacttcctctctcctgcttgacagcatggaagaatgtgaagctctgtgtacgcggctggccatcatggtgaagggcacctttcagtgtctgggtaccatccaacacctcaagtacaagtgagcaggtggaggggcctgcgtttaagtacattctgtgggttcatccaggccttgacgtcatcatggacagttgggacgcttgcctaaccattccacaggcattggctagtgatggctgggccagactctttagaggcagatggagaaagccaatgagatgttctacactgggctaattgcttgtggctggaagctcacaggagtctctggataggagagttctgactgggacatttacagaacctggctggcatgggggagggccattgtcactgacccagtatcagcccacatttccttagagatccaggacttgtggcacattttgtgagggtttacaaccaatgtaggaatgagtaagagaccaaacagcttgagaaacagtttttctttctagaatattatgtatggttaggtttgaaaaataaatgaccatatgtcatatggcaaactaacaatcttgaggaatattaccttgtgaccacagacttataggtggttagagataattccttattatttataacttgtgagataaaactagcaattcattgaaatgagattattgtaacatcgtctttcctcgcatcctaatatgtcagtggatttctagttgtcactctttcccaggcatactagaatatatttagcatgcttatgaggagccaatgatataagctatcaagctagctggctaggataacagagaatgtcacttatctgtgctgacatcaaaccttagggagttcatgaagtgtgtttcacgggaaactaccatccttcacatgggtgggaagatctaagatatatggtgaatttggcaaaagggtttttgatcctgatttatttcttaaataactaccatgtggagactacacagatagctataaaagtatcagcatgtgagatcaccaggcccgtgtcagcaactccccatgcctaactgctagagtacatccttccacattccctctcattcctcaatatcccagtggtagccaggtaagggggagggtaagggggagggtaagggggagggtaagggggagggtaagggggagggtaagggggagggtactcccatgtgaatggatggctgatttccaaaaactggatggctactatcttcttactgtagaaacagccccagttcatagaagaagttctccagtaaactttaatgagtatgatataccccaatgtaggttatcacagtccccagcccatgattcacactctttgatggaccattcttgatctacatagcaaggggcatcattgttagtctgctttatatcactgtaacaaaataccagaggaaaaacctgacatcaagaaggaaaggcaggggctggagagatggcacagaggttaagagcactcttccagaggtcctgagttcaatttctggctaccacactgtattagtcagggttctctagagtaacagaacttatggatagtctctatttagtaaaggagtttattgatgacttacagtgtgcagtccaactcccaataatggtcagtagtagctgtgactggaagcccaaggatctagcagttgctcagtcccacacagcaagcaggcaaaggagcgagagagattcccttcttccaatgtccttatatcgtctccagccgaaggtgtagtccagattaaatgtgtgtgacaccaggtcagaaacttctatctcccagcctccagattagagtcactggtgagccttccaattctggattatagttcattccagatatagtcaagttgacaacaggaatagccactactcacggtggctcataaccatctataatgagatctggtgccctctcatggcctgcaggcatatatacaggcaggccactgtatacataataaataaatattaaaaaagaaggaggaggagaaggagagaaaagaagaggaggaagaggagggggagggggagggggggagaggaagaggaggaaaggctcctggctcaattgatttgggcctggggtagagcatcatggtggtggtaatgtgtggtagaaaagcctacttaccttagtagattctaggagagagggagaaacacacacacacacacacacacacacacacacacacacgcatgcatacgcatccacaggcaaatgcacatgcatgtatgcacgtacacacacagacatctttcaaaaacgtgttcctatgatctgcttgcttcagctgggtcctacctctaaaggattcatccactaataatgtgagatcccctcgtgatcatatcacccctaagttccaacctctgatcagggctgcaggaaggaccaagcctttaatacatgagtcttcaggcaatatatcatatccagaccatagcacagctccacacccttcatgaactttcctcagggaatagtgccttcccaagcctttgttcttccctagcaaatcatatagaagccattcagtcttctcctcatagagctgagtgctctagtcacaagtctttacggatgggcctagaatctccacagggggctacaaccacctcggacttcagcaagtacgttcatccaacttcaccacacagacatttagatctccagaaactgatgccaaacatttttttccgctcctgtttttaaacatgcggagcaggccaatgctatgggcttttaatccctattatgcctaatgagtgcactctttgtctggggattgccttagctcttacagaactgaacacactgtgcacttgctaggtttggagacggctacattgtcacaatgaaaatcaaatctccaaaggacgacttgcttcccgatttgaatcctgtggagcagttcttccagggcaacttccctggcagcgtgcagagggagagacaccacagcatgctccagttccaggtcccctcgtcctccctggccaggatcttccagctgctcatttcccacaaggacagcctgctcatcgaggagtactcagtcacccagaccacgctggaccaggcaagtccacccagggtactaagtgggtactgtgcccactgtgctaacacctgacaagagtagtgggtaacgtggaaggcaggcaggatgccctcgctttaatgcagtgttagtcgctctcccttagattaaaggctgacatttcagaaatgcgtttccaacaccattttagtcatccacaaacttgactatttttgcttctttttcttcttatatttcatgcttgctgttttatggtggtagctgatttctttttctttccaagtcaactttgtcatgtgtgatttgaaaagaacaaatagacgtatttaactgtacggctcagtgaattttgacaaacatttgctttttatgtaggtatttattggtatggatgtgatgtttgtgtgcgttcatgtgtgtttgcgtgtgcatgtttgcatgtgtgcaggtacatatgaacgtgtgtgcatttgtgcatatgcatatggaggcctaaggttgacatcagagatcttcctcgattgctcttcctcctattccttgaggtagggtctctcaatcaaactcagagctttctaacaatatggatagtcttgtgagccagcttgctccagagatctcctgtctccaccttccaaggctatagttatagcttgtcgcacttaccaggcatttatgtgggtcctgagtgtctgatctctggtctccatactagcatgacaagcatttgaaatattttaatggctgagctgtctccatagctcatctttactcttctcatcttgtgtcactaaaattttaatggctgagctgtctccatagctcatctttactcttttcatcttgtgtcactaaaatgctgtcttccaaacaccacatccccactctttttttttttttcctgacagtctctggaaattaccatttcactttatttttgaagatgttgttatgtgtaatccaggaccatacgtaagcctgcttcagcttccctagtgctgggatgacatgtgctaacatgtctggcttcatctactttctttctataaaattgtctatcatctatctgtctgtctgtctgtctatccatctatcaatcctatctatctatctatctatctatctatctatctatctatctatctatctatctatggatatatagacacacacacacacacacacacacacattcctaaacatataaatacaaccttgtagtggtacttacatgtgtatgtttttgtccaactccctcggcattcctagtatagttctttgtgtagggttggggccaccagagctcccccatgattcacattagcacatctattggtgtcttccttgatcagatccttctgttgtctatgaacctgactactctaggctcttcatgtaagtgaatagtaattgtcattttgggtctgatgtaaggacccaaggcttcatgtccacactgtatcgtgactgaggaatagccacttcgatccacattttacttatctattcattcatcagcgagcatttgagtttttcctgggttgttgggggattggccctttttaaatttcttttgttgttgttgatgttttgttttgtttttggtcaacatccttaaagactgtttggtaaaacaaaggaactaagcgagtgttgacctctagagaagctctcgccacccttagagaagtgacagtcacacaggactcctgcaggagttctggccacactgcttgtagaacaaagaacacagcagagagcagttgcctttactcggttgtttttagagagcctggaccctggcagcttccttagttatcccaatttctccagtccattgccctttgaagcctcctgcaagctcttaggctcaggcgtctaagaagcaagccgtgtccagggcacaactgtggagacctgcgacaggccatagaaggcgacaagccacagcagcctggctggctgtcaactatggggaatgcagagcaaaacacataggtgttgtgggggggggggggtctcatctttctggagacggctgcttacttttctcttgcctgcaggtgtttgtaaacttcgctaaacagcagactgagacctatgacctccctctgcacccccgggctgctggagccagctggcaagccaaggtatcctactgctctctcctaaccacggcttaggtagggctttagctcaggggcctcactgactaattgggcctgaggtgctcctgggctcaggtgaggctctgcagagagcccacccagctcatacccacaatcctccttgcctgggcccaggggttctctagtaggagctcatctcagttgaacacttgacccagtagctgagtggctccccaccgtcatccgaaagccatttggatggtgtgggtgaatcacatttaaaagcatttatctatgcatgtgtgtccaactcaagttgtcaggcttgaaggcatatgcctttatccagggataccacctcacatcattttttggaagaaactgttccacacatttttctcctaacagcataaaccccaaaaatctccaaacctcaagttttaggaataagcagggaaagaaagaatagtgagacatcttggctgttgagatattgacaacacttcttggtcacactttggagcttaaagggtccgggctgggatactgtgcttcagtggtggacgtgtctgcttaaagccaatgactggaaggtggattctttgttcttcacggaagtatcaagatgggaaaggaagaagtgatagaaagggatagaaggtacaggttgtggcccaagataaagcctggggtggacttcctgtactgccctgggcacagtgcccacactgggagacagtcattgcccagtttcccaggtggaaagaatgctggagaaagtagtggggttgatgccagcagccagatggccaggcttattagtgagacttcacaaggacaagtcaaccattttgtctggactactgaacagcaaatcaaatcaaatcaaagtactttaaaaaaaatagatgtggaaaaaaaaccttatttcccactcctcccaaccaatttcttgattgcaagaaaagtccaatgcggccgaagagaaaagcacatctttccaagggcatgcttctaaaagatgtgtcaccaccccatggccactgggcaaggtcgactttgtctctgtcaccctccagagggcccggaatgcctggccaaccttcgaactgttgtctctcatttctctatcttacaattgctgttgataccggttgaaaagttattctctgagagtcacttacagtcacgagtcctttttataacagagaatacaaaattatttctaagaactgccagtgatccctaccccataccacagcatactgtttgtttgtttgtttgtttgtttattgtttgtttgttgactgtatctcattgtatagtccaggctggctccaaggtcatggtctttctgcctcagcctcctgagggctgggattacaaatgtttgctaccttagccaacagtgcagtccctcctacagggctaacacctgacaacctctggagcaggttggagtgctcatggcctgagatgtggacgggtcagttccaaccttttcccccttgtcagctgtgatcatgttattactgtgtttgtcactttgtttcttaccaatgtctaagaacctactataacacgtcagttaaattttcattttataatgaatattctattcaaaatctaatgctgacctaatgacatactatcttcataaaagttcacagaaatcctttacatggaatgctatatacgtctgtcataaaacagataggaattaagttcttacctacagtccagtacttaagataatttcccttaaagtactctgagcacaagtaacaggtgaattatctcaagggcctctagagaacacacacccccacccccaccccttgctcaagcaggaaagccagcttctggaggttacgcaggctgatggcttcagagctcctggttttgagcacagactgaagtgatgtttcattgtctggaaatctgcttctcggggatgttttgagactctccaacaagacctgaccttaggaaatgtctctgggtatttggctttatacactcttagcctgttttatggaaacagttgagtgtcaagatcttgctggaattgacaagtgaggatctattaacctagaaatctgctaaacaagccaatcatggtacacccatcatattggctttagacaatcaggagcaactcagaacaaagattcttattttcatacacagaggttttccccacaccatgtttagcctgttgtcagactcctatgtgtttaaaggacctgcagcctcgagatccttgtagaaacctggtcttcatctggatttggctttctttgcaatcaagaaattggtttggaggaacaggaattctatgggaaataaggttttaatatctgttctttttgaaaacggacctcggagtctgtttcatccctacatgcaattgttggcttcttcctggcggtcgtggcacacacctttaatcctagtgcccaggaggcagaggggggagggggaggacttctgtgggtttgagcccagcctggtctattagagcaagtttcaagatagccaaggctacacagagaaagcctgtctctgggtggaggtgggggtcaggttggtggtgtggatccattaaagtttgtgtgtttaaactagataattggacaaaccacattttgcatagactggaaagacccacctccaaccctcttctcccccaccaccctgccccaagctgatattggatcaggaaggtaacctataatttatgattaggaattatatgtctctagctaggaatctagttagaaaaatgtccatttatccaggtttagtgcacaagtttgatctagatacattatcatgaatgccagttgaatctctcctcatgatctatatctatatctacatctacatttatatatcctagtcaaatgatccttctttgaaggagccagctctggacaaactaggcaaagtctagactcagggatgaactcaaaatataatttattggcttttaagccagcaaggtaatggtaactttttcaagttaaaaacccacccagaagccgggcagtggtggcccatgcttttaatcccagcacttgggaggcagaagcaggtggatttctgtgttcgaggccagcctggtctacaaagtgagttccaggacagctagggctacacaggggaaaaaaaaccaaaaaacaaccaaccaaacaaaaaaaaaccacccaaggctggaggtttaggtcaatggtagaagcccttgactaatacaagggcctaggtttggggcccagcatgggagtagggaaggtggtctccaaacatccattggaaagagtaccaagggtatagatataaacacacacacaggcatgtaagtctctgtacaaatccatgggtcttagattcacagataagaaatcagggcagcctactcaatgttctgattccagttccttcagctgagctccctccagaagctgccattcttttaaacctgaaagtttattgctccatggacccagggtgacacgtgtccaagtggtctcccataggtcttattgccttccacgttgctttttccatgtagcttgaagagaaatccggacggctgcagacacaggagcctttgcccgcaggatctgaacaactggctaacggaagcaaccccacggcagcagaagataagcacaccaggagtccacagtgagctggaggagactctttcagaaagaaaccaaaattcactggctcaccggaactcctgatggcaaaactgacctatcagaatggtcacctgtttatccagaacccctgactggtggctttggccttagcgatactttcattctgagtggatctgcttttgtggagtgggaagggtatggatgtgtgggtgttatttgaggggagaaataaaaaacagtctcctgattaatcccctgctcattagtgctcagactctggtactgtttccagctttgtcagagggctgagcctctgtgagagtcattgacacagccatacagcgtggcaaaaatcctgccacagtggggaatgggctcgtcgtaataatatgcatcaaagtcttcatagggttgggctaaggaaaacacccacctggtaatgcatgaaagcactagccacaggtgatgcctatccacagatattttctgtatgtaagtttgacattttttttaacatggcgtgtttgagtacaattaggacaggaggtgaagggacgtgaatgagcagcgatgagtcttggtggattattacacgcaccaggtccctgtgaagaagccaaggcctcctctgttcaccactctagtggcagtgcgaatcaggaagaacagagtctaagaacaaggcaactaaagtcctatgcaatagctaactttattcagagcatcagacattttatactcggaggataagaagagtcacctgaaccacatttcctatatccattcttgggttgagggacatctgggttgtttccagtttctggctattacaaataaggctgctatgaacttagtggcgcatgtgtccttaagtgatatggtggagcatcttttgggtatatgcccaagagtggtatagctgggtcttcatataatactatttccaattttctgagacactgtcatttctgagacaccgagacactgtctgagacattgacttttagagtggttgtaccagcttgcaacctgcaagcaattgaggagtgtttccctttcttcgcatctgctgtgccttgagtttttgatcttagccattctgattggcataagatggaatcttagactgttttgatctgcatttccctgttgactaaggacttgcatggtatgtgctcatcaataactgtatattagctataagtacagaaagctatgatacaccccacaaacccaaagaagttagacaagagggaaggaccaagcaaggatgcttgaatcacatttgaaaggggaaacaaaatagccataggaagcagggtgggggggagaggggagaaggggagaggggagaggggagagtggagaggggagaggggagaggggagaggggagaggggagagggagggaatggggagacaggatcaggtaagggaagaggcaggagagaggcccagagggccctatgaaatgggaatctgcagctgctggggtagggctgggagaggggagaatctctaggaagtcccagagacctgggacaggggaggctcccaggagtcaaagcagatgaccttagccatgatgcctgacagtgaggacatggaacctgaagaggccactcctgtagccaggcaggaccctcaggggaggtgtaaggacaccaacccactaaaaatttgccctgtctaaaagaaatgcagggatggagcagagacagaaggaaaggccatccaataactggtccaactcaaaactcaaactcattccatgggcaagcaccaatccctgacattattaatgaaactctgttatgcttgcagacaggagcctaacataactgtccttggggaggctctacctatctgaaacagatgcagacacccacagccaaacattagatggaagtcggagacacttttggaagagttaggagaactaaaggtcctgaaggggatgggaagcccacagaaagaccaacagaatcaacaaacttgtacccctgagagctctcagagtctgagccgccaaccaacaaacatacacaggctagaactagaccccatcccccaccccactacagaaacacatatgtagcagacaagcagcttagtctgccctgtctggcctcagtgggagaggatgcacctaatgtgacagagacttaattgatgtgccagggatgggggtgggggtgggggtccctaggggtgatcccaccctctcagaggagagggggagtggggtgggagggagggagggactctgtgagggaggggacctggaggagaaacagcatttggggtgtaaataaataaattaattaattaaaaaaaaaagatttaaaagaaggaagaagaggaggaggaggagtcacctgaataaagtgtataatcacaaggacaagccacacatggcaaaaacatgtttttcccttgaggcttataaacaagtaatgacagccaattgtaatgtgacgtgaactgtgagctcactcctatcccctatgcctgtgaggggcataaaagcacagcccaagagcaagccaccttatgggggaacagggatcacacgctcttgtcttgtttccttggagttttctcactagggctcagaaccctcttcacagagcttccctcatgggcgagctctgatgcccctctctggtgtaacgagtgcatttgttgcagggggtatcagaagacagtgccgcacatggcttcaagcagttcacacttaccaagagcttaccaagaactagaagctaaatagttttaacccaaacaatttccatcgatggagtaaagatggggaacagatatcttttccaaggtagtctcccccgtcaggcctacagatggcctttgtcaaataaaccctctccccagtggcacttctcaggccaaccatggtatggctgttctccagagtcccggatgcctagtgggagaggaacacaggggccgaggcccagcaactgctgctgtcgagggaacatgggaaagtgggacacgtgtgctaaagcctttagttcagccttgctggaggcagcttagcaactgtgacgtgggagagatgggaagggcaagggtgggacaggagtagtcatctaccaagagttcggaaaagcatggagtccgtcctcttctcccacgtgggtctgtcccacgggtcaaatctgggtcatgaatcaggcttggaggtgagcacccagaagccgtcccaagggacttgtaaatgcttttttttttttaagttaggaaactaagatatttatttcttggacctatttacagagcctgggacagaaataagtaataagaatgtccttaagagccatgtcaccctagtgtggacagcaggttactcatgtcctcacatgggtagccccccttatccttctgtaaacctcccacactgtttaatttctagccccactgagactatacaacaattaaaacagcattacaaccaaatgcctgggaaatacagaagggagcagcctgcagcccgtcagtccttcctccctccctgcttctaggagagaaagtcaaagtcagctcatctgggtctcataaagagcctggaagctctttctcttcacgcagtggcacaagaccttgcagatccaccttctgagtgaattctgaaggagaccccatgctaaccaagaggagattcaaatgcatcatccaaagtagagttcgatttgtcaacatcttgaacagctctttgtccatgtgatcaggaatgccgacttgtggccaaatggcctaatattgggggcaggggtggtggtgataatcctgcatgaacttggctcaagttcatcactgtgaggggctgggagaccttggggctcctatccaagattctataggcctgtgagtggttcacagctataacatcaacagaatcaacagggatcctggaggatccagaagctcgcttggagaatcttgtcccttgtggtgtagatggaggagctaaaagcttggatgggaaaaagcatggggaccctgggtgcacctttgtgtaaggacagctgttgtggcctctgctcacccaactcctgaggggtcccgaaccggaaagcctctgggttgaagcgggcttcccctgatccagtgtaggtcccagggatcagctcctgcctaagacaggaggtgagcactaggtggtccatagctctaggatccccttgctgtttccacagctcatagttctcaggctgcaggagcccttcaaagacatccatgaagaagctcaccctggcgtcctcacagctgcactgagatgccacctttccgtagtggatccacctcggggtggtgaaattgatggcctctgcacagttgaagccatggttgaagcctgcgtggtagccatagggaaaggtgaccatgaactccccagcctcctgggtgatgcggctaaaggggatgccattctccttgagcacagtgggtgagatgagcgccaccttgtgcctcaggaaggcctggcagccctgggaatttccagggaagagttccctggctaggcgctccaggcgcctaccatgctcagggggcacagcataccaggtcttgggctgcccaaagtgcaggtagttgagactgtacaggtccatgtcctccgtgtgtcacgcaaaggtggtcttccacttgccaaagtacaggtagggcgtattgacgccctcaatcactatatcacggtcctgctttaacacatccaaaaggcttcccaggtggcccacgttccaaaggtgagtgttctcatcaaacagggagccgctgacgtcagcaccataaatcggtgacccaaacaggcgattcttccagtattttctctccaaatcttcaaaatccaggtgtttttcgctgttggccagctcacgatactcccccactgtcatgcctttcgtcctcttatggtattgggtgaacacgcttgccttcccagagaccacttgctgcagaggagcgggaattgccatagccgggacatcctcataagatcgcctgcctttccactctgtgggtgagatgaccttagccggtccagctagatgtgccccttgggactccatgtaggcaatgtatttgctgaagcctgagaattcttccatgtttgggcagaaggtcatgatggtacagcctgggttctgggacccatcctgctgggacggggggggtggggggtgggggggtgggggggggtggggagttgtcatggttacagcaattcaggagctcagcctggggtcctggctgccctggggctttgggcttttcggggtggggtggggaatcattctgtctctctctgtgtaagttgttcctgccttcttgttggattttcttcactctcttacttgtccttaagctctttcttttatgccttcatgcctctactagatctcttttcctaatgcgttggtttcccaacaccagtggaatggagatctgggagaagacaatccagcattggagagcagctttctcctgtgggacttgctcttcctgtgagcctggaacccaatggcttcttcttttatagacgggaagatctgaggcaatgagtgcttgcccacccactggagtctcaacctattactgcctctcagctgacttagcccagcccagattcctttgaatgtaagcaatcccgacgtgaaacagtgaaacataccaaactagaaagaatgctataatagcaatattttggggggggggtgttctctgtatagccctggctgtcctggaactcactctgtagaccaggctggcctcgaactcagaaatccacctgcctctgcctcccgagtgttgggattaaaggcattctaacaccaactgctcatagaatctataagaatgtcttagaattcctcaaagctatggaagcacatggcagagcatgagagaagtgagacacagaggacatgtctgtgctcttgctgggcgtatatactctgtctttgcaccactacctctaaacctgatatagacaagaaaatggcagggtcctcaagttctgaacaactaaacaatgataattatttaaccagaaactagcacaaaacacaggaatgtgaacgcctttttgctgggcactgggttacacacctttaatcccactttggaggcagaggcaggaggaactacggatttgagaacagcatggtctacagatccagttccaggacagtcaggattacaaggataaaccctattttaaaaaaatggggtgggggcaatacctttttatatacataaaattttttcacacttttatcagtattgagatacaaaaaattttaaagtcatagaaccagtattgagcacaggtttgcccacggtgaagcaaatggaaagatcatactaaaaatatacaagtaaacagagctggctggcacacgcctttaatcccagcattctggaggcagagacagcagagggagaggagaggcagagagggagagagagagagagagagagagagagagagagaccttgtaaactcttgagtgatgaatttttccacttccctcatgcctctactagatcacaagatataaatcttgaatctttactcgtctttgtatgttctgttatttatgttctttcctgatgttttactgcgtattagattttcaataaatactaagtgagcagcatgaaagtgttaatgtgggaaagtgcataattggttggacacagtacaaagggaaattatgagttcagctacttagaattttaggatggcaatagtggagcatcagtttcaatacaggaccttctcaggatgcaggcctgtgcatctccacagctgcacactcctaaagccccactcagtggctgactttgacctcataacacagaagcacctgggtgtttaaaaggacaggttgtggggagactgataccatgtgatgaccagtcattctattcctagaaatgggtatgttttgttgcatggttgcacacataaatgcatttctcaggctcagtggctaagagcactggctgctcttccagatgttttgagttcaattcccaacaaccacatgctggctcacaaccgtctgtagtaagagatttgattccctcttctgatgttcatgagacagaacactcatatacataagataaataaataaataaataaataaatctttaaaaataagagctgcatttctcaagcttgcactaagtgttctccatagctgaacagtgaagagatgcatgcaaagtccaagcagaagaacaactcaagtctactttctcagctctgtaatctagtagcccagcttcaaccataaacatcctgaatgactcagcatgccagaacacagctggaaggactctgggtccctgagtggtgtgatgtatatggaacaggcatgcttatgagaggccaatctttggttcagacgccatcttagagaacctgacataaggttgaacttgagttaaccaacagctggcaccaagcacctgtttccaggctactccccaacaaacctacatctgacatcagtttccaggttacaagcctgaccctggcactccacttcctaacaaccaccaatctggaggaaagcagaagttaagtttatggtttgccttccagcaccaactaattacattaaagggcaacaaaattccataatggccccccaatcagatgtgtgctaatttagaaattcccttgcttgcttgacattgctgataaaacctggtcctgctgagagcttggggcttcaccctcctgttctgctatatcagagatggtggtgtggcccaaatttgtaataaagatcctagtgcaattgaattgcatcgaaattggctcctcggtggtcttttggggttcacaaaacgcacacaacactcagaaacagcacacctcagagtggtggcccaaatcagtgagggttccctagcaatagctttgttgacagagaatatgacaaaaacatctatttcattcactcagcagtgagatacatgacactagaccagtggatctcaacctgtggcctgtgacctctttaggggtcaaatatcagatatctcgcatatcaaatattcacactatggttcataacagcagcaaacttacaggtatgaaatagcaacccacaaaaatgttatggttgggggtcaccacagcgtgaggaactgtatgttaaagggttgcagcgttaggaaggttgagaaccattggtgtagctgaagctgaagctggaacgtgcctgcagatccttgtgtgtgaacatcaatagataaagggttagctccaaagaaggtgcttagctccgtaagggagcaaaccatgcctaggtatgacctcacctgttccctcccaagaaactcaaacatctaaagttaaattaaactagtcttgtgccaaattaacccaataagacaatagagtcttcaaatgagtggctgaaacctggttaatcacaagttctctgccaaccacagactacaaactgagggaatgtgtccaattaatggacataccaaactgtatgccaccaggctatttctctttcagcagcattttcttttcttttttaaaattatttttattaggtattttcttcatttacatttcaaatgctatcccaaaagtcccccatacacccccccactcccctacccacccactcccacttcttggccttggtgttcctctgtactgaggcatataaagtttgcaagaccaaggggcctctcttcccaatgatggccgactaggccgtcttctgctacatatgcagctagagacacgagctccaggggtactggttagttcatattgttgttccacctatagggttgcagacccctttagctccttgggtactttctctagctcctccattgggggccctgtgttccatccaataattgactgtgagtatccacttctatgtttgccaggtaccggcatagcctcacaagagacagctatatcagggtcctttcagcaaaatcttgctggcatatgcaatggtgtcaacgtttggtggctgattatgggatggatccccaggtggggtgtggcagtctctagatggtccattgtttcgtctcagctccaaactttgtctctgtaactccttccatgggttcagtggcattttctaacagtgtggtagtgttctcgggatcacctgtaccggctgactcatcagtcttttgtctgctcaattaactcctgttgagtgtgtctttttcttcctaagagaacggagtctggagtgggatctcgggtagaattgcaggggtgctaatgatggaggagagctgctggaccagggcccactgcatccctggcctctcccagtgattagaggccaggggtgagttcactcttggattctgaaccccacaagcctgtgttttgagctgttttgatttaagcgcccttagagtagactgggtctagaatgaactacattccatatctaattggatcagatccagttagaaatctcagctatgtatatcttgataatgggtttatttaatcagagctatcatccgggattccagataacttaatctgtaagaattttagacctaaacttgctgggaagtggtggcacacgcctttaatcccagcacttgggaagcagaggcaaggggattttttttagttcacggccagcctgctctacagagtgagttccaggatggccagggctacacagagaaaccctgtctcgaaaaaaaaaaaaagaaaaagaaaaagaaaagcaaagaaaaagaaaaaggaaaaggaaaagaaaaaaaaagaaaaagaaaaagaaaaaatgtcttgttcttaatagagattgagttgcactgatgttatcataatggtccaggtgtggtggtgcacacctttaatccctgcattgcagaggtagaggcaaactgatctctgtgagttccaggacacccagggttacatagaagagaccctgttccaacaaacaaacaaacaaacaaacaaatcatcataatggagacattttaatttgataaaactggctacttaagtgaaacattagcaaaaaagtggatcaaagaatccacaaagacaaggtgcattttagttggtatacagagatagctaaaagattaaatggatcaattccctccctgccgcacaccctctggggtccctttgtctgagtggaacgagtctctggggcaggtgggcaaggtgttggatggtgacagacagatcaacacgcggatgccttgcccacctgccccagagactcgttccactcagacaaagggaccccagagggttctgcagcacctccccagcagaaaaccaaatcttaagcagcaaacagaggacgttatacaggttgacaaccttgattacatcacagtactcattctgtcagtcgctccccacactggcctttctgctcaccatctttccactcggaagatgataaaaagaagagctagcaaatgccatacaacgtgagaccctccagtcagccacctggcacaaccacttttactctgtagtctaaaactgagcaaaaactgtaagttcaatcttaaaagttttcttaataagattggtcaggctgacaggatagctcggtgtaaaaggtgccaagccggaaggcttgaatttgattcctggcactcacacgatgtaaggagattttatatctgtcctctgacctacatgagtgcagtgaggtcaaagaacaacctgcggaagttggttctctccttccatctcttggatctcgcattagtgcagagctgaccaagcaggctgccagctattggctaccaggcatctatgtgtcaccacctccccaacactgggattatgagagcatgagccaccatgcctggcttcttgacatgggttctagagatgaaactcagatctttctgctccaatagcagacatgttaccaactgatctctttccccagcccaaatgtgggaatcttagctgagtattttgagaggactctttaaaaaaaaatctaaaaggctgaccatattacatctctccacctacaacagttataggggccaagaccaaaaggaccttcttgtctacagtgaggtcctaagaaaagatctttttcttttctttctctctttctctctttctctctttctctctttctctctttctttctttctttctttctttctttctttctttctttctttctttctctctctctctctctccctctctctctttctttccttccttccttctttttttctttctttctctctttctttctttctttctttcacacacacacacacacacacacacacacacacacacacacacacaaacacaaacacacagatcccttcactgcaaacaatcaggaagatggaagactgcttttatgagtctaccaatgagccccctccttctgggactatgtactgttgtccccttccactagggggagcccacgagacaatcagcatccagagaactcagggattctctgctgacttgttccccataatattttcaaataagcatagaaagacaaaagttaaaataaatgggttcgtatggggggcgtctcctgcaaaatcctggtgaagacagaaaacattttatctactctaaactcattctactaagttaacaagtttctcagatcatttctgtggcagagaggtcaaatcaagtgtgcggggagagtcctttggctgaaccagcccaattggggtcatgcacagaaaatcacatgttacattctataatactgttcctgtaaacttgttagaatgagatgtacgtcctgaggcaaaggggcacacacaattctcctcagctaaagaaataatctgcgtttttccagttctcttaaaccacattaatgtttctctaatggcagaaatcaatagatcaaaaatgatatcccaagctttctgaaagccttaaatgggaatcttcccgagttgatacagaaaaggttaaaagtctggggcctccatttgtttggaatccaaatggattgttttaaacctttgcctataaccctctgatctccattaaagtctaaagaaatattaagaatctccgctgtcgataaaacaagtaactaaataaagacttaaacatccacataccagtgcttagacctctgagtcttaccatttgaaaaataatagatgactttaaatgtctagccaagatttatcagtaattaataaaattgtca

SEQ ID NO: 4 - DNA, 159602 bp, Mus musculus
tgacaattttattaattactgataaatcttggctagacatttaaagtcatctattatttttcaaatggtaagactcagaggtctaagcactggtatgtggatgtttaagtctttatttagttacttgttttatcgacagcggagattcttaatatttctttagactttaatggagatcagagggttataggcaaaggtttaaaacaatccatttggattccaaacaaatggaggccccagacttttaaccttttctgtatcaactcgggaagattcccatttaaggctttcagaaagcttgggatatcatttttgatctattgatttctgccattagagaaacattaatgtggtttaagagaactggaaaaacgcagattatttctttagctgaggagaattgtgtgtgcccctttgcctcaggacgtacatctcattctaacaagtttacaggaacagtattatagaatgtaacatgtgattttctgtgcatgaccccaattgggctggttcagccaaaggactctccccgcacacttgatttgacctctctgccacagaaatgatctgagaaacttgttaacttagtagaatgagtttagagtagataaaatgttttctgtcttcaccaggattttgcaggagacgccccccatacgaacccatttattttaacttttgtctttctatgcttatttgaaaatattatggggaacaagtcagcagagaatccctgagttctctggatgctgattgtctcgtgggctccccctagtggaaggggacaacagtacatagtcccagaaggagggggctcattggtagactcataaaagcagtcttccatcttcctgattgtttgcagtgaagggatctgtgtgtttgtgtttgtgtgtgtgtgtgtgtgtgtgtgtgtgtgtgtgtgtgtgtgtgtgaaagaaagaaagaaagaaagagagaaagaaagaaaaaaagaaggaaggaaggaaagaaagagagagagggagagagagagagagagaaagaaagaaagaaagaaagaaagaaagaaagaaagaaagaaagaaagagagaaagagagaaagagagaaagagagaaagagagaaagaaaagaaaaagatcttttcttaggacctcactgtagacaagaaggtccttttggtcttggcccctataactgttgtaggtggagagatgtaatatggtcagccttttagatttttttttaaagagtcctctcaaaatactcagctaagattcccacatttgggctggggaaagagatcagttggtaacatgtctgctattggagcagaaagatctgagtttcatctctagaacccatgtcaagaagccaggcatggtggctcatgctctcataatcccagtgttggggaggtggtgacacatagatgcctggtagccaatagctggcagcctgcttggtcagctctgcactaatgcgagatccaagagatggaaggagagaaccaacttccgcaggttgttctttgacctcactgcactcatgtaggtcagaggacagatataaaatctccttacatcgtgtgagtgccaggaatcaaattcaagccttccggcttggcaccttttacaccgagctatcctgtcagcctgaccaatcttattaagaaaacttttaagattgaacttacagtttttgctcagttttagactacagagtaaaagtggttgtgccaggtggctgactggagggtctcacgttgtatggcatttgctagctcttctttttatcatcttccgagtggaaagatggtgagcagaaaggccagtgtggggagcgactgacagaatgagtactgtgatgtaatcaaggttgtcaacctgtataacgtcctctgtttgctgcttaagatttggttttctgctggggaggtgctgcagaaccctctggggtccctttgtctgagtggaacgagtctctggggcaggtgggcaaggcatccgcgtgttgatctgtctgtcaccatccaacaccttgcccacctgccccagagactcgttccactcagacaaagggaccccagagggtgtgcggcagggagggaattgatccatttaatcttttagctatctctgtataccaactaaaatgcaccttgtctttgtggattctttgatccacttttttgctaatgtttcacttaagtagccagttttatcaaattaaaatgtctccattatgatgatttgtttgtttgtttgtttgtttgttggaacagggtctcttctatgtaaccctgggtgtcctggaactcacagagatcagtttgcctctacctctgcaatgcagggattaaaggtgtgcaccaccacacctggaccattatgataacatcagtgcaactcaatctctattaagaacaagacattttttctttttctttttctttttttttcttttccttttcctttttctttttctttgcttttctttttctttttctttttttttttttcgagacagggtttctctgtgtagccctggccatcctggaactcactctgtagagcaggctggccgtgaactaaaaaaaatccccttgcctctgcttcccaagtgctgggattaaaggcgtgtgccaccacttcccagcaagtttaggtctaaaattcttacagattaagttatctggaatcccggatgatagctctgattaaataaacccattatcaagatatacatagctgagatttctaactggatctgatccaattagatatggaatgtagttcattctagacccagtctactctaagggcgcttaaatcaaaacagctcaaaacacaggcttgtggggttcagaatccaagagtgaactcacccctggcctctaatcactgggagaggccagggatgcagtgggccctggtccagcagctctcctccatcattagcacccctgcaattctacccgagatcccactccagactccgttctcttaggaagaaaaagacacactcaacaggagttaattgagcagacaaaagactgatgagtcagccggtacaggtgatcccgagaacactaccacactgttagaaaatgccactgaacccatggaaggagttacagagacaaagtttggagctgagacgaaacaatggaccatctagagactgccacaccccacctggggatccatcccataatcagccaccaaacgttgacaccattgcatatgccagcaagattttgctgaaaggaccctgatatagctgtctcttgtgaggctatgccggtacctggcaaacatagaagtggatactcacagtcaattattggatggaacacagggcccccaatggaggagctagagaaagtacccaaggagctaaaggggtctgcaaccctataggtggaacaacaatatgaactaaccagtacccctggagctcgtgtctctagctgcatatgtagcagaagacggcctagtcggccatcattgggaagagaggccccttggtcttgcaaactttatatgcctcagtacagaggaacaccaaggccaagaagtgggagtgggtgggtaggggagtgggggggtgtatgggggacttttgggatagcatttgaaatgtaaatgaagaaaatacctaataaaaataattttaaaaaagaaaagaaaatgctgctgaaagagaaatagcctggtggcatacagtttggtatgtccattaattggacacattccctcagtttgtagtctgtggttggcagagaacttgtgattaaccaggtttcagccactcatttgaagactctattgtcttattgggttaatttggcacaagactagtttaatttaactttagatgtttgagtttcttgggagggaacaggtgaggtcatacctaggcatggtttgctcccttacggagctaagcaccttctttggagctaaccctttatctattgatgttcacacacaaggatctgcaggcacgttccagcttcagcttcagctacaccaatggttctcaaccttcctaacgctgcaaccctttaacatacagttcctcacgctgtggtgacccccaaccataacatttttgtgggttgctatttcatacctgtaagtttgctgctgttatgaaccatagtgtgaatatttgatatgcgagatatctgatatttgacccctaaagaggtcacaggccacaggttgagatccactggtctagtgtcatgtatctcactgctgagtgaatgaaatagatgtttttgtcatattctctgtcaacaaagctattgctagggaaccctcactgatttgggccaccactctgaggtgtgctgtttctgagtgttgtgtgcgttttgtgaaccccaaaagaccaccgaggagccaatttcgatgcaattcaattgcactaggatctttattacaaatttgggccacaccaccatctctgatatagcagaacaggagggtgaagccccaagctctcagcaggaccaggttttatcagcaatgtcaagcaagcaagggaatttctaaattagcacacatctgattggggggccattatggaattttgttgccctttaatgtaattagttggtgctggaaggcaaaccataaacttaacttctgctttcctccagattggtggttgttaggaagtggagtgccagggtcaggcttgtaacctggaaactgatgtcagatgtaggtttgttggggagtagcctggaaacaggtgcttggtgccagctgttggttaactcaagttcaaccttatgtcaggttctctaagatggcgtctgaaccaaagattggcctctcataagcatgcctgttccatatacatcacaccactcagggacccagagtccttccagctgtgttctggcatgctgagtcattcaggatgtttatggttgaagctgggctactagattacagagctgagaaagtagacttgagttgttcttctgcttggactttgcatgcatctcttcactgttcagctatggagaacacttagtgcaagcttgagaaatgcagctcttatttttaaagatttatttatttatttatttatttatcttatgtatatgagtgttctgtctcatgaacatcagaagagggaatcaaatctcttactacagacggttgtgagccagcatgtggttgttgggaattgaactcaaaacatctggaagagcagccagtgctcttagccactgagcctgagaaatgcatttatgtgtgcaaccatgcaacaaaacatacccatttctaggaatagaatgactggtcatcacatggtatcagtctccccacaacctgtccttttaaacacccaggtgcttctgtgttatgaggtcaaagtcagccactgagtggggctttaggagtgtgcagctgtggagatgcacaggcctgcatcctgagaaggtcctgtattgaaactgatgctccactattgccatcctaaaattctaagtagctgaactcataatttccctttgtactgtgtccaaccaattatgcactttcccacattaacactttcatgctgctcacttagtatttattgaaaatctaatacgcagtaaaacatcaggaaagaacataaataacagaacatacaaagacgagtaaagattcaagatttatatcttgtgatctagtagaggcatgagggaagtggaaaaattcatcactcaagagtttacaaggtctctctctctctctctctctctctctctctctccctctctgcctctcctctccctctgctgtctctgcctccagaatgctgggattaaaggcgtgtgccagccagctctgtttacttgtatatttttagtatgatctttccatttgcttcaccgtgggcaaacctgtgctcaatactggttctatgactttaaaattttttgtatctcaatactgataaaagtgtgaaaaaattttatgtatataaaaaggtattgcccccaccccatttttttaaaatagggtttatccttgtaatcctgactgtcctggaactggatctgtagaccatgctgttctcaaatccgtagttcctcctgcctctgcctccaaagtgggattaaaggtgtgtaacccagtgcccagcaaaaaggcgttcacattcctgtgttttgtgctagtttctggttaaataattatcattgtttagttgttcagaacttgaggaccctgccattttcttgtctatatcaggtttagaggtagtggtgcaaagacagagtatatacgcccagcaagagcacagacatgtcctctgtgtctcacttctctcatgctctgccatgtgcttccatagctttgaggaattctaagacattcttatagattctatgagcagttggtgttagaatgcctttaatcccaacactcgggaggcagaggcaggtggatttctgagttcgaggccagcctggtctacagagtgagttccaggacagccagggctatacagagaacaccccccccccaaaatattgctattatagcattctttctagtttggtatgtttcactgtttcacgtcgggattgcttacattcaaaggaatctgggctgggctaagtcagctgagaggcagtaataggttgagactccagtgggtgggcaagcactcattgcctcagatcttcccgtctataaaagaagaagccattgggttccaggctcacaggaagagcaagtcccacaggagaaagctgctctccaatgctggattgtcttctcccagatctccattccactggtgttgggaaaccaacgcattaggaaaagagatctagtagaggcatgaaggcataaaagaaagagcttaaggacaagtaagagagtgaagaaaatccaacaagaaggcaggaacaacttacacagagagagacagaatgattccccaccccaccccgaaaagcccaaagccccagggcagccaggaccccaggctgagctcctgaattgctgtaaccatgacaactccccacccccccccacccccccaccccccaccccccccgtcccagcaggatgggtcccagaacccaggctgtaccatcatgaccttctgcccaaacatggaagaattctcaggcttcagcaaatacattgcctacatggagtcccaaggggcacatctagctggaccggctaaggtcatctcacccacagagtggaaaggcaggcgatcttatgaggatgtcccggctatggcaattcccgctcctctgcagcaagtggtctctgggaaggcaagcgtgttcacccaataccataagaggacgaaaggcatgacagtgggggagtatcgtgagctggccaacagcgaaaaacacctggattttgaagatttggagagaaaatactggaagaatcgcctgtttgggtcaccgatttatggtgctgacgtcagcggctccctgtttgatgagaacactcacctttggaacgtgggccacctgggaagccttttggatgtgttaaagcaggaccgtgatatagtgattgagggcgtcaatacgccctacctgtactttggcaagtggaagaccacctttgcgtgacacacggaggacatggacctgtacagtctcaactacctgcactttgggcagcccaagacctggtatgctgtgccccctgagcatggtaggcgcctggagcgcctagccagggaactcttccctggaaattcccagggctgccaggccttcctgaggcacaaggtggcgctcatctcacccactgtgctcaaggagaatggcatcccctttagccgcatcacccaggaggctggggagttcatggtcacctttccctatggctaccacgcaggcttcaaccatggcttcaactgtgcagaggccatcaatttcaccaccccgaggtggatccactacggaaaggtggcatctcagtgcagctgtgaggacgccagggtgagcttcttcatggatgtctttgaagggctcctgcagcctgagaactatgagctgtggaaacagcaaggggatcctagagctatggaccacctagtgctcacctcctgtcttaggcaggagctgatccctgggacctacactggatcaggggaagcccgcttcaacccagaggctttccggttcgggacccctcaggagttgggtgagcagaggccacaacagctgtccttacacaaaggtgcacccagggtccccatgctttttcccatccaagcttttagctcctccatctacaccacaagggacaagattctccaagcgagcttctggatcctccaggatccctgttgattctgttgatgttatagctgtgaaccactcacaggcctatagaatcttggataggagccccaaggtctcccagcccctcacagtgatgaacttgagccaagttcatgcaggattatcaccaccacccctgcccccaatattaggccatttggccacaagtcggcattcctgatcacatggacaaagagctgttcaagatgttgacaaatcgaactctactttggatgatgcatttgaatctcctcttggttagcatggggtctccttcagaattcactcagaaggtggatctgcaaggtcttgtgccactgcgtgaagagaaagagcttccaggctctttatgagacccagatgagctgactttgactttctctcctagaagcagggagggaggaaggactgacgggctgcaggctgctcccttctgtatttcccaggcatttggttgtaatgctgttttaattgttgtatagtctcagtggggctagaaattaaacagtgtgggaggtttacagaaggataaggggggctacccatgtgaggacatgagtaacctgctgtccacactagggtgacatggctcttaaggacattcttattacttatttctgtcccaggctctgtaaataggtccaagaaataaatatcttagtttcctaacttaaaaaaaaaaaagcatttacaagtcccttgggacggcttctgggtgctcacctccaagcctgattcatgacccagatttgacccgtgggacagacccacgtgggagaagaggacggactccatgcttttccgaactcttggtagatgactactcctgtcccacccttgcccttcccatctctcccacgtcacagttgctaagctgcctccagcaaggctgaactaaaggctttagcacacgtgtcccactttcccatgttccctcgacagcagcagttgctgggcctcggcccctgtgttcctctcccactaggcatccgggactctggagaacagccataccatggttggcctgagaagtgccactggggagagggtttatttgacaaaggccatctgtaggcctgacgggggagactaccttggaaaagatatctgttccccatctttactccatcgatggaaattgtttgggttaaaactatttagcttctagttcttggtaagctcttggtaagtgtgaactgcttgaagccatgtgcggcactgtcttctgataccccctgcaacaaatgcactcgttacaccagagaggggcatcagagctcgcccatgagggaagctctgtgaagagggttctgagccctagtgagaaaactccaaggaaacaagacaagagcgtgtgatccctgttcccccataaggtggcttgctcttgggctgtgcttttatgcccctcacaggcataggggataggagtgagctcacagttcacgtcacattacaattggctgtcattacttgtttataagcctcaagggaaaaacatgtttttgccatgtgtggcttgtccttgtgattatacactttattcaggtgactcctcctcctcctcttcttccttcttttaaatcttttttttttaattaattaatttatttatttacaccccaaatgctgtttctcctccaggtcccctccctcacagagtccctccctccctcccaccccactccccctctcctctgagagggtgggatcacccctagggacccccacccccacccccatccctggcacatcaattaagtctctgtcacattaggtgcatcctctcccactgaggccagacagggcagactaagctgcttgtctgctacatatgtgtttctgtagtggggtgggggatggggtctagttctagcctgtgtatgtttgttggttggcggctcagactctgagagctctcaggggtacaagtttgttgattctgttggtctttctgtgggcttcccatccccttcaggacctttagttctcctaactcttccaaaagtgtctccgacttccatctaatgtttggctgtgggtgtctgcatctgtttcagataggtagagcctccccaaggacagttatgttaggctcctgtctgcaagcataacagagtttcattaataatgtcagggattggtgcttgcccatggaatgagtttgagttttgagttggaccagttattggatggcctttccttctgtctctgctccatccctgcatttcttttagacagggcaaatttttagtgggttggtgtccttacacctcccctgagggtcctgcctggctacaggagtggcctcttcaggttccatgtcctcactgtcaggcatcatggctaaggtcatctgctttgactcctgggagcctcccctgtcccaggtctctgggacttcctagagattctcccctctcccagccctaccccagcagctgcagattcccatttcatagggccctctgggcctctctcctgcctcttcccttacctgatcctgtctccccattccctccctctcccctctcccctctcccctctcccctctcccctctccactctcccctctcccctctccccttctcccctctcccccccaccctgcttcctatggctattttgtttcccctttcaaatgtgattcaagcatccttgcttggtccttccctcttgtctaacttctttgggtttgtggggtgtatcatagctttctgtacttatagctaatatacagttattgatgagcacataccatgcaagtccttagtcaacagggaaatgcagatcaaaacagtctaagattccatcttatgccaatcagaatggctaagatcaaaaactcaaggcacagcagatgcgaagaaagggaaacactcctcaattgcttgcaggttgcaagctggtacaaccactctaaaagtcaatgtctcagacagtgtctcggtgtctcagaaatgacagtgtctcagaaaattggaaatagtattatatgaagacccagctataccactcttgggcatatacccaaaagatgctccaccatatcacttaaggacacatgcgccactaagttcatagcagccttatttgtaatagccagaaactggaaacaacccagatgtccctcaacccaagaatggatataggaaatgtggttcaggtgactcttcttatcctccgagtataaaatgtctgatgctctgaataaagttagctattgcataggactttagttgccttgttcttagactctgttcttcctgattcgcactgccactagagtggtgaacagaggaggccttggcttcttcacagggacctggtgcgtgtaataatccaccaagactcatcgctgctcattcacgtcccttcacctcctgtcctaattgtactcaaacacgccatgttaaaaaaaatgtcaaacttacatacagaaaatatctgtggataggcatcacctgtggctagtgctttcatgcattaccaggtgggtgttttccttagcccaaccctatgaagactttgatgcatattattacgacgagcccattccccactgtggcaggatttttgccacgctgtatggctgtgtcaatgactctcacagaggctcagccctctgacaaagctggaaacagtaccagagtctgagcactaatgagcaggggattaatcaggagactgttttttatttctcccctcaaataacacccacacatccatacccttcccactccacaaaagcagatccactcagaatgaaagtatcgctaaggccaaagccaccagtcaggggttctggataaacaggtgaccattctgataggtcagttttgccatcaggagttccggtgagccagtgaattttggtttctttctgaaagagtctcctccagctcactgtggactcctggtgtgcttatcttctgctgccgtggggttgcttccgttagccagttgttcagatcctgcgggcaaaggctcctgtgtctgcagccgtccggatttctcttcaagctacatggaaaaagcaacgtggaaggcaataagacctatgggagaccacttggacacgtgtcaccctgggtccatggagcaataaactttcaggtttaaaagaatggcagcttctggagggagctcagctgaaggaactggaatcagaacattgagtaggctgccctgatttcttatctgtgaatctaagacccatggatttgtacagagacttacatgcctgtgtgtgtgtttatatctatacccttggtactctttccaatggatgtttggagaccaccttccctactcccatgctgggccccaaacctaggcccttgtattagtcaagggcttctaccattgacctaaacctccagccttgggtggtttttttttgtttggttggttgttttttggttttttttcccctgtgtagccctagctgtcctggaactcactttgtagaccaggctggcctcgaacacagaaatccacctgcttctgcctcccaagtgctgggattaaaagcatgggccaccactgcccggcttctgggtgggtttttaacttgaaaaagttaccattaccttgctggcttaaaagccaataaattatattttgagttcatccctgagtctagactttgcctagtttgtccagagctggctccttcaaagaaggatcatttgactaggatatataaatgtagatgtagatatagatatagatcatgaggagagattcaactggcattcatgataatgtatctagatcaaacttgtgcactaaacctggataaatggacatttttctaactagattcctagctagagacatataattcctaatcataaattataggttaccttcctgatccaatatcagcttggggcagggtggtgggggagaagagggttggaggtgggtctttccagtctatgcaaaatgtggtttgtccaattatctagtttaaacacacaaactttaatggatccacaccaccaacctgacccccacctccacccagagacaggctttctctgtgtagccttggctatcttgaaacttgctctaatagaccaggctgggctcaaacccacagaagtcctccccctcccccctctgcctcctgggcactaggattaaaggtgtgtgccacgaccgccaggaagaagccaacaattgcatgtagggatgaaacagactccgaggtccgttttcaaaaagaacagatattaaaaccttatttcccatagaattcctgttcctccaaaccaatttcttgattgcaaagaaagccaaatccagatgaagaccaggtttctacaaggatctcgaggctgcaggtcctttaaacacataggagtctgacaacaggctaaacatggtgtggggaaaacctctgtgtatgaaaataagaatctttgttctgagttgctcctgattgtctaaagccaatatgatgggtgtaccatgattggcttgtttagcagatttctaggttaatagatcctcacttgtcaattccagcaagatcttgacactcaactgtttccataaaacaggctaagagtgtataaagccaaatacccagagacatttcctaaggtcaggtcttgttggagagtctcaaaacatccccgagaagcagatttccagacaatgaaacatcacttcagtctgtgctcaaaaccaggagctctgaagccatcagcctgcgtaacctccagaagctggctttcctgcttgagcaaggggtgggggtgggggtgtgtgttctctagaggcccttgagataattcacctgttacttgtgctcagagtactttaagggaaattatcttaagtactggactgtaggtaagaacttaattcctatctgttttatgacagacgtatatagcattccatgtaaaggatttctgtgaacttttatgaagatagtatgtcattaggtcagcattagattttgaatagaatattcattataaaatgaaaatttaactgacgtgttatagtaggttcttagacattggtaagaaacaaagtgacaaacacagtaataacatgatcacagctgacaagggggaaaaggttggaactgacccgtccacatctcaggccatgagcactccaacctgctccagaggttgtcaggtgttagccctgtaggagggactgcactgttggctaaggtagcaaacatttgtaatcccagccctcaggaggctgaggcagaaagaccatgaccttggagccagcctggactatacaatgagatacagtcaacaaacaaacaataaacaaacaaacaaacaaacaaacagtatgctgtggtatggggtagggatcactggcagttcttagaaataattttgtattctctgttataaaaaggactcgtgactgtaagtgactctcagagaataacttttcaaccggtatcaacagcaattgtaagatagagaaatgagagacaacagttcgaaggttggccaggcattccgggccctctggagggtgacagagacaaagtcgaccttgcccagtggccatggggtggtgacacatcttttagaagcatgcccttggaaagatgtgcttttctcttcggccgcattggacttttcttgcaatcaagaaattggttgggaggagtgggaaataaggttttttttccacatctattttttttaaagtactttgatttgatttgatttgctgttcagtagtccagacaaaatggttgacttgtccttgtgaagtctcactaataagcctggccatctggctgctggcatcaaccccactactttctccagcattctttccacctgggaaactgggcaatgactgtctcccagtgtgggcactgtgcccagggcagtacaggaagtccaccccaggctttatcttgggccacaacctgtaccttctatccctttctatcacttcttcctttcccatcttgatacttccgtgaagaacaaagaatccaccttccagtcattggctttaagcagacacgtccaccactgaagcacagtatcccagcccggaccctttaagctccaaagtgtgaccaagaagtgttgtcaatatctcaacagccaagatgtctcactattctttctttccctgcttattcctaaaacttgaggtttggagatttttggggtttatgctgttaggagaaaaatgtgtggaacagtttcttccaaaaaatgatgtgaggtggtatccctggataaaggcatatgccttcaagcctgacaacttgagttggacacacatgcatagataaatgcttttaaatgtgattcacccacaccatccaaatggctttcggatgacggtggggagccactcagctactgggtcaagtgttcaactgagatgagctcctactagagaacccctgggcccaggcaaggaggattgtgggtatgagctgggtgggctctctgcagagcctcacctgagcccaggagcacctcaggcccaattagtcagtgaggcccctgagctaaagccctacctaagccgtggttaggagagagcagtaggataccttggcttgccagctggctccagcagcccgggggtgcagagggaggtcataggtctcagtctgctgtttagcgaagtttacaaacacctgcaggcaagagaaaagtaagcagccgtctccagaaagatgagacccccccccccccacaacacctatgtgttttgctctgcattccccatagttgacagccagccaggctgctgtggcttgtcgccttctatggcctgtcgcaggtctccacagttgtgccctggacacggcttgcttcttagacgcctgagcctaagagcttgcaggaggcttcaaagggcaatggactggagaaattgggataactaaggaagctgccagggtccaggctctctaaaaacaaccgagtaaaggcaactgctctctgctgtgttctttgttctacaagcagtgtggccagaactcctgcaggagtcctgtgtgactgtcacttctctaagggtggcgagagcttctctagaggtcaacactcgcttagttcctttgttttaccaaacagtctttaaggatgttgaccaaaaacaaaacaaaacatcaacaacaacaaaagaaatttaaaaagggccaatcccccaacaacccaggaaaaactcaaatgctcgctgatgaatgaatagataagtaaaatgtggatcgaagtggctattcctcagtcacgatacagtgtggacatgaagccttgggtccttacatcagacccaaaatgacaattactattcacttacatgaagagcctagagtagtcaggttcatagacaacagaaggatctgatcaaggaagacaccaatagatgtgctaatgtgaatcatgggggagctctggtggccccaaccctacacaaagaactatactaggaatgccgagggagttggacaaaaacatacacatgtaagtaccactacaaggttgtatttatatgtttaggaatgtgtgtgtgtgtgtgtgtgtgtgtgtctatatatccatagatagatagatagatagatagatagatagatagatagatagatagatagataggattgatagatggatagacagacagacagacagatagatgatagacaattttatagaaagaaagtagatgaagccagacatgttagcacatgtcatcccagcactagggaagctgaagcaggcttacgtatggtcctggattacacataacaacatcttcaaaaataaagtgaaatggtaatttccagagactgtcaggaaaaaaaaaaaaagagtggggatgtggtgtttggaagacagcattttagtgacacaagatgaaaagagtaaagatgagctatggagacagctcagccattaaaattttagtgacacaagatgagaagagtaaagatgagctatggagacagctcagccattaaaatatttcaaatgcttgtcatgctagtatggagaccagagatcagacactcaggacccacataaatgcctggtaagtgcgacaagctataactatagccttggaaggtggagacaggagatctctggagcaagctggctcacaagactatccatattgttagaaagctctgagtttgattgagagaccctacctcaaggaataggaggaagagcaatcgaggaagatctctgatgtcaaccttaggcctccatatgcatatgcacaaatgcacacacgttcatatgtacctgcacacatgcaaacatgcacacgcaaacacacatgaacgcacacaaacatcacatccataccaataaatacctacataaaaagcaaatgtttgtcaaaattcactgagccgtacagttaaatacgtctatttgttcttttcaaatcacacatgacaaagttgacttggaaagaaaaagaaatcagctaccaccataaaacagcaagcatgaaatataagaagaaaaagaagcaaaaatagtcaagtttgtggatgactaaaatggtgttggaaacgcatttctgaaatgtcagcctttaatctaagggagagcgactaacactgcattaaagcgagggcatcctgcctgccttccacgttacccactactcttgtcaggtgttagcacagtgggcacagtacccacttagtaccctgggtggacttgcctggtccagcgtggtctgggtgactgagtactcctcgatgagcaggctgtccttgtgggaaatgagcagctggaagatcctggccagggaggacgaggggacctggaactggagcatgctgtggtgtctctccctctgcacgctgccagggaagttgccctggaagaactgctccacaggattcaaatcgggaagcaagtcgtcctttggagatttgattttcattgtgacaatgtagccgtctccaaacctagcaagtgcacagtgtgttcagttctgtaagagctaaggcaatccccagacaaagagtgcactcattaggcataatagggattaaaagcccatagcattggcctgctccgcatgtttaaaaacaggagcggaaaaaaatgtttggcatcagtttctggagatctaaatgtctgtgtggtgaagttggatgaacgtacttgctgaagtccgaggtggttgtagccccctgtggagattctaggcccatccgtaaagacttgtgactagagcactcagctctatgaggagaagactgaatggcttctatatgatttgctagggaagaacaaaggcttgggaaggcactattccctgaggaaagttcatgaagggtgtggagctgtgctatggtctggatatgatatattgcctgaagactcatgtattaaaggcttggtccttcctgcagccctgatcagaggttggaacttaggggtgatatgatcacgaggggatctcacattattagtggatgaatcctttagaggtaggacccagctgaagcaagcagatcataggaacacgtttttgaaagatgtctgtgtgtgtacgtgcatacatgcatgtgcatttgcctgtggatgcgtatgcatgcgtgtgtgtgtgtgtgtgtgtgtgtgtgtgtgtgtgtgtttctccctctctcctagaatctactaaggtaagtaggcttttctaccacacattaccaccaccatgatgctctaccccaggcccaaatcaattgagccaggagcctttcctcctcttcctctccccccctccccctccccctcctcttcctcctcttcttttctctccttctcctcctccttcttttttaatatttatttattatgtatacagtggcctgcctgtatatatgcctgcaggccatgagagggcaccagatctcattatagatggttatgagccaccgtgagtagtggctattcctgttgtcaacttgactatatctggaatgaactataatccagaattggaaggctcaccagtgactctaatctggaggctgggagatagaagtttctgacctggtgtcacacacatttaatctggactacaccttcggctggagacgatataaggacattggaagaagggaatctctctcgctcctttgcctgcttgctgtgtgggactgagcaactgctagatccttgggcttccagtcacagctactactgaccattattgggagttggactgcacactgtaagtcatcaataaactcctttactaaatagagactatccataagttctgttactctagagaaccctgactaatacagtgtggtagccagaaattgaactcaggacctctggaagagtgctcttaacctctgtgccatctctccagcccctgcctttccttcttgatgtcaggtttttcctctggtattttgttacagtgatataaagcagactaacaatgatgccccttgctatgtagatcaagaatggtccatcaaagagtgtgaatcatgggctggggactgtgataacctacattggggtatatcatactcattaaagtttactggagaacttcttctatgaactggggctgtttctacagtaagaagatagtagccatccagtttttggaaatcagccatccattcacatgggagtaccctcccccttaccctcccccttaccctcccccttaccctcccccttaccctcccccttaccctcccccttacctggctaccactgggatattgaggaatgagagggaatgtggaaggatgtactctagcagttaggcatggggagttgctgacacgggcctggtgatctcacatgctgatacttttatagctatctgtgtagtctccacatggtagttatttaagaaataaatcaggatcaaaaacccttttgccaaattcaccatatatcttagatcttcccacccatgtgaaggatggtagtttcccgtgaaacacacttcatgaactccctaaggtttgatgtcagcacagataagtgacattctctgttatcctagccagctagcttgatagcttatatcattggctcctcataagcatgctaaatatattctagtatgcctgggaaagagtgacaactagaaatccactgacatattaggatgcgaggaaagacgatgttacaataatctcatttcaatgaattgctagttttatctcacaagttataaataataaggaattatctctaaccacctataagtctgtggtcacaaggtaatattcctcaagattgttagtttgccatatgacatatggtcatttatttttcaaacctaaccatacataatattctagaaagaaaaactgtttctcaagctgtttggtctcttactcattcctacattggttgtaaaccctcacaaaatgtgccacaagtcctggatctctaaggaaatgtgggctgatactgggtcagtgacaatggccctcccccatgccagccaggttctgtaaatgtcccagtcagaactctcctatccagagactcctgtgagcttccagccacaagcaattagcccagtgtagaacatctcattggctttctccatctgcctctaaagagtctggcccagccatcactagccaatgcctgtggaatggttaggcaagcgtcccaactgtccatgatgacgtcaaggcctggatgaacccacagaatgtacttaaacgcaggcccctccacctgctcacttgtacttgaggtgttggatggtacccagacactgaaaggtgcccttcaccatgatggccagccgcgtacacagagcttcacattcttccatgctgtcaagcaggagagaggaagtgagacagatgggagggggtgctcctccctccctctctccacctccctggggatctcttgcctgtgggaggtgagaaccacagctctcccttctctgatgatgctcacaatggtgttccacagcatgcggcgtgcctggggatccatccctgtcgtgggctcatcctgcagagtaggagagaaaagagggagatgtggacgcggagttggtctttctccatcactacatccttcctgggctaacagacaagtgcacagccacttcccagcaagcaagacagaaccatgtcttgtaggacacataggtagaaggggaattggagactacagacacatggtacatacctataggaccatgccagctgtgagtgaattaaggttaggataatagaaatacagaaataggataataataataatatgaacaataacaataaattaataaagacaatagtagaattatccttaggaagggtcaggggagggggatagcccaagtaactttacagtcctctctatgtcccatgtcatttaaaacccagactgcatggtctcagggactctactgtggtccaattcacgagagggtccccggagcctctgattgaagtagatgctccggtccacacagatttcctcatcctaatttctaaccagatcgcaacattccctggagctgacagggctttccagtctgagtttctggaccttctagagactttccaggcattgaaggtcagactgtgctgtgaccaaacacttggctaatttgccttaaaggggcaatctattgccgttctaaagctgcaagccctgaattaattttctcaactcaggacgtccgtgacatttccactctgcagagtacgatgccctcaccagcagcagcaggggagggcagccagtgagagctatggctgtagagagtttcctcttattgcctccactgtaggtgcctgccaggcggtcagcgtagagagacaagcccaggctctggataccccagttggcaacctaggaaagagaagaaatttcagctggtggatgatgaacaactgaaggtcccaggaacaggcatggaccaaggctgagttctcagaggtcatcctgccaggctcagctctgttgtgacagcgccatctgctggccggtatctaccagtacatactttaagattacacttgacctttggtttcaccagtgcgacttcctgagctctacagccctcttggaaagagcgttcagccttccaaagactatacatctttccaagagttccagggtctctgagaagacagtgcatctcaaacccattgactctacccccaaagaagggacacatctgcaaccttcttgtacatctaatgaatatttatagagcatttagcacgagccaggcaggcactgtagtaggcactgtggaggggtgaacagtggggtatattgccattgttgttatacttcctgggtcagaggtgactgtctattgatgtctttaatatggtatttaacctagggattctattgctgtgatgaaacactgtaaccaaaagcattttggggaggaaacggtttcattcattcttccatagtgttgttcatcattgaaagcacttagggtaggaacagttcaaacaggctaggaacctggaggcaggagctgatgcagaggccatggacgagtgctgcttactggcttgctctccatggcttgttagaacccaggacaacctgtccagggatggtataggaccaaaatctggatattaggtgtatccattgctattagagtatttttgtgccttggtcctctcagaggacagacagatagatagacacagacagggacagacagacatatacacacacatgcatataatgagtgtatgtatgaacacacctacattatgcacaaacacatgcacatgaacatttcaagacgacatagtgacatcaccaattcccacccactcctctaaattagttcttttttttttttttttttttttttttttccattttttattaggtatttagctcatttacatttccaatgctataccaaaagtcccccttacccacccacccccactcccctacccacccactccccccctttggccctggcgttcccctgtaccggggcacacaaagtctgcgtgtccaatgggcctctctttccagtgatggccgactaggccatcttttgatacatatgcagctagagtcaagagctcaggggtactggttagttcataatgttgttccacctatagggttgaagatccctttagctccttgggtactttctctagctcctccattgggagccctgtgatccatccattactaaattagttctttcttgctttcccttttcctaaatgtattctacttcctctatcaaagaagtgaacatctcaaacatcaacacatttgttcatttactcagttatgtcacatacctacaattattcagaattattctgtccatactaaaataaaaggcaaatacataaaaaaaatagctcagaaattgaagagctctgtcctacgctactttgcccacgactaaggataaataccccactatctgcacaattatttaaaacagagtaacttgtttccacttatattgagtggtagactttcttcctgtttccactttttctctctcttcttattcttactgatgcagtcttagttttgaatctgtagcgcatgcgcacacctgcatgagtcaaagctagacaaaaggataacctgagagaaccattactccctccattctgcccttctccccaatttcctcttatgatcaaaatcattgttgtctggtatgttggtgtacccctctatcaataaagctaagcacccacacagctgcttcttgtttttctatttcttacctaaaagcagcgtcccacatgttcaccttcacaccttgcctgttctcatacagcaactttagaactaaccctgacaatatgtcataacaggccacagaggccatccttattctttccctacagcagcatcagaatgtcacatgtaccatccagctgaccatgtctaaatatttaggtgatatcaggtactttgcaatcacaagtgtaatgaataaccatgcgcataagcattttatactgtggtatgtgaatcgtcaggataagtctctagaatgttgatttgttgggggttggtcttgtgcaccatgtattcctgatttctgtgcatgcatgagatctggcacggatgtgggggcattgctaggaatattgaagaatttcctgtatcaatgtggcataaagaatgttcctcagttatctctgattggttaagtaaaggctgaacagccaatgactgggcagaggagatacaaaggctggacttccaatcccagccaggggacccagggagaagagtcagggagaaggagttcaccatgaagtgggcaaggatctagaagaagaagggccatgaggcaggtggagggaggaggaggaggaagagtaagaggaagaggaggatgaggagggagaagaggagggagaggaagaggagaaggaagaggaagaggaagaggaggaagaggaagaggaggaggtggaagaggaagaggagaagtggaagaggaggaggtcaccaagggagttcaccaggagcacacactagagcagagcaagccaatgccactaacttgggtgtgtggctgggaagtagctaggtagcatagagggttaggaatatctgctcagttattgtgcttaaagtttgttgaataaatctgtaaatctctatctcaattatttgggagctagctgggttagggaaaaaaaaactgccacttttaaatttcctgctatactgattgaggttaaaggacaaatgcatgtttcaccaaacagactccagggcaagaatttactgtgcatgagctcattttgtttgctgctatatctagcttctaggtcaggacttggcacacaggagatatgttcacttgctggaatgggtggacagtgtgcccagttttctgtctctacatgactgtactccataagtgtaggccatagcttgcccacctcccacatggccacagtacactgtttctcaccttctcgatttccttcgatggcacgccccgcagcctggcatagaggtaaaggtgttctctgcctgtgagcaggtcatcgattgcatcaaactgaggacagtagcccatgttttgatggacatcagaaatactagttaaaatgctgcaagaagaaagaggaattactgagtttccttcatagagggggtaaccaaagagcaggggccagattggccgtggggcaagaccttctccattttagaaacactcagaatttggacatcaaagtggggatcccttagttagtaacgtgaacttccggagtgctgggctttaaatagttggcttcttctgagtgtcacacagctaaggtgacacttgccacgtgagtgaggagtaggttggatctcctggcttgagggcttagaagcaaaggtttaggaagtgatcaatggatcgttcctggatcttaatcccttccagactttgaggggtagcttggaaaaggtgatacctcccagtggaagtcaacaacatcctctgtatttattcacagacagagaggggtaatcagataactacccagagaaaggagtctggcaagcggcagaatatgtttctgtcttctccatctgcttaatcccgtatcgatactttactagaaaatgtattgactggaacaacaacaaaaacctgtgcatagagcatgttatccagtcacctttgtctaaccacttacagatcagagcttattaatataggatagctataacaggacaggacacagcgagtccaggcgcagtttcccccgctgtgacaaaggccactccaggtataggtaggacagttgaaactactcagggaagcaaggaaggaacctttccaaattataggagttatctcacctgtaagccccagtctttaaaactttgctttctctctaaattacagctcagttttacctcaggatagcaggctgtgtctcatctgtactaaaactggtgtcgcctaatagcttcctatatctgccactgagctctctcaccataagtcctgttgttatcactgtatttgcttggtagcagatagctgggtggcagataaagtgtactcggccatgacctggctctatctttgtcaacgtgtttgcttcagacccaccacatatggccatggagggctggaatctcagattcacctatcatcccagaggtatgctccagcctccccctgcttgttgggctgtgttgagcagagctcttgggtaaaggcagagggtcttaatcaagcagatgttggggagccatcagcaatgtctgtctccactaataataagccagaatggagcgctgtgaggacactgtgcatgggtgctgctattcaggaacagccagtaaagagacagaccattctcttccctgccctggggagacaagggacggtaccaggaaacttggtacagttgagtggtttcagagacccggcacccacctggaatagtaggcagctccctgctccctactagattcctggcctggaacacatgccacacttctcacataggaaatgtgacctgtggtcatgtagccagaaacagagttctgtaggataatgaggccctgaaggtttagccaataagcttcccttcccagacattccttccagcaagaagtatttaatacctggtccaccctgagctgttggtatgtatcctttctccacagtgagcagaactgcagtgagaagcagggagaatgcctttgatggctgagtcacctgcagaaggcctctctgtgctcccagacaaccatcctaaagacttttgctgatgaactaagccagagtttccactcccctggccccgggcttgtcatcatagcgctcatcccatgccccccgccccccagctcattcccaattccacacaacctagcgggagcctggatgtccaggagtttgtagcctctggtcccggccttgtcatgggttgtcgacacaacacacaacactttgttcccttcttctctgtgtggcaccccagctgtgactggatgcctagaaacctgggaaccccagctttggcctcccacatccttggctgttttcccacaccctgagagatgtcttggcactttgataaagcccagcacccaacagtggaggcacagggtaaatgcagtctagcagagctgcccagcaccccagcggtagggtggagcacggacccacatgccctaccgcacagagtagagatctgcttaagctcacattattatagaggccaatagccactctccagaagccaaaaacacaggccaactttctctttgccagctttccttggtctgatgggaaaaaggattggcatgcaaatggctaatgatgatgggggtctcctgaagtcccttagatgaggacctccattgagagaaactcaacccagagaaaggatgtatcaacctaggagctcttagcctgggatccagaggctgcagtgggatcacagatgcacccctgggctcagtacatccctcaaagctttgtaagctgtcaggagggagtgaaagggagggtgtggaatatccttatagagggagaaggtacagtgtccagcagttgctcaaaggagcctatagcccaaagagatgaagaaccactgacttagtgttttctagaactttctaggaattcatgctaagagcacactcccaaccattacattttagtctggcttttccagtgtatctatgtcttgtgtgttgttgaatcacattctatgggaggcccccttctctgcatagatctttctaggtctcggagttatactggcatatgacactggatggctttccacatgctaggacaaggacatggcctatgggggacaccgtacaacaggaagggcagagcactcacctcttgcctgccacagtagcatcccccgatgtcactgtggtgtccccagtgagcatcttgaatgtggtggttttgcctgcaccattcactcccaggaggccaaagcactaggagaaaacagagaacaggtgttgccctagtgaccaaggacatcttcattgccagaccccaggccagtgtgagagctgggatactcatacctgggtgccattactgagattattggtcatgtgtggctaccaacatgaaacacatctaatcctaaccaacatgggcactaaacgtggaacacactggctttgaagacttacaacaaggacaaaaaagaaaaatgaaaaatatctcagtaatgtttttgcactggctggttttgtgtgtcaacttgacacaggctagagttatcacagagaaaggagcctcccttaaggaaatgcctccatgagatccagctataaggcattttctcaattagtgatcaagggaggcagggcccactgtggttggtgccatccctgggctggtagtcttgggttctataaaaaagcaagctgagcaagccaggggaagcaagccagtaagtgacatccctccatggcctctgcatcagctcctgcttcctgatctgcttgagttccagtcctgacttccttggtgatgaacagcagtatggaagtgtaagctgaataaaccctttcctccccaacttgcttcttggtcatgatgttttgtgcagaaatagaaaccctgactaagagagctgtacattaactacacatcaaaattttgttttagatctattgtgtgaaataaaaatagtaaacttaacccccccacacacacacaccttatctactagaaagtttgactttcattagatttctactgtcaagctctggtcagagggagaagactcatggtggagggctgatttttctcaagagctatttcatgttagttagtacggtacccacctctccaggtcgaactccaacacataaccgatctactgctggactggaagagcctgagtaaacctgtaaaattcaaagagactgggttcaagaccaagacaggggtagagcagtgagtgaatagggtagggcagggcagaggagtgagagcaaaggacagcacagagtgacttggaagaaaaccacaaacaccaggaggctacacattaacacagcattggaagaggagccacggcacagagaggtgtggagggtgaatcatgccatgtgcaaacggaacagcagagagcagaggccagggctcagttggagaacctcttctggagaccctgtggtatccacaatgaacagcagggataatgtcatgggaaataggtgctcccaggaggcaagtgacaatacaaagacagtatggggttgtatgggacagcatgatggtcctgtgccacctgtgtgctcggcttgtaatgccaagaaaataccgcccacacctgctcctcaccttggttagttcgtttagctttaagatgtcggttttatttcccccactcataactctttgtctttcttcagccacatcgtcatcttcatcaaaaacgggctctctagcaggctcagcgatcctagaggaaggggcatgggcaggattgtgctgggcgtgcagtaaccgtcatgccaccgtccttctcgcccaactatccttcccgttcccccacatttactcctctggacttcttttctctaagtctagtctaaaaatggttcctgtcaggagggacactaggcaggcaggtcaagtgcttctgttgaaatcctctctgtgctgccgtcctgcctcttcatgcctgacctatgcttgtccctggatctctctgagccttgttgtcttcttcaaccacatgaacgggagagaaggctgtctcaggttgtgtgaagatgaactctgagtcgtgcctgaggaaagacttgggagccagctttatattattaaaaccgttgctctacggcaagtgaaatgtaggtgagttattagctaccaaccttccctctttctccagccttccttaccaatgcgatgacaagatagctttggcatcttattaacacacgttccaaatctttcttggtccaagtcataggttccaagtctaacctcttcaagcatctctgtcctgcagacagatcctctatgcctttgccatctgtactttttttttaagttacactcactcctttgccaaccactggcacctgaccctggtccttacactatgcaggccattcccacctgctggcctcagcatgttctcttgctcctgccctgccaagagaatcttccccatccttcaaggcacagacccttctctgaaaatctttctgactacctacatctagaatgtccagccttttggcactgatacatgacatcatcatctacaagtgtgttatgctgtatcctagctatccttggatgcaagaggcctaccgtaaggtagccaggcccagcctagggctccagtctttcctttcttccttactgaccttgtctgacatattactaagtcttgtctaaagccctttctactctatcatctcccaatgcctccatctgtatccaggtcactgttgtctctttgcacatcagcatgggctcctatctcacctcccagcatggcaaggtcatgtcactgccttggttaaaatacccccagggatctcatgttgctcttgggtcccaagtcatcaagatgaggagtatttcgtgacccaactctgtgcccctctgcactcatcccataccacttcatcttcctattccatggctccctagaagtccttccattccgtataccagtcttactcgctggggttgccatgtttttgtgcaggccatgcctggcacagccatgtctaatgggaacagcaaaagtcataaagccagctcagcttcctgacaaagatcagcaaagctgagctgattaatgtgatcgctgccttgctgtattccactttaaaccatgatctccacgtgttgcatgctggggtggagggcgctaacatttgtacaacttgggatattgggttgatgaaaaacttttttttcttgtttggttttttcaagacaaggtttctctgtgtagctctggctgtcctggaactcactttgtagaccaggctggccttgaactcagaaatccacctgcctctgcctcccaagtgctgggattaaaggtgtgcgccaccactgcccggctgatgaaaaacttcttatgaatcatttagacctcctcccaggagaactgcttctaagcttccctgggaaaaccctgagcatattatctctcctgtctttatcaagatatccttatctgaccttacttgaaggtctttattacaccctaaaggttatgactcaaataaagatgtcagagatccccttacaaggctctaactccaagatacttttggaacatctgcccctgtacttaggaacaagatgatcaggacacagtaaacgttaaaaggtaaataagatttggtgggctagaaaatttggcagtagatcaggttaaactcaggcaattgtatgccatttaagattagggccgtgtatggtatgccccttgaggaaaagatacagcaacaaagttaggttggctggaattacctctgccctagacaggggcttatactgatggacaaagaataaggaggataaatgataaaaaaaaaattaagatctcccctgcttagaaaagttagctcatgttaggccattgtgatatcatatggccaaggaataaaagaatagcaagattagacacctaaataaattctaaaaagatattatggcagaaattgaataataacttcagtggctttggcctgaagatttttattgcgcctaatgacaattaatactctgaccattaagagttagtaatacagtgtgcttggtacatgatgatctgcccaaactggcttggagattttctgtctattgaaaacagaaaattcttaaatattgtgttatggagttgatgagggaaaatgattgtaaacgataactctgttctgtcactggttatcaatgatgactagatgtatgaccaagaggaagacattaaacacatgtccagggacaaaaacgatatggtctatgttctggaataaaatgaatctatccctgcctactgagttctgtatacataaagaagcactctgactgctagttagtcaggcttcaagatcctccagccttggctgactcacccctccctagaggactccttatctccactgcaggacctagccattgctggggctggctcctagcaaacatcttctaccaaaagcatcctttcttccacccctccactctctttgcttgttaattatctacataggtgtggttgttgggtttctagaagtcaggtctttccatgctctttaggactcactcatatcagcatcagtgtctaaagctaatgtcttcattttggtaattatttctctcttcctcttctctgctaaaccctacggccaacacggcaaagggcagagaggcatacggatagatagcctctcacagtctgacccagaactagaagcactgctgactgtttcattccatgtgaatggatttattttccttcttagtcttctcacccgcgtgattagggaagtaggtcattatagtgcaccgagccctggaactatttatttacaaatggtcagatgtacctgagaggaggaaaggaaacggaccattgtcaccgaagactctcaggcttgtgtgagtgcagtgcagggccctgggtgtggccctctaaagggggtgtgctccagaaatgaagatcaggtcagcaggaagcaggcaggctgggaagagtctagagaatgtggctggacaggaacataaactcgctgacctgacctctgagatgccctggtaacgttagggttggcagctatctagattaagggatggaggttgaattgccttttttcacttttccatgggcccctggttgccctcacctggcacaaggtcccaatgttttccttgttccctttccctgccctgccctcacgcgatgttctaactagcaagggagctttgtctcaccccctatagatggaaaccatgcttcctagtgtctcagataatctgtcatggtcctgatttgcagttttcttgtccaatttaagataagtatgtagtaattacacaagaaagttaaacattagtaattaaaatgaaaccactgtatttctcaaagtttgaagttaagacttgtctctaattccaacaggcctgttttaacccatctctccctgctgtgtactgaacaagctgggccttgagaatgaagagaacgaagaacagaatgcagtttctgagaaccacgctgaggtgaagcctagggttggaaacaccgtactaagccatggcacctcagggtccagccagacataccaccgggtgaggaaaaaatggtgttggatgagcagggtcagaaggaagtataccaccccttctattgccatagcaaccaggttcttcccaatcaggtcccactggaatgggtttgcagagtactcctcacctgagaatagaagcaacaggacatcagaaagaataaagtctacaccaggctgccagcctcactcatgaagacccatatgctcaggccttatgtgagaggctaaatgagaccccaaattattctgggctccccaggttagaatattggaaggtaaaatcctgtgcttggccccacctgtggttcttggccatagaaacaggagtatcctaagcccttctaggtggctggtctagcctgaagcctgacctacatgtaggtgccctcccagcctctaggctgcaggtctgacatcagaacacttttccagcctgaatggatccatggttgtgacccacagacctagaatgctacccaccaaactgggcatagacgtctgtcacagcttggctcagtgccaggtcaatgaggcccctgcccaggcagaagtgggggaagacaatgagcaacttcctcaacatggcattgaacctgagcagcgtctgagaaagagaagtgaggctgttaggagcgtggaggctgagggcacctgtctcctcatcagcaagtaggctctgatggcttcagcagcaagagcaggcactctggtcttctggggaggcccagtgcagatgtgtggccaccctctgaactgtgaagaactagtaagaaaaggaaaggctagtgacacagacccccaggaagctggagtgctgggagtacagtcatagtcataatcatagcatagcatagcatagcatagcatagtcatagccataagcatagtcatagccataagcatagtcatagcatagccatagccatagccatagcatagccatagaatagccataggcatagcatagccatagccatagccataatcatagcatagccatagccatagccatagcagagcagagcagagcagagccatagtcataacatagccatagccatagcatagtatatcatggcagagccagagccagagccagagccagagccagagccagagccagagccagagccagagccagagccagagccagagccagagccagagccagagccagagcagaactcagagagagtcatcaaaagtaaagacagacagcactgtagccaccgactcccctctttttaaaggcctctgtctggcatttccttctggacaaagaagcagagggtgtagacaaggcaagtggacctaatatcttgtaaaactaagtcattcggcaccagggttccctaatctgtcctcagaatttctttgggatcaggacggtatgtgctagtatgttatcatttatgtacgaaaaaaattggagaagaatacatgtttgtttgtctgtcttcagaaaacattatgaactggaataaggtggagtcttgagaaggaagttgggtgacccaaagtgggtagggagctttttcattcttatgtcttcttgtttcttttacattttgagtcacttgaacagaagctcccgtggcacaatctgttaagtgtatggtccttatatgaaatcacctgactatgtcattgtatgtgcgtgtgtgtgtgtgtgcgtgtgcgtgtgcatgtgcatgctttctacctttattctaaaaagttagaatcatgagtgaatgtatgtaacttatagaagaggcttacaaagccattgcactcacagaatataaatcaagactccagagtagggagtcttgcccagcgagggtggtggagacagcccggctctcccgggtatgtgcatctacataccctgttctccatggctctgcagactgctacatcagcttgaacatcccaccaactaaaccaagaagccaagaaggttctgctcacccggttattctcaaataattccaggacgaaggtgatggcgctgctgttgatgccgatgaacaggttagcacaggacaaagccacataggctgtgctggggacttcaaacaggaaggatgctggatacatcataggaatgactgcccatctgtgtgagatgacacagctcagagggagagagttccaggttccatcccatcaatcatacctctaaatatgaggggacatgtttggactggccagggtcccagggaaagagacactccattccttggtctctgtgccatgtcttcaaaccaagttggtgatgcctaccctaaccatatcatgagtttcataagggatgaatgtgatcttcatgaactatgaagcccagaggccacccacagtaatgctctctactctaggtaaagcagaatggaaggtcccaagctcatcttcatagttcatttcatagttctcagtcaagctggcttctgagtccattctcaagagagataaacagagaccattgccctaggacagagaccattgttttggtaagacatccctctctacatgacaaagatctaggcatcaccccttccttctttataagtgaggagtctatggcccagataaatgcattctctgtcacagttaaatctatagcaagtggtaggcctggattacaaagctgtgtgctgtactccataaactgattggattcagtctctgtgtcatcttctagcctgacctaggggtagtgtcatggcttggaatcttgtaccataggcagataattcttgaccagcatagagggagacactgcactgggcagcttgcccacagagggaatagagatcagagctgaggaggaagtgggaactgagtcccaggctttggtcaagaccacagttggaagtgaagagtattcagactacatggcatgtgtctcttcatccctaattggactaggactcgggcagatttctgattagctaccatagaagcatcttgggctggcggctaaccctgcctgcgctaccagtataagacaacccaagtttgccgtcagaagataacctctcctcccctggcccagatggcttacccatacagcatgagcagagagacgagagcaggaaggttgtctggggatgtgtaggctttcttttgaaatccaatgaagatgcccaccaccaatcccgcactcacagcataattcatctggaagagaagagacagtaagaccctggacctctatgaccaggggaccaggctcctccaaaactcatggacttggcttgagtccacttgtctaaatagatttggttaacagatacagaggtaagacaggtcaagctgttcatagctctactacgatctcttttctacccctgttcaaagacctccagtcctgtatctttggaaaagatgtatatgaacttctttctgatctcttactctcttacgaattggtcgctaagtcctgatggttattctttctaaacatgtcccagaaattagaaaaacttaaaatatagcttttgtctctgagaagctcacatgggtggggataactcttctaaacaatgcagttctgaaggcattaggtcaggcttggagagatgggcggcatggtaagattaggtctacaccagggtgaaagcgtgctgaaggtgaggagggcacacagggtacctgaagtgggtgccagaggccccattgagacagacaagcataaggaatagcttagcagtctgcagctacacttggcttgggctatacacacaaccatatccaaataatacttgttagcaacgtaagattctggctttcatcaagttgcatgcatacccgtgtttaaacaatggaaataagttattcctcttagcatgccctttggcatgccctatttgaattccagtacttcctgagacactgtcttggaattataggttatggacctatattgaataccctagactggctagggtacatctacaatagagcagaactgtaccctcaaatgaactttcaggggggattccccatttaccatcttatgctgatgtacagctggacaagcataggattaaaatcaggaggggcacgcacattaagcaaagatttatacagtcctagttcgtcaaaacagaaacttatgcactccacctgttagcaggcaagctcttcctcctcttggaccccaagaagtaactgggcccctgatgacctcattcatttggcctgctgccaatcttgacagtgtatttctaatctgttctactgcatactttaaataaaatttctttgctactttgcagtcaattcttttttagaatttgctcatttttattttacatgcatgagtggttttggctgaatgcatgcctttgcactaagtgtgtgcagtttgctaacaaacaagaacagggcatcagatcctctggaactggagttacagatggttgttagccaccatgtggatacagagaactgaacctaggacccctgcaagaacagcaagcactcttaaccactgggccctctctctatcccctgtgtaggcttctttttcattcttaaataaggagccaagaacctgagggtatgcagtccagactctgacccataacactatggggtgaagaagtatctgtataggaagttggcccacatgggacacagatgaagcaggaagaggagaggggattcctatagaaaggggaccagggcaggtatggagcacttactacaggtgtacatatcactcagttaggtaaacaattgagggtgataatttcttacttggagccaatttcttacttggagaagagaattgtgaacatggaaagtcagaaagctagcatgaactctttggcagtagacttgagttagaggtgagcatcgcagttagtgaatatagagagaacactggtgtaaacctgtgtatgtatgcaaatgtcttctgtggttccgtctacttagacagcctgcaatcagtgctatcttggtggcaacgaacaaatctggtgcccagactttagtttatgaaagctacttccttctgaaatgaaccaggatcccttgggaacatatctggctccaggggagttgcagcatgagcctggggtctcttgtacaaccagaggcactgaggtactccaggacaatgggcacaagacaatagggcataaagggcagcttgaaggagtacccactggccacaccattgattgtctctgtattaaactagataatagttgtgtcgtattataatccactaattaacaagagctatgactgcgtatatgcataaataaataatgaacaaagggtaagtttgctaacaaaccagttatttgtgcatcttcaaagtaataataaagtattaaagaataatcttcaggtggagaagctgggcaaacacctccgtaagggacaaagtgaacaccctcagaactagggcaaatggaaatcagaggcaaactgaaggggacaaggagagccccacttctgcagctgacactgctgccaggaactcccagcctcagtctggttgtgaggaacctcaggtaacccctaactggaggacaccttgccaaataactgccttgtaatctcccagtgggtcaaggtcatgtgtgtcaaggggaggagcaggaactgtcttgggttgaaggagacaagagacaacatgagctaatgcaaggctgtggtgtggaggcgcattcttgtttgtaaaagtacacacccgaggggtgtgcatctatgtgtgtgtgtgtgaaagagagacagagaggacacagacagacagacagacagacaggcacacatacacacaaaaacaccattcaacccctttctcctggctagcagcctagagactgcaggatgcctggaattgtgtaaaagacgtcaagcagcaggagttggcagccttcttcaaaaagtccgggaagcagaaagtccccacttgggaggatacagccaagctggcaaacataagagttcaccctctgtggtgagaagtggtctccacagcagctgcccccagcacagcagccatacacctgagacaatgctgaagctggctccttgaccaagatctccaaaggatgtcacagacatgacatcaggccctgacacttcaagcagaagctctaagaatgtggcttccaagtcatagaggggctgaaaatcatggaaaaggactaaggacaaggtgacacttcaagggtggagaggtctggacagaattacaggactgacggcagctaccaagaagcattagaacaaagagtcaataaatggttttattctgaaagaaagagagggggagggagggaggaaggaagaaagaaaaaagaaagagagaaagaaaggaaggaagggagggagggagggagggagggagggagggagggagggagggagggaggaaggaaggaagaaagaaagaaagaaagaaagaaagaaagaaagaaagaaagaaagaaagaaagaaagaaagagagaaagaaactagctttcaggtagctcagaaggtttcaagctgtacttgccttcttccatggggctacactgtttcaacagatgacacatagaagccaggaatttacagggacacaggtatgccaaatgtatgatacaaacagttcattgttagttcaacaatgactccttggattgcagtgtctttttgtccctgactaataagagtaatgaacaccttcactccagaccacagagcttggtgtcacaatgaccctgtcacaaccagagtggcagaaagcctgctgatacagtagccaacaccttctgatccttgaaaaaaaaaaaaaaaagcctgctgactattttgccagagccacctctacccaagatttccacccattgcttatagtcatggattcctacaggctcccagacctctctgtgtatccatagagatgcacataggctagtctcaagtgtaaattatatacctcatctttaaaatggtaaaaacagagctgggaaaatagctcgatagtaaagagcacttgctgttcttgcaaaggatccatgttgggtccccagtatctatgtagtagttaacaactgactgtaactccagtttcagggtatctgatactctcttttgggcatcaagaatgcaccaagcatgcatatgatacatgcatacacataggcaaacactcacatacctaaacacacacaaaataaaaataaaatgcattttaaaacagtaaaccagtcaacacttttaacagttagctttttaaggtaggcaagcctgacttctttcctgttaaaaccacagtccgaagagaagcttttagctctcgagatccgcatgctccaggggctgtcctcttatgcagccagaagaaaagggaaataattcagccactagtgaagttttccgggtttgaattgttaagtggcggttacgtaataaggtgagtgaggtcaaaggaatccagtcatcaggagtccttagagtcagcattattagcaaagcccacagggagagggccattggtgctgctctccatgagccgacatgttttatcattatgtagtttttgtatgttgagattaaatgaagatcccatggccctggtatggtgatacatgcctcccaccccagaacttggctggcagaggcagctggatctctgtgactttgcaatctggcctacctattgagttccaagctagccagggctgcataagtgagatccttgtttcaaaatttaagacaaggggcagaagagatggctcagaggttaagagcactgactgttcttccagaggtcctgagttcaattcccagcaaccacatggtggtgactcacaaccatctgtaatgggatctgatgctctcttctggtgtactacagtgtgctcacataactgaaataaatatatctttaacaaaaaaaataagacaaaacaaaaagactcaaagatcttattatccaagacaacaagaaaagatgggctggtgtcctaatgaccctgtcacatgataactagacctttttttgttttgttttgtttttgtttttcaagacagggtttctctgtatagccctggctgtcgtggaactcactttgtagaccaggctggcctcgaactctgcctgcctctgcctcccaagtgctgggattaaaggcatgggccaccatgcccggcttgataactagactctttttttttttttttaaataggggattttatctttttttttaattaggtattttcctcgtttacattttcaatgctatcccaaaggtcccccatacccacccccccaatcccctacccacccactccccctttttggccctggcgttcccctgtactggggcatataaagtttgcaaatccaatgggcctctctttgcagtgatggccgactaggccatcttttgatacatatgcagctagagttaagagctccggggtactggttagttcataatgataactagactcttaacagttccttttgaccccatgacctgtaaataacacatacagcattttaatctttctctggccccaccaaccctgattgttgtctgctgttgatctgataatttctttttgttaatgttccctaacatggtacctgatgtaatacagtgaagatctggtcacttaaaacaattattgtgtgagtatatgtgcatgatatgtatgtacgggtacacacactacaaacacacacatgtgtggaggcagagaacacttttttggagcacttctctgcctctgcctttacatgtgctccatggatggaactccggtcataaggctcgggttgcaaagcacctctagctgctgagccatctcaccccagaaagactgagttactttgttaactgcaacaaagtaaccagaaagacctggttacactgaagaagtaaaataaggtttctgggcagcgttcccagaatcagcaaattaaaacatggaatacccaattaaatttgaatttctgatagacaaccaataacttttagtataaatatgctatcatgtaatagttgccctgggatatactcaatagttgttcattgtttatcctgagattcagagctggtggttagcctatatttatctggtgaccctatcacaagggtcccttccctttgggggtggggatgggggtggggaggttgagacaggacctaagacgggaatgttggggtgtattacctgctcagacccatgctgctggcagaaagatctacccagtggctgttactgtgttcagtggtcttctcaagggttggttcccaattggctttttaagatgtcaagagatagcagccacaagacaattgcccccagcagtcctggcaactgtgaaatctctccctgcccagccccgccctggcctttggcggttagggaaggcctggtactcacaatatcccagaggaagttggtcagccagtaggtggtggggctcacaccactgataaactgcaaatgtttagctttcgtcaccctctcctggatcaagtaaaggacaaagctggctggaacgaaggacatggcgaaaatcacacatatggcaaccacggcatccacggaagtagtcagtctgcagcaggaccagagatagggaagatcagaaacccagagcaggtgtgcatcaggctccgggtagtacttatccaatagcacactgtgtcctcaaaccctcgttcctaacctgaagcttagcatcccacagaactgccttaatcaaggttaagcgcacagttttgtgggttgctttttgggttcatgagtatatcctagctaatctttctcttccttacatttctacttatatattatggtagacataaatgaacatctgcagcaattctaagtccttcttagcctcgcgtttttctacaggctctcagtttcctgcaggcacacaggcttgggttctatgaaatcacatgtcccgggaaatgatcacatgaaagtcaagggatatgaggctggttatataagattggtttctggaaccacacagaaggcttggcagtagggagacactgaatcctgcctgaaccccaggaggttctgatagcttctcctctgtgggcctcaagtagagcaaacggtttaacacagccaagatcaatgctcttcctgcctgtagctgagacatgcgaaccccttctcgaggaaggcaaatagctcaaagtctggagatctgaggagaattaccagaatctagaactatgccagggcaataaaggagcctcagtggagcctccagggcctggcgttttctctgtgtactggcagggaggttacgagtgtaattcgggaggaacttgttatcgagggcccaaaatgaatggccataaagtgtaagtttactttccaaataaatggaaaggggaaagaacagccaagcaatttggtccaggaagcatttgaaaccggtatgctcatatgatcccaattagacattaccacccagccctgcaactcactacactaagaagaagaaaaaccctccctttggtttccagagagagggaagaagatgggaaagatgccgagagcagctcacactgtgatgtccgagagctgctccttggtcaggttcagaggctggctgatgacagtgattccatactcctcagggtccctgtccctgggcaggctggcccgtaagatggcgttgtgagccacattcagaaagctgaccagggcatgccagcccttgttgttaaaccatacctagagggcagagacaggttgattggatgggcctggctaaaatgcaggcatctgagagggggctctagcaggttgtttagaggaaaatgagcatgcgtgaggtggaggaagaccttggcaagcaagcattccgcactccagcaggtagaatggaatttaattacgcagggtacgaaacagtcaaataatgagctcacaggaatttttagcttcaggccaggtaccttaatgttgtctgtggtttcaagatgtttgaggaaatctaacatttctttggaggcctccctggtgacaggacccttgaacagcacagcaaacgagaaatggtttgtttggtttttttttctccttctgtagtacttaagataatttccatttcttaatatttaaacaagtcaaaaactcatccccaaagtctttacataccccgctcacgttcatcatctggccaaggccacttagaaagccaacaagtgcttccccgctgatggggatagcagggagttttcctccgatggaaattcctccatacctacaaggcagtaggagagcccctgtcaacgccatgatgcttcatgcccagtaagtgccacctcagcttccgaaggggatgtggatttgggagggcttagcctcgcaggcaaacaacattgtcccaccttgttctccaaatagttctcctactctctaaatttagaagcaagcaaagccacattctagattccacatttgagagaaggcatacatttgtctctaaatccagctcatttggattaatatgttactctctggtttcatgcctttttctgaaacgacaggattcgatccttctctgtggtgggtgcatagaacctcacccatcacatctctgacaggcacctaggtaggttccttagcttggctgttgcaaacagtgctgcagtaaacttggatgtgcgagtatctactgtatgttaacatatgttcctttggaaatatgtcaggagtggtatagaccaaacctgctctactcttagcttttggaaagaatctctgcactgatttccgtagtggctcgatggatatccccaccgatggtgtataagggttccttctccctctgtatactcatcagcagttgtagtcatctgtcttcctcatgacagccactggctgcgaggagatggggtttagtgtagttatatatatattttttgggggggggtcatttttctatttctttaaaaaaatacattatatttatttatttatcctggatcatttttctatttctttaaaaaaatacattatatttatttatttatcctggtgggggcatacatatatgtggaggtcacgagacacctggcaagagtcaggtttttgtttcgtttttctttttttcctttttacaatcagctcttggttttacaatctgaatccagaggattgaactcgggtcatcaggcttggtagcaagggccttaaccttctgagctatcacatccccgttttccagttcccgtgaagaacgtcatctgcagcatgctgatggaaatcaccggtgttgaggtagcctccctagcacagctgtagccatttgctccatatctagcagctacttcctattgttactgtaatatgcccgccagtcatggtcacagaaaaagaactggactcagagcaggggcatgcagatcacctaccctgttgcagaccacctaccctgttaggttccgattattctgcggtttgttaatcttaagaaattccccatctgcagccgtcactcatgaccaagcaagataggggttggcttgaactgttctgtctaaattactaaggaaacatgagaaaagaccaaccggtctacagctcccccacatctgcatatgaactcattatgggttttgcagttttagcctttataagttggccccgagaaatgtccagcgcacagctagctttcagctctagagtctgagctgttcccttggtcactcagtctttggatatacgttcagtaaaccatccctgcttgactgagattagtgttcttgtggtttgcagggtgacttctgaaccccaacaattggcatgttgacaggagtaattgtcatgttgatggaggtcattgtcatgttgatggggatcattgtcatgatgataggggtcattgttatgttgatggggcccattggcatgttgatggagtcattgtcatgctgatggaagtcattgtcatgttgatggagattgtgttgaatctgtagattgctttgagtgatatcagtatttttcttgatgtcaattctgttgatctaaattcacattttgagatagtcttactatattgctcaagctagccttgcactcctgtactcaagtgactctcttgtttcagtctcccagtcactggaactagaaataaaggccactgtatccagatttaagcccatgtttgcttgcttgcttggttttgttttgttttttgttttgtttttttgagacaaggtttctttgtgtgacagtcctggctgtcctggaacccaccccatagaccaggcctcaaactcacagagatctgcctgcctctgcctcttcagtactgggattaaaggcatgtgccacaacagcccaggctaagctggtttttaattctttcccatttctattccaagatggtgtctggacctttatcctggtgtaactccatcttcttcatcatttcccttaaagtcttgtcctgtctatgtcaaactctacatgcttcaggctacctccaagtctctttgctggcttttcttaaggtactcttcccttttataaacacctagctaattcctgctcattttccctgggttagccctttttgatgtcttccttgactttactgtgggcctaacttgtgatttctcttttgtgtcttctctgccctttgcagatagtttaggcactatccaataccaccactcctttctgtgtctcttagtcccatgcctggcttagacagcccaactctcttctgtctcaactcttgtctgtctctctctctctctctctctctctctctctctctctctctttctctcttttttgagggggtatcaaggcagggtttctctatgttcctggaattcactttgtagagcaggctggtcttgaactcacagaaatttgcctgcctctgtctcccaggtgctaggactaaaggtatgtgccaccaccacctgtcaactcttgtcattcttaacttgggtctccacctttggggttaccttctttcacataaagatgagaaagtgagtgtgtcaatggttggcttataactctgatgcgggaggagaccccagttcttcaacagacaaaattaagtcccacccactctaactaagtcccacactaacaccaagccctgctcactagtgactaagtcccgcccattctaagactaagtcccgcccactagtgactaataaagcaagacacaagttgtcatttctcagggtcttgaactgttcttttgtctccaccttctgattcagcatctccgaaaccccagttccctgtagaggacatttctaaaaacaggattttactgctgtggtcttgaagctatccagaagaaacagccagtactagccttacacggtcacactgactctctagattgctttgtgagggcagaaaccaggtgtagaagacctccttctagaggccagttcttaagggaggctgggagatagctcatttctagagcacatctggaagattctttgaacctctgaaaacacttgcgcctccagaatgcttgaataatagggtaggctctagagctgggtcaggtcctttacaacttcatttctccaaaaaaaagggggggggggttgttttgttttgactaggcacaatggtgcatgcttttaatcccagcatttgggagacaggcatatctctgtgagttcaaggccagttttgtctatatggtgatctccaggaccatacgtttctggtgtccgtctcataggaaaagcaggacctcccataacacagcattttgaaatcttttcgggtcatcactgtaaaactgactctgaagaaagagtgccacctactgaactgagcaccccatgtcccccaaaaccctgattccccagccttagtcagtgctgccctaacatgtttaacttaaaaaaaaatgagattgctgcatagttcatgaaatcatattatctccacacccccaggcttcaactaatttaatgatctagcagtcacacctataagttatttcaatgccccccaaatagtttcttacctctgttcattgacccagaatttgctctttaagctgcaaaccaaaataaaatcatgtaataactaccatcagaatagcattagcattacattttctttctaatcactggggtatctcagtcctagggatgcttccacatttcttgatatctgaacaatgtagtgtggaatccagcatgcctgaagacccaggcgatccctgcatagacaaaggactgttccgttccagccctggctctctcagttgcctcttgcatgctggactttctgactagtcctttctgactagtcaggcctcatgctgaaccagtgaacccagtctggacctagaaaacatggccaacaatcacgccagtgtgaaggagggcctgacgctctccctcttttatagtgcacaagaaattctaataaccacttgtatccttgggaggagttctgacttttgggcatttggaggtaagataatgtggtaaggaaactctagtccctagaattcaagctggtcgtggactgctaccgttcagctaagtaaaatatcataatttccataatgcaaacttgctaccgagccaggtttggcgtgtttgttgtttattgagttaatgaataaactcaccctctgctttgatttttggatgctctttttgctcacggccagcttggccccgccctcctggcagctgcttgtaccatctgctacgccctcccgcccttaggtccatctatcacctatccagactctggtctgggaggcaactgtaagtaccattaacattagacagtctgcttcatttgagagccacagaccatgtggagactacatcacacttccttaagggtctttctggtggatgcttttgctaacctgcctgccattcatttgtgcaggggctgcttgatggccttccagcctaggccgggcttgataagaacagctgcagagctgagagttctagatagcaaagtgtctgtggaggtgttcaagggtggtggtgacaggtgataatgagggtgacaatcgctgtccccagctagtgcctgacctggcagggacccagacatgggcccttgtctttcccctttcaatctcccttggcttctctttctttcttcctccacttttttttttaagattttttttttttaatgtgcattggtgttttgcctgcttgtaagtctgtgtaagtaaggccagatcctctggaactggagttacaagcagccaccacgtgggggctgggaattgaaccctggtcctctggaagagcagccactgctcgtaatgctgagctctctcaagctctctccctccatgtttactcctcaactcccctcctcttctccccaccccctacaaactttatctttcttaactccttaagatataaggcttccttattgaatacattttttgtgacatttgcaacagtgcctgggataaacttcggctacttatcttaaacagagaaagaaacaaagcacttagccttgagttgccccttgtgggttcacaccgcagttatatcttctgctgtgagaccctcacactcggctgccacctcacagtcaacagtaggaaactgactttctggcacggttgatgtcgtcactaggcagccaagattacaagtgtgacggggtcacctacctgcttcttatgagagcagggtacgtttttaccaagtagtcggagatgttcctgttcgtgaggtcttgtaggacttcagtgctgcgctgtgtcctctggggcaaagaaacagggtcaagatctggggaatgagaccttagagtttgtgaaactgctgttcttatccaaaaattatcatcgactcggatgccaggaaacactcaaggcagccctgacggctttccagttcctgcatcagtgatgtggggtcaccattgatccccacccccttttttcctcagtccatccatcaccagagagcttaaatgcaaactctccaacacatttgtcttgtccatgctgatcctgttaccccaacctcagccaccacctagaccttgcctagacctttccagaaccttccatattgcacccacgactccgcccttgaacctccacattctgttctgcacccactgtcagactgagttttatagataaaaatcatcttcccttcatcccgtgcaactgcacagtgctcatcactcatgaaacatcgctttgtctcagtcgactcagtgccccgacactctcccatgtatgacatcgtctctgtgaaggcagaggccttctctgacttgttggctttcatgcccccagtacccagcatgcagctatcaaataatatatgataccctgctctcataaaaaaatctaagagtggaaggtaatcaagagattcgaagggaattcaagagtgctagattctggccaccaggtggcaatgtcacacagtgttaagtttcttgcgttagtggatgtcgtaggtcagtcagtccaggaccttggggaaaagcatccactgtgtagattgccacacagaagtggctgacaggattctaggtggtattaaaccaccatcaaaatgaagttatttttcctgttttctagagccctcccctcccccatgtgctcacgcgttcatctaatcctccactaggtcaagtggcagcccctgagtggccgcagtgtgccggggactgtggtaggggctctgcaagtgtgatcccacccctgctgctttcacaaaagccaactttaccaagaaagggaagctaagaaaagtggaccagcttgcgtgtggctgggctaagatcagatcctgcatctgaccgtacgtgcgtctattacctgtttctcaaattggcctgagtaccagggtagcaggctgcaacaattgcagatgcctgagaaagtttgtgaggaattgttttctaaaacgtctaccagacataacattcccgctttatctctgtgtagagtagaagtcagggttggggcgcatccatatcaagaccccgttgaagaaatgttggagcaggaagggacatctgtagctctgactctcagagtcattgcctctctcacttttccttcacctcctctggactagctctttccttctgctcttactcctggctaagagggaaggtgctaaacgagggtgagtggatgcgaacacatgtatatctatgtgtacatatgtgtataagcatgtgcatgcacttttttgtacaggagaggtgtctattacagagatgggacattcagttttgctcaggagatgtgactgctaatgaggaaaggcaggggtgacatacacttgcagacttgctctgcctcttctaggacttcgagcatcttcctaaggaccataggccaaaggtgctctgaaggtaagtttctaagtgagacaggcagctgtgaggttagaattcatttaggaaatgaattcctgtgcatggaggtctgatggtttcctttctcagcccagatcctagggagtcagggatatctgcaatgtggcaatgtagctgtcacccaaagggacaatctattgcctgagcaatataaagagcaggattgacccaggaccccttccttatgagccagcagctgtgatacatgctatggtaaatttagttgtctcattatgtcttcttcctgatgctattgttgtggctttccccacgggcacagactatgcagaaatcaggtgacagcccccagtctctgttgatgatgggtgctgtctgtgacagctaagtggaagggttatgcagtcactctggaagtcttccctgcacacacctgaaccatctgctgcgtctttttcttcattccatctactctactgcctaacaagatcatttcccacactctacctggagagttggagacctgtggggctcaggacaacagaaaagaacttcatagccacccatgttaactttcacacagctgagaggcaacctgcatcctggctcagccacggttaggttaggattgccatcatttgagctgcctctagtcctacatagttcatgaccacattatttttttgaattctcatgataatgctataattaggtgttgctcttctcaacaccaggaaagaaaatgaagaaggcttagaggctaagaaacaaaccatgcttccctaactcccatgcctgaacccttctcttacaacacatggactctgggaatcatccactcattgagaaataataagagaaaccatccaaggcaggctctgtacaagtaaccaatcagagaaaaagccaggctctcctgcccttgaaggcactccctaaagcctccatggggatttgtctatagcatagagctctaaacaaagcactgctcaggtatcatcaataccactcttgaaaatgataagttgctggctgtgtgtgttcatgtgtgttatgtacataatccttaggcacatagcttatttcccatccttcctgccctattccaccctagccctcctctcttctctttggaaagcacaactccttggctgctccagctgggccagaactccgaagatctccacagatagcgtctggtacacaggccagcatacctgtttcccttcttgtgatgagtatcaaacccagggcctcatcactgacagtcctccaccgagctccaccaaagcctccaccgtaagcttaattaaagctgttaacccatatgcaaatattttaacacttgaccatacatcacaacattatttaacacggagagaaaaaagaatttaaatcggaacgatcaaccatgggaaataatttgaaatcaattgaaacacaggaatcgtctgcagttgttaagatggggcaggtacctgtgggggtgggagccctccagcaccctcggggcactcgggcaacatggtgagcttctctctggtgctgcacttgcaggagggagaggggtgggctgctgtccatttctgcttctggaacaggtgggtgatgttcggggacacggagggcgtcttccaggaggttgcattaatgcatgggtactccctcatggaaaatgagaaaatatcccacagtcaaccccactgcttaatcccctccctgctgggaaaagggaatagctggtggctatctcttcctctgcctttctcttccttgaagtcaggaatttccctctcggggattagagtctacttaaggactatcagaactgcagccaggctaacagagcatgggctagggactaatctgtggactttttttttttttcatgactagtagctcttgctgttgagagatggaaaaaaaataacaggagattctgaagtgtgtccatgttactctttagcggtagctttggggaggattggatgagaaaaggtgctacaatataccaagctctgaactcctggtggatttcaaccatcttccacaactctcttttccagagttacaacaatgatggagagctggccatagaagtaattcctgccatttaaggtccaattatataacatcacatccttcatcttctccatccctgtttagttgtttgggtttttttttttttccccaaatgagtttgggcaaatacagtcaaacaatagaatacttctacattaagacacagagctgtcaaggatggaggcttcctagcaccagaggagaaactgggtaagagcctatcagacacacggtcatgacccagataccacagagcaggattgaggggtctttcccgacacttcctagttggcttttgggtctcctaggggagctgttggtgttagcttgggacttacggaagccactcttcctttagacaacggttgccaaagcctggcctgttcagaaggacatctgccagtacttcaaggtgttcattgttgggttcgtccatgctagaaagacagagaggctcacctggtagtcagactgggacagaacgcacaaagcacgctaacatgtacgtaagcgtttgctgaatgtgtattccatgtcaggcatgcttgtgaggcactgaacaccgacttagaatggttgtggggctcctggaagtggggtagcctaccacacacacctagacgtctgatagcaaatcatctgtgcctcaaaaagatggagcttcaaccccctttcccaggcttcccatcctcattccttaccctcctgccttccactgggtaccagattgctaagcagtagctactacattagcttcccctttaagagctccaccaagactctttccaccttggagaagattccagggaagtagggagatcaggacccttctagcaggcatacagtccaggcatatcacatgttaagggataataatgattcctgggatgaatctacgcacctgaagaaggtatattgatgcccatacatccagggatgaagagtcaaagctggaaattcaccaaacggaggcacaatgattgaaagcatcagagccaagaacacgaaagtggcagggagaacaatctgtaggagaatagccatggagtcacaggctgaagagctagagatgatacacacccatgggaagacatccagtgcacatacatgcacacatacccatatacacattcttttaagtatttatcctccacttcgtattcagacaccggcagtaaaggacaggtttctgggggaatagcacaggcaaacgtaaaaggcagtatatgtagaaggaaaaagaatattcattcctacacccagagataaacctgaacatatgccatgctcggccagcgcctaaaggcaagtctaaagaatgactcgcattacctgcttctctttgacccaaagttccttttatgagttgtactggctgggtttgtgtgtcaacttgacacaagctggagttatcacagagaaaggaaattcaggtgaggaaatgcctccttgagatccagctgtaaggtattttctcaattagtgatgggggggggggagcttgtgggtggtgccatccctggggctggttgtcctgggttcaaagcaagctgagcaagtcaggggaagcaagccagtaaataacatccctccatggcctctgcatcagctcctgcttcctgacctgcttgagttccagtcccgacttcctttggtgatgaacagcagtatggaagtgtaagctgaataaactgtttcctctccaacttgcttctcgatcatgatgtttgtgcaggaataggaaccctgactaagacatgagtggaaaccatagagagaggactaggcacacagctgagctggtgtacagcgtttgttcagcatgcatgaagtcctgaattcaatctatggcaccacataaagttgaacttgatggcacatgcctttaatcccaacactcaggaagtgggggcagcaggagcagaagttcaaggccattcttagacggctctggtgttaagagcactggctgcttttcagaggacccaggttcaattcccagctcccacatggtggtgactcacaaccatctgtaataggattgattctctttcctggcacacaggtgtacatgcagtcaggatgcatacatatatacaaaatatatgaataaataaatcctaacaaaacttaaaaagaaggtcatgcttagctacataacaagtttgaggccaacttggggtacattagaccctatcttaaaagaggacaatggcctttatgtcataagaaaaatgaatgagacatataactttacctttcatgatgagaatagaaacaatagtggaaaatatgatactatcccatttttgactctaagtgaggcccaatccttagaaagaagacttgcaaatcccagaatcaaaataaacgtttgccaaggaagacgaatagctgatagaagttcaagaaagtataccgggaagtgtctgatctccccaacccccaccccacaaatattcctgaaaagatggaaagtcaggatcagtaccacacacacacacacacacacacacacacacacacacatacacacacacacacacacacacacaccacacacacacacacacacacacacacaccacacacacacacacacacacatacacacacacacacacacacacacaccacacacacatacacacacacacacacacacacacacacacacacacacacacacacacggaagcaggggagaactgagtcaagcccaagctggtcacagtggggtacctgagccacaaagtccttgcggctgcggatggtgtgatggaatcgcttgactagcagggcctgcacatgttgaagaatcagccgagcacctgtgttgaatgggacaccggggtcctctggctctggggaaggttggcccttgggaggatccacttgtcctggggaacaggtatgtggggcctgggcatactgcctgagcttctcagtgggagccgaacaagggtgccggagaccggcttgttctcttttctgctgagcgccacctaagggatattggatcaataattagaaaaagacaagcataagagatgttgctatatgcatttttcttccttccaacatcagttacccattattcagagaaacaatgggacacggaggctaataacctttctgttttagtttggggcaaggtctcacgctaacctgtctgtactcggccacctgtactgtgggaagtggggagaatgtgtaatggagagtcatagctcagaaaacaaggtccattagtctgtgtggcttcagagacttcatctaacctcagcaagctcactcagctttctccagatggaccaggtctgtgtcctacctgcctcatgagattatcatgctatcaagtaacacagtgacagcaggtgctttgtcaagtataaagatccattaaagtctgagctaagaggatttgtgattaccatggtggggcggggggcttcctaagtcttggtcatagatcacttgctgtgcaaacacttggtgtgcagtatttatttaattctctcagtgattataaaaggtagatattattaatattttacatgtggggaaactgaggtatgaagaggctaagtaccatccccaaagtcttttagatatcaaattatgatgctcaggtctactgtactctatggctaaactctgaacatttaccctcaactgtctctgaaatacccatttctatccccatactgaccagtcttctaggtctgacttattgttctcacaggctatatgcaggtaaaaagtccctactttttaaacctatgcagcttgcagtactctttaatgtgttttcattcttgtcttgactaatgtgaatcttgggctttggatgggttgagtggattcaacttctatctgcatagaacttgaaagagttcttcgacctccacggtaagccactcctaccctctgcagaggactcacccctcccccttctgccaggatgaccacctcagcaggcctaccacatgatctaagctggaacacgtatgggccagtatatatggacgttggtaattttaggcatggctgatacatgcttggtcacttagacccacattttcttaggaggtggcaacagtagcagaaattccatagggaggaaacactgcatggaaaacattacgacgtgccatactggataggaggaggcgactagcaacccaacacagctacagaggactgtttgtctctgagcaggagagaggtccagtgggccttttttagcagagtgagtacctgtctcttgttctatcagaagtgatttgtgctatggagacagggtgaccgttccctcagcagtaagtgtgtaacacccataatgttttgtgtggccacaaggaatcaagcaaagggcccaggctgccacacagagaagagaaaaggccagaattcataggaattttggttctcgccgtttcaaagtccaacagttactaactgagagcttacgagtgtttttatcttgatctcaaaggggtcaggaggctggagctggcgtctggcttatattaactgtcagcattatctctaaggactctgctggccatcactcatagagacaagcctggatcagaagcctggtagagaggagggcaactgtggtgacatgacagaaaaaaggagaccaggggagtaggaggtgaattttgggggggggggggtctaccagtctggcatggctaagaatcctgatccatccagaatgttcctacctagccgaatttgggctcttacccacaggcaccgagaacacagaatgcattacttggggctctggcactgagaagggtgaatggctacttcattacttttcctgtagattttctaagctcaagtctggggaaacaggggacaagccgctggctctggcaccgtacatacctacaaacatagagcccgctccagcatcctctgtgaccttcaggaaaatctgtggagacatgaagagaggatttggttcaggcactcctgcttctaggaaaatgtagacctagttccactgtttccccatggaaaaaaaatacattctaactacccgagaacacaggcttcaataaatgcacatgaggaccacggctgcagaaaatatgtatgcatgtagagcgaggtaggaagaagccaactggagccagagagagttatggatggagaattatggctttgacttctgtagggttttgctttagtggtaggctttcgtgtgagctgcctcttctggcgctaaacggagaccaacagcaatctctgccttacctcttccaggggagtgtcagaaattccaaagctgctgagccccaggtcagccagagtctcctccagctctcggaaaaggctggcatatgctctctgcttgaaattcttgtttggaaggaggaagataagttcttgaccaatgcattccaccagctttgcctctgggacatggtggtataccaaatccatcagctcctgcacatctcctaggacaggacgaaaagaccgatgtcaagtccattcggcctgttctattcagcctggaagagtgtgagatttcccagggctcatattctcttctacaccctgttagagaaaggggcagatagctaccaccgtccctgcctctcccccgtgcctccccttctctaagtctcctcctctgtttctctgtgtctatgtatatctctctgtctctctatgtctcagcctctctctctctctctgtctcgctcatgtgtgtgtgtggtgtgtgagtatttgtgtgtgtgtgtgtgtgtgtggtgtttgagtgtgtgtatttatatgtatggtatgtgagtgtatgtttgtgtgagtatgtgtggtgtttgagtatgtgtatgtatggtatgtgactgtgtgtgtgtgtcgggggtgtgtgtgagtatgtgtctgtgtgtctgtgtgtgtctgtgtgtggtgtgtttctgtttacctgcttgttgagacagagttttatcctacatcctgtcgtagcccataacttggtttggtacaggctggccctcctgagtgctgggattagaggtgtgaaccacccacttggctctcagtgtcatttcttttagacttgatactcggcaagtctatttttagctttgttgactctatgacaaacatactccaggtgctgcaacctgagggagggagggccagccacttgttcagtcagatgtgctattgcctgaaggaacactaccctgggtgagtcctccccccagttcctcatccgtggaaggggaaaacaagtgtgcccactccaagactgtttgtgtggatgggggtggggtgtgtgtgtgtgtgcagttaatctagcagtggtggcacttagctgtcactgcattcctgaccatcagcccaggaggagagcttgtcactgctgttgcttctcactcactgaaagcttaggacttaagtcgaagtcatttttctcttccttgtgtggcctaagacccaggcctagaaggaggcaagtctccttcctaaaccatgcccaagcctgtgttaactacctggagagccacaccattttcccttgggctatacctgtcctcccaaacagaacaagactcaataaccagccactgcggaaggaggctgagaagccccggagacgctgaggatggcacacggagtggggtgggtagcaggagtatttatctgaagctggccttgaactcacaatcctcttgcgtagcttcctgagtgctgggattacagatacatgttaggctaatcccagtgagtgttgctactcaggtcagttttctgtaagagtcagcatcacccaggggagtgtcctctgtcttttgattggttggaatatttcacagctcgccactgagagcctgttgagctatggaaggcttgtgtttcacacctgcaaactgtgtgattgtctttagtcctagatgatctcatactggggccggggagttctttactggaggaaatagctctgccccagtagtttgtaggggtcacacacattgttctcttaggaaggaagtgggacccagtcactggattcccaggaaccatgccttagttatgtgtcagcctctcagaagtgtccatctggcagggaggtctgcgagtgagtcactcaggactgtgtgagcagtatgtgggggtgtgtgagtgaaaggccagccgaggaggtatctggcaatgaaggaaccctccctagttgggggcatagctatctacagtacttctcaccatggcagcatgccctttctattaaaaaaaaatcatgccagccaaagacacattccaacttgattttgatagttattttttgtagtaattaaacatttagaacatcaatatcttgaccaagattccaaggagaaattttcagcaacacaggagataactcacagcaagataagcaagacacgagactcagagacacaacactgaagaaatgcttttcattcagtgctgactacatagagaatggagagtaaaaactggtgctagaaccaacggcctttcccttggttctttgttgttatttgagacagggtttccgctatatcacccgggatggcctagaactcacagagatctgcctacctctgcctctgctgggattactgctgtgttctaggcacttcctcccagttcccctcacccagttcccagttctccccctagggcttatgcatagcacatcaatacttagggtttagggggaaatgtgttaaataggaaacttttttgataagcacacgctttcctctgttcataaagctgagtcggtagctaagtttaatttttcttttgcatagggttttaggccctgtggcattcattccccttgcagaggtgtctgaggcatggaggtaggcagaggttgagagtagaaagggtcattagctcttgggacgctgaggtcagatctgacaggtgagcttagatactgcctctctctggtgacagcgagaggcctctgagagagtgtgtacccttaaattccagggtttgcctgcatgtgtgaaagtgagtcgtctgtgtgcagtgcctgcagaagctagaatagggcattggaaaatctgaaacttcagatacaggtagctgtgaactgtgggtgccaggaactgaacccagggctcccataagcacaataagtgctcctgactgttgagccatcactccatccctgcatgtctcttacatggagaatctgagcttgcgggagtgaaggatgcaggaaaacagtcatacacacaaaataaaaaataataaacaaaacactaaaaaagagagagcgagccagagggtgccttggcactttgaggagggggtgtgtccacactgttacagggcaggagtgtaaaatccaagcttaacacgagcaagggcatggagtaaacaagttggattcctcattaaagagagggcgtttaggtactttaaaatcacgttaggaatgagaaacaggctcagagaaaaagatgagcatctgcaggatgctgggcttcaaagcacagcacgtgttctctctgcatcccgacagggagcacccaacacgggagatgctcactgaaccagcaccgaggttcaacctgcccagctcttaccatccaggacttgttcttctgttatctcatcgactcgggttggacacctggtagagaaaccctttgatgtacagctgcagaccccctgcaacagacgacagaaaggactgacaagatgcagatcatgtcaacgatagcatcgtcgtggtgccagctgctgtcaccaccgctcggtctgtctctcatcaccagctgcggacggcattattttttttcttcgctgtttaatctgttaattcatctgagcattttgagggcggagctgcttggcctttttatcccagagggaatgtgagtcaggcagagagagagaggcagaacctcaaagcatccctctgccttgtcattaatcatgtggcagctagagagacattctgttcccctcccaagccctctggacgccaggctgtgaaaatccaccaggacaggaaaactcatgctatccatttatattagaggcataaacagcattgcagcggaacacttgtgacaacctgaatgtgtgggatacctgttctcaaggagcccggggaaacattcacaacgctccatctcatttgtctccactacatccctcctatgaagcagaagccagcgtcacccacttcattttccatgtgaggaaagacaacagcaaagaataaaatcaactactcaggatgacacaggagactctgctggctgcccttgccccccacatcagttttaggttatagtctccaaggatagctctccttagatttcacttactcctagaattcaggtttaattggggaacatgaatgtttggatgaaggaggaacaacttaaagcagtctaacctcgaaggccaaggtactcccctggtataccgcatgacatgtgtggtataccctcccaacccctctggttatttaaaatcagttatgcctggtatgtgtttgtgagcatctctatacagcagtttagaacacaattactgaagtctgcaaatagtccagatacaagcttatcccaacaattaaaagtgcagtgggcagttatttccagaacagcagccccacactgcccaagctgggctccttccccaggcagacacgcacctcacagccacctctttggctctggatgtttttcatcttgcgaactaaggtcaagtagaagcctgtgccaaagcagttcttgaggaagagcggggttccagagcagtagagccttccctgagaaatgatggcaatgcggtccccaaggaggtctgcctcgtccatgtggtgagtggacatgatgatggttctgcctgtggggaggaggtcagggtggttaccaggcaacctggatagcatgcacagcaacctccaggttatgtggtccccagaacttggagctaataaataagaagaaagtagctaattctgcagcaagcataatggagtaacgatgatagcaaccactataccctaacatcctgcatgctgcaaagcactgtcacatacggtgtctctgcactgggtctcaggtacgactcaaacaatttcacatgggtgggacatgctcatctccctctgccttcactgtcactatccatggactccctctgccgtcactgtcactatccatggactgactccaccttcacagtcttcccactgttaaacaccgctcttgtactttgtaagagcacacgcagcactttctcattaaatggagctgttattaaaacgaggtgatgaagattttaacctgcaaaccttcagtgaggggcatgagaaatacaggaagaataaaggagggggctttccaggctgggcaggatgaaccatacagcttcgtggacaggctctgggagttctgcctgatgtcgcttctagatgtcaatcctctagaaggtgagggatagacaagtaaagggcccgttttaaggcactttcatctgacatagcctgctgctgatctatacatccagccccatatttgcgctctcagggaatagtcacgcaacagctaggaagcttcctggcatgactttgggtccctttaggcagagggcaattccacctttccagattggaggattataggtaggacgaaatttttgtttcattttgttgagacagggcttcgtgtagcccaggctacacagctgagactcatcttggatttctgctctacctcccgactgctgggattgtatgcatgcactaggcctggtttatgaatgcctgggatggaactcggggctttgtgaatgcgttgtaaacactcccaacccaactttctggactgtttcagccataggccacttcatcagtgactccctgtttgcaggcttgcccttgaacttggattcactggtggtggcaagggctgttaaggtatgtggctataaaatttgaggcgggagaaagtgggacacctggaacagcctcagtgagagcatggggtgctaagcaacagcccctcacctgagcgatacttcaggagcaggtcccagatggagcgtctggagtaggggtccaccccagaggtgggctcatccaggaccaccaccttagaatctcccacaaaagcaatggcaacagacagcttcctctgcatgccacctggaggcagaaggaaggtgatgacacgggatatcacagacatctcggtacggggaagaggaaggcccaaagctggtcacatgtggaggatctttaaatctggctacagtttggtactgccaccacagatatgcctacactgtcagacgtcacagtatcgtccatgcttcaccaatgctgaaagaccaccctgcttcctagcacctgatcatctgaaaactgtgccttgagcttcacagaaatgtaaggagagctcccgttataaggccctaccccagtggttctcaacgtcctaatgctgtgacccttttaatatagttcttcatgttgtggtgacccccccccccacacacacacaataaaattattttcgttgctacttcataactgtaactttgctactgttatgaatcatgatgtaaacatctgacatctgacgtggggggggcggggcctacaggttgaagagctgctgttctgctaccccaaccttctgctgaggcgcgttgccaggcaacggatgctccgtaagtgaccccgtctcctcccaataccaagcacctgaaaggtcctgagcttcttcattcctcttatggtggaggcccgtgtcttctagcatggcttccatctcaagctgggcctcctcccaggatctccctttcagctgggcatagaacaagatgtgctcagccaccgtgaggctgtgggaacaggaggaggaaaaaaggcagtgggctaagtcattccattttgagcagctcaccttggaaaagaaagatgactatgaagagttagcagtcagaaatgtcatcgtggtattattcgtgatgtgaaagtgaaatgaccaaccagtcttgcccaaagagctaatgagaaaattacttagtcatttgaacaacagaaccatatgtaaacattacttcttaaaggaatatgtagtcgcatggaaaaatattcatagcaccttaggattaagaaacagttatggagttggagagatggctcagtggttaagagcactggttgcttttacagaggacctggaattgagccccagcacacacatagtggctcacagctgtctgtaattccaggtccagcgtatctgagatcctcttctcgggcactgagaacacacgtcgtgcacagatacacactcaggcaaaacacccacactttcaaaaagtggggtcacaaaatggtacgtatgattttactttcccgtataatttttaaatctttgcgcatgtctacacacgcagagaaatgtccgaagagtcatatctggaggtgttaacagtgagattgcctctgggcgctgaaaggactggtgacagttttttttcttttgtatttatctgtcttctccccttcaccgccctcctccctctgccaggactagagtcagaatgtaaaatatgttttaattagaaggaaagagtaggggaagagagaaaagagggagggaaaagggagggaaaagaaagaaagtgatagaagaagaatgggagaaaagatagaaaacccaagcaagccggcatgaaagcccccctcccctcccaggacagtctatagcaccggtggtccacatgtaaaggggataacatatctcctctttctgtcagcaagtatttgggggcaagtaagggaaagtgtcataaagaagttaccgtccctcctctggctggggacatctcaactctgatcaccaggagcacagcctcacatttggaaggacaagggcttttgactgagaagaccagacaaacgcattgctaagttgggcaggaaagaagtgtgtgtgtgtgtgtgtgtgtgtgtgttggggggggggcattggagaacaggatacaggtgtcttagtgctactattgctcggatgaaacaccatgaccaaagctatttggggaggaaagggtttatttggcttacacttcatcatcaaagaaaatcaggacaggaactcaagcagggcaggaacctggaggcaggagctgatgcagaggccatgaggccatggagggagctgcttactggcttgctcagcttgctttttttttttctcctcttatttttttttaattacgtattttcctcaattacatttccaatgctatcccaaaagcctcccacaccctccccaccactcccttacccacccattcccattttttggccctggcgttcccctgtactggggcatataaagtttgcctgtccagtgtgcctctctttccagtgatggccgactaggccatattttgatacatatgcagctagagtcaagagctccggggtactggttagttcataatgttgttacacctacagggttgcagatctctttagctccttggatactttctctagctcctccattgggggccctgtgatccatccaatagttgactgtgagcatccacttctgtgtttgttaggccccggcctagtctcacaagagacggctatatcacggtccttgcaccaaatgcttgctagtgtatgcaatgatgtcatcgtttggaggctaattatgggatggatccctggatatggcagtctcttgatggtccatccttttgtctcagctccaaactttgtctctgtaactccttccatgggtgattgtttccattgttggtgggattgcaagcttgtacaaccactctggaaatcagtctgggggttcctcagaaaattggacatagtactaccggaagatcccgaaatacctctcctgggcatatatccagaagatgtcccaaccggtaagaaggacacatgctcagcttgctttcttatagaactcaggaccaccagcccagggatggcaccacccacaatgggctgttccctctcccatcgatcactaatgaataaaatgccccacaggcttgcctgtagcctgatcttacggaggcattttctcaggtgaggctccctcttctccagtggctctagcttgtgtcaagttgacatgaaaccagccagtatacaacaggggtttctgacagatattttgttttcctgtggtgctgggggcagaacccagggtgatggatgggccaggcaagtgctcttccaatgagccccacccctgcccaggagtatctcaactccagctcacttactgatgaaacaggatgttgtgttgtggacacatgcccaggctctgccgtactacatccaggttggtttcaatgtcttttcccccaatgagcacagttcctgacgtcggtggcaacagtcctgtcaggatggacctgccgaacacagggttaagtggcagaagagatggttgttagaactcaccaggggatgagggtaaccccatacagggtcagaaggatgcttgtagtgacacctgccctatctctctatcaaactcaaacctgatgtagctgaggggcccagaacatttccacacagggtttacttagcaccagtgccttgcttcaagtcctagtgcctagaccacaagggccttctttctctactttttatttccaagtgttcctgggccagtatcaagagcctcggggattcccagactcagacaccccaccccatcatcacccagccatcattgcagcggtcagttgtagtgcccactggatggccactgtggtggtcagttgtggtgcccattatgactgtctgtcagagtgatattcacggatgtggtcagctacagtgttcactgttgttttactctgtggtcagcggtagtgtccaccgtgaaggtctgtcatagtggttgctccgtggctattgatgtggccagccattgtggccactgtcgtagtcacagttgtggtcagttaaagggatttaggacccagccccactgctttgcctgggcgtgcagcccttgacagtggagaagcagggttggtgactctccaaagctcagttgatgccagtgagaagctgggcagcctgtctgctgactggctaacacaaacaaattcgtttgggaattccaaatgtaaaaatgtgaacaatgttgtgatttctcttttctttcttcaattatacaaaacatgtctcccacctgcttgggtagttgtctaagttaagtgaatcgaacatgcttgaaaaacaaaacaaaacaaaaacaggccccagcacaaagtgaaacttaaaatgttatgctattcccagcattaggacagcgcttgtgttccgaccccagtggaagtttagtttctgcactgagtgaagtaatgtgtttgtcttctagaggtcctggggtctcgaatggagtttcctgtcctcccaccacgtgagttagcaaggagatagccttaggatgccacgcccagttctgtcccaagttctgataaaatcgcatgctatctgaacctgtacttcgaagctgaaatgttgatcaaccactagagggaaacagtaccaagcccaatggcaccagccccgcattccattcccattgaaaggcccgggagcacattccggagcagggtgtacactgctgttccttcccggggctctgcaagccaaggatttgatggctgctgtcacatggcttgttgacccctacccctcctccaccggcccatcggcccatcggaggtctgcaccggagccctgactgcctgttctcagcaggtggcgctcgcaccccttccagaactaaaggatggatggaggagtccacccagagcctcaaagcttcctgcccttggccttctgccaggcagcgagtctacttcactgttctccctacactttctcagaaaggtagccatcccatcagaggtcccacaccagcactaaagcatcctaattattaattggtaggaaacggagtgctacataaaaatagcccggggacatgggcagccacggctttttatcctcaccgtgggaggtgtgtgtgagtgtatatgtttccaccgaaattcagtaaggaagaacagagtggagttattggggagagagaatgaagccggggaatgataggatgggagacagcctctctggcagagaactcacaaggtggtggtctttcccgctccgttgtgacccaggaacgccgtgatttggttctcatagaaagtgatgttcagacggtccacagctggccggccactgggctcaaaaaccttcaccaggttcttcacacacacaccaggcaccagccctggaagctcgcgttcaaaaaaggagtcttggagggaaaaacacattgtagaaacaccacatgttaatgacgccgtgcttcatgaacacactgcttccttcagacctgtgctctggctgtaacttcacctgcccatgtggctgcagctttgtgaagaagatcaaaacaggagtagtcatagttgcactggccatagatttcacacttactgtgagttaggcactgtttccaatgtttcccaacaaatccctcacttcacacatatagtcctataggtagatataactaggctcttttcaataggttagaaagcccaagactgagagacatcaagtgttctatcaaggctacatggtgtacaagtggcaagtatgggcccagggtccatacccatctgaaatagctcctgtctattattgagttaaccccgagttccgtctttgcttcaaggctcagtctatcggatcttcataggtttctggcaccagccctgactcctcaagccaggacaacctactcttcctcatcgtaactccttcctccccatgctccgtgccctttccagtatcaaccaacctactctccccctccccgtgaccccccaccccccaccacagcatcttttccgaagttcacttatagagtcaagattactgtcagagtattaagtctaattaactaatggtcccttgctctgtccccaactcccgttgcattgtctgcctgtgtctcctggccacaactaaagctgaaatggaaccttatcataccactctgggaggaggatcttctagagttactttagcctgcaaaccagctctgtgaggattcaggtctccaacatcagctttgcaaagtggtacctgaggggcgcctagaagctggaccctctcgtgccaacatcaggctaaatcggagtctgtgtgcctctctaaacccaagccatgcatacagtcagggatgagaaacattaggagaattagttcaagagtgaggacaaagcagcaaaggccagggaaaggagtcttatgtaccctgcccatcagcccgggcgtgattaggtaacttccaccaccaggaaaggcttttgatgcttgcagtgaatgggctctgggtttgtaaaccttgagtgaagtgcagtcagctctgctaggctctttccccttacggaacttatttttgtctttccttgtagctcatatccgcttcaagtcccagtgacccaagtcattgttctgactaaatcctcggaagtcagcacatttgtgcgattcccttgggatttgcctaacaagggcacaaacacactacagacctgggatctgctttctccaggaaatatgcactaatgtctgggttggaccattcattcccctcgtgtgcagctggacatgagatttaacaccagtcaagaaagggagtcagcttcctggcctccttcatgttgctcgtcttgtggtttggctctggcactactgaagctttccgttccgttctgctgtcttttgggatgggggtggggggtcttggggggttaccattcattccttctgggtgctctggatcctccatctcctctgttaagggttcagtcttttccagagccctttcttctctggtcgaacaacctgaaccaaccagacgccaacgttactcttcaggagagacaggagagaagaggaggggcagtggggacagatgcatttcccatcacaagggtgggacagctccctccagaggttggagccatcatagctctgagacccgtctcctgcatggcctccagctctgacctgctgcccagccgtgagggactcaaatctgattgtgccgatttcgcagggcccacagggactttttaaatcagaaccttgaagctggagagttttgatttacattgttgttagggggaactgggaatcaaactaggaactccctgcttggtagcactaagccacattcgcagtcctcggcaattccttttaatgtggcagactgctcatgtcagaaattgtaataaaaacaaaaacaagctgagcagtgctcacctttaatcccagcacttgggaggcagagacaggtggatctctgagttcgaggccagcctggtcaacaaagcaagttccagaacagcaagggctaaacagagaaaccctgtcttgaatgttgtccccttgagggggtgggggtgggggaatcagacaaatcaaaaaatccatcgcaggattaaatttggaataggtttgttttctttagcctaccacctggtcctttttgctccaactaaaacatgtcagtcatgggagccctgagcaaaaatccacctgtagtgctatggtgggtagctagtttagatctgagctggagaaatggctccctttaaaaggccacctattcggacattcagaaatcttacggtaataccagggtggagcctggtgggtgtatgctattcctccccacaccccccctacacacacacacacacacacacacacacacacacacactcaccacagattttattttttaatggcattcggtctaaggaggtgtcaaggacaccctggaaaaggaagaggcagaaaggagccccagccataaaggaagcaggaagaaaagaaagccactagcaccaagcccttagggctctgctttaagcacacatggggaaccaccagggagtatcctcagtgcccgacagggcctctagatttgcagaatgtgggagagcagcaggctgaggcttaatggtgagaggagtgctgtctggtgtacttctgtctccacttcctgaagcagttttgactttattctccacaatttccgaggtcaatgtgccggcgatcacactgcccggctatcatactgccctcatgagtaatacagcagcaagaacaaatatctttttaaataaccactggagtgacactctcctcgtgaaccgtcctcggctattctagattttgccccagtgtccagtgggatttcaacaggaaattgatgtttctggctctccatttcttcaactatgaagaggggagttaggggggtgactcagctgctctctgatcttagatagtgtgagggattgtatttattcttgcctatgaaacaggtgagaagtattttacgtctgtcaggaaagtgtatgtgtctcgttttcaaggaacacgtttctcaagatttttttttttcttgaatagcagagtatctcttgggatagtggggtgggggttggggagcacatgagcccctaggttcactgacattagtaacattccagggatgttaaatatgcttatttaagagaggttgataactttgttatagtggacatttaaaagtttgtagataaacacaatgcacaaaacaatataatgggaaaatactggcctgtcaaagtaatgtttgtgtgaactattaatatatatatatgtatatatatatatcccctcgggggtgggggagaccctcaaaataccagccaaacaaaaatttatacaagcttttaaaaggctccaggttaaatgccttaacctggtatttaaagttaaaggaaaactaaatccctttgttagtgcttaaaggctaaatcgtgccccaggcccagtaattcaaagtgaagtgtggacggggaagggtgagctctaaccctggaaagcagggggttttctttcagagcctcccagttctgggagagactgtagcttacagctctagagaaattgttcttaacctgtgggtccaggccccttggcaattctctgtctccagaaatatttacattacaactcataacagtgacaacattacagttgtgaagttgcatcagaaatcattttatggctggggagggtcaccacagcataaagggatgcagctttggaaaggttggcagccactgatctggagtttctctgccttctcagaattccaagactatgatatgaggttttccttctgacttctagaaaattctaggcctcctgtttttttttgtttgtttgtttgtttgtttgttttttgggtttttgttttgttttgttttgtttttgtttttggaaggaggataaattgtacttaggaggcattgtcagccaatgtcccttttgccttcttccaccataagaaagccttggagatcaaccgtgcagcctccgtcttggcttcaaagagtgaattactgtgtgtttggagaatgtggggcatcatggcggagaagaaggaggcagcaaaagctgaaggcaaagctccctttgtgcctcctagatctctgctttgaaagttggaagagtattgggcttatgaaataaatggtgcacccttttcaacaagtatccaatctcccaggaccaactgtcaagtttctgccatttactctggctctgggattcatcaaagggacacttgtggaggctgtgacactgtgacaccctgtacccacggcaggcagctgactagcagggatcatgcacttgacaaagggccaccttgacaccttgacaaaggtccacacatcttacatgtaccccaaggaaaggaagtagtttcagtcctgaagggtttctgttgttctcatttttgttttgcttgatttgttgttgtttttgtttgtttttatataagtacactgttgctgtcttcagacacaccagaagagagcatcagatcctattacagacggttgtgagctaccatgtggttgctgggaattgaactcaggacctctgaaagagcggttagtgttcttaaccactgagccatctctccagctcagggtttctctgtgtagctctggctgtcctggaactcgctctatagaccagactggtcctgaactcacagagactctcttgtctctgcgtctcaggtgctagtattaaggtgtgcatctccactgcctgactgttttaattaaaacaaaacaaacttaccttcaccaccaagccagtaggactcctgcagaaggaagtaccagggaagtggggtcccatagtctcctgaaaacaggaaaacaaagagaaagcagtgagccccatcccactgcactccacaagccccacaaacacccttctaaatctcaaattatacttacaggtgttcagggtcacaagccagtatgtagttactgaaaggccatctgacagaccacttctttcaataagatttcagtcaaaataccatgggggtttttgggtgttaccagcaacactaactatgatgatattggttgacatcagttttccaagaaataaatgttttttaatgaattaaatcatgtctttttttttttaagcagttaccagaaaacaatagttgttgtcgaaagcaaatatttgctggactctacttatataacaggcatattgtacacgttccatgtattaacatcattgatttctgaaagcaaccctaggaattgggaattaatatcagtctgaaggatgctgaaattgaatacactaacttcgagccatctgccccattcatagctaatgtaataccagccttttggttcagttctctttgtcacttttttccctttaaaatttatatacttatttttcccctatagtttttcagtttttaaattgtgtgtggatatgtatacccacaccagggagcatgtgagagagcatgtacgtaagtgtaggtgccctctgaggcctaaagagtcagatcctgtggagctggggatatagactattgtgaaccacctgacgtgggttcttagaactgaactgggttctctggaagaacagtaagtactcttaactgctgagtggtctctttagccctcaatgctgtttaaagagtcacgtatcatggcttttgccactgctagaatgtgattcaggggcaagcctgggtattttgctttctttagagtctgtttgtttatttgtgtatttatttatttggttgtgtgcgtatgctggcataggctcacacggcagtcggaggatgacttaagttgtccgttctgccctcttcctgtttctgcttctgttcctattctcctgactcccccacccccacacccctgtttcccatagaagtgcttggattacaaatgtgttttgtgcatgaatctttttaattcagctttgggaattgaactcaggtcatcaaatgtagtaactgatcttgtccactgagtcatgtccccagcccacgtggaccttctctgccctccatactaagaccgatccccggaccttgtaaacgctaactgaacgttccaacaccgagctacatcttcagcctaaacaccctggttcccagaacatggctacatatagaggctcctcagtaaatacttgttgatgaaatgaaagctttggcttggctaaaccaatgcacaaattcctattccaacacaactagcttttgtttaccaaatctctttccagtgacatggggagatgaaaccaaaaagcccaacaggctgaccctaattctcgatcttctcagaatggaattaaatggtgggtgaaggagaatttgattgtgtttaagaaaacatgcatttggggctggtacgatggctcagtgggtaagagcactgactactcttccaatggtcctgagttcaaatcccagcaaccacatggtggctcacaaccaccctcaatgagatctgatgccctcttctggtgcgtttgaagtcagctacagtgtacctatgtataataataaataaatatttgggccggactgagtggggctgactggagcgagcagaggtcctaaaactcaatccctaacaatcacatgaaggctcacaaccatctatctgtacagctacagtatactcacataacataaaataaataaatgaattaaaaaaaaaagaaaacaagaaaagaaaacatgcatttagtgttcaagaactaagagaaaacaagacaccagcatctcaaccttatagctcaaaatgtggccttgtttagaaggcggatgtgcttagttaagttaggtgggaccaagctggagaaggatggccctaacctaacgccatgtagagtctttgtaagatgatagccacatgaaaaccagcacacggggaagatggacgtgaacgtggagaatcagagtcacatgcctacaagccaaggaaagctagaagcttggttttgtagaaaacttagccttcccaatggcttcaccattgatttctagctttcagacaatgagataaaaacagctcaaaaaacgttatcattttaagccatgctatccatggtccttgttatgacaactctagaaaaaccatcgttccctcagctggaacacagacccaagcttccggacctcacctagccaccttctcccattcagagttcttgcccatttgttgttgtttgtttgatccagttcattgtttgtgacaagatctcgctgtacaatcccggctgcacttggagtcacagtctaccccagctggccccatctgcttatttctgagaaccatccacttgttcctcccagggaccaggcccagcctcactctcccctgtctgcttttggccacagtgtcaagagctagacccagatgtcagtgtacagtgaaggctcctggttgacaaggaggccattcagatgaaacaagacttgcctagctatagaaaatgctaatttgaaggaaaaatctaggttactgccaagtggatacaaaactttgtaaatagctcattttgatccagtagctgatttttgtatgcttcaggttagttcgtgtccgtcaaacaccaagcaccagccagggcttccaggctgtcacagtgaaataacacaaatcatggccatgctcttgagggctcacattctaggaagggcggcaaggttacatcacgtcaggtggtgatgagtgctctttaaaaagtaggctaaagagttagagccacggagggaatactggtcacacagtggataaagctctagcaatcttcagtccagaaagatcaccaagataaggtgacatttgaacagggaccctgagcaaaatgaggaagggatcctgcagataggagggatagcctggggaaaagacactgctagtgaaaacagcaggtgtggcggtcatgcggagagctcagagtgttgaacatgagtggggtggtcacagtggctagagcggagatgtaggggagaagggaagggcaggagatgctgacagtaggaggaaccagataacaaagctttagcaggcctgggcttggacactgggttttactctgaataaggggaaaggcccatgaagggatttgaacagaaggtgttgacaccatctggtccagattgcaaaaggctccatctgcacacctgaggagaacacagctgtagggggtgacagctgcggagggaggcttggagtgggaaagtggatcaggggtgacaaggaagcagaatccagacctgtttcccaatctctctctctcttcttcttcttcctcctcctcccctctctctccctccctcccctcctctctcctcttcttcctcctcttccttctccttctcactccctctccttccctctgtctgtctccctgtgtaaggtgtgtgtgtgtgtgtacacatgttcatacacctgtgtgggggtgcatatactcatcagcatacaagtcgaggttagaccggctgtctccctgttacctcccacctgatccggggaggcaggatcatttactgaaagggaaactgttctggtcgggctggctggctaaagagttcctgtgatccacttgtctccacttccacagtgcagacatgctcagcttttatgtgggtcctggggacttgaacccaggtcctcagacttgcacagcaagtacttttacctactgagccatctctctccccagctccaattctagacctgtttctaaagtggagacgataatttgctgatggagttttaacttctagatgtaaattctaatgccggccctgagagtttatattcaaatagtctggaggggatcgagtgtaagctaaaaggtcaggccagacctctgcatctaaagagtctaattctcttgaccgtggggagatacagcagcctgacttttcctggcttacctgggaaaacctggtcaagataccaagcaagcaagccgtagagagcagcatcgagaagcatcatcttcatagacagcaggaaactgaactcatccccttccaggggactcttcccaatgttgctccattgcagccccaggccttgctcctcaaagcggaccaggtactcggtgccaaacccaaatgccacggaagaaagtaggctctgcaatgagcagagacaataaggcaaacagacagcaacggggcccagaggaccatcaggcaggggagggacgagggccaaagatggctgtgttgtgtctgactgcaaggccactcagggagggcgtaaagtgcccttctcctgggaagagcattctggaaatgtttggcagacctcaaaaactcctacctaacacctcctgagccacctctcacctgctcggcagaatgaaaggaggcagtagtgggaagatgaagcgataaaatacaagactccaaaggaagggagcacctcctgttcttactccgccttcccctctctcttccactttcaaaagaccacacaattctgggcagagtgaagatgataaattgagttgctccgtgagactcaaaggaagggggcccaaagtcatagttttcctgtggccagcgagggctctaggcctcctcttaggttctccacagaaactagttcagtggcaagaaagggtacaaaaagaaggctgaagaggaagtgcccctgccaagtcgccatgggtggtccctgactctcagagcatacttgcctttgatgagagtttctctgtaatttggaagaccctggatagagttcagactatctctcagccaaaagaaaaaatcctcttgctatatgtacacacacacacacacacacacacacacacacacacacttaaaattagctcaagccagctcttatctgtgcttgccagacctgaagcttcctggtgggtccgagaagctggctgtggcttcccagtaccatgtaacaaccatacgattaccaaaattgcccagctctgcccacagcctgagtcagaagagtttcttattattacccattgtgatcgtcttagaaaaccgagcgctataaatagtggtaattaacttcttatttaacatgagaaatgagaggcagatgccccagagttggagtcctgagaacaggttcttctagcagagaggcaggcagtcgtccttactgactgatgtaacaccgagactgggagattctggaggggcagcaaactgcaccctttagggctgaggctgattagccctggctaatgagagggtagaaatggcccacttggaaacaattagagaaaaggcctatattcatttgggaattctgaactaagaggtctctcaagccatccaaagtcagctttgagagtcttctcttgggggagggggtgtcatttctgcatcctttttgcacacactgctagagaacgggaaagacacagagactgatccaatttcttttggaataatgagccccattttacttatgatttctgagcagacagacagtaggggggcaagcttcctctcatctgatgcttctcaaaccggaagcaaagaagggtgaagaaaaagggccacctggttctcccctcatgcagaaacaagggaagccaggagctgactcagtttccccacagtgtcctggggcacactagtcaagcaggtgtagtggggagcagctgctacgttacttggggcgaaggctgctttcactcgggctcctaaacctttgggctgtgtattcgcctcttacagagtcaaaaggcaaagtggagcatcttagagaccaagccaagaagctatgccataatctacatcctgggctggggtaagctgtagggacctcaccacagtcgtcttcaggtcggccgtcatccggtcctgccaggcaaagcacagaacgtgtggtaggtagagggtgaagtagatgaccccactgcaggctgctgcaaggctggccttggaaaacaaagtactgagcaggaagctctgcatgatggtcgcagtggcaaaggccaacaagaacaggaagagaatgaagggatcgctgtaatggaggatccttccatgctgaaaccaaagggatcacgtatcagtcatcctcagttgtgcccagaggcagggtcccgccgccctagaaggtgctcctgcccgccagtccagtcgctagtccttacatttccacatgaacaccccaaagcactgacttcttttgtcttacccatgcccgttagtaaacgctaacattttatttaaaaaaaaattttaaactgggaaaccacgaagctgagccagctccagtgctctgggttcctaagccagtaaaccaaaacccaactgcccagtaactcaacccagtcagcaactgccatctgagctctgagtggggactttaaccaatcaaatttcctttgtcgtgcttccccagctccttagtgaagtccttagccacgtgtggtctaaggctgcctggttcatgagccatggatgctggtccgaagcccggtgataataggcccagtggtaagaagctactaacattttggtaagagatcattcgatcaaacggtgttctaaatatttatgtctgaacccacagatttgtgttgccctcaactttggtctgacaaacttcccttgctgtgggcagtgtggttgcttgcagagacacacaactggccagagtctaaataacgcagagaatgggtgggtcctctctatcaacctcccaccagccaaggctcagagaacttcctggctggctgagagggtgcaaggaatggaagggcccagcagagagggagaagtgtgaagtgctaactgctgacaccacacagctgtggtacacattaactcacagcagccggggtcacctgcaaaagatgagccaggcaacatcccagcactaatggggaggagcccaggggccccaccccatccgaagtgcaattagcagttgactgctactgagggaaagagagtccctgaagtccttgggcattctgtaggttgttcatgccacaatggatatttatacatccgtgtgcactcaggtatcactaagtggactcaggggttatcacatataaaggaggacacgaacggggatggggcatggcatggaggggccctaaggagatggttgggagtaggtggatattattgatatactttgtagacatgtattaaactttcaaagaataaaaatattaaaaaataaaacatatctttttttcttagatatgatctttatatacatttcaaatgctatcccaaaagttccctattccctccccccgccctgctcccctacccactcactcccacttcttggccctggcgtacccctgtactggggcatataaagtttgcagtaccaatctcttcccagtgatggccgactaggccatcttctgctacatatgcagctagagtcaagagctccggggtactggttagttcatattgttgttccacctatagggttgcagatccctttagctccttgggtactttctctagctccttcattgggggccctgtgttccatccaatagctgactgtgagcatccacttctgtatttgccagtcactggcatagcctcacaggagacagctatatcagggtcctttcagcaaaatcttgctggcatacccaatagtgtctgggtttgatggctgattatggaatggatccccgggtgaggtagtctctggctagtctatccttagctagaaactttgtctctgtaacatatcttaatgtgactaagtttatctttcagcagtaattatggatcaactcagcaagttcatggtgggaaggagttagttgtgggcaaaagaggaagacctgagtgctaggtggtcttgtagtactctgagtgttaggtggtcttgtagtaccctgcaacaatacagaagagatccactccaaacaagtctcctcctttgcctggggctcggcctgctgactggttatgagtgcttgctctctgaggtttgccactcacacaggtggagacattagtaatggatctagagcctttggaagtggattggtcctccccatccatgaatgctcttcatagaatctaagtacaagactcagcatttttcccactgtctatatagaaagcaggaacaaactagcgactttttctgaacaagcctagttacactgtaggacagactgagatgttcaactgtatgaggccttctgcacccctcttcttctggttccccctttattaaaagcccctataaaaaggtcagcccctttggtccatccaaattctgcattcccaaatacacatagatcttctcattcttttcttgggaacacaaagatacaagaatgctgagaacccttctcaggcttcagagcagagtcactgttcactaggccacctcccatagttcagtgggacatagttgaatagtggggtaatgggggtcacagacaagtcacacagcctagcattcccgaggccaaagggcctcgtgctctccctcccgcgtgtttcttcttgctcctccatcttatggaagtgcttcgtctcatgaatgggctctgatctacgaataaggttttccctgaatcactgctttctccacaatagaaaggaaagagaccaattagcgatatctctctggagcccgcgagaaccaagtggaactaatgtgtgtcttatctgctgtggtcaccatctctccttcatgctctcgtgcctgttgggtattgagggaatcgattgaaaaccagatgaggaggagatatgcggaagggagggacggaaggaagctgtacttaagttgaacctaagtccgaggaagtcttaaaaaaaaaaagtcagaactggactggagggtttttactgctctctgtagaatgaattcaaccttctatccgagcccagagcaaagtcctgcaaacgtctagactgcgagctttggtggatgtcagtcacccagccagccttgtgggctccgtccccagcttcctcctctacccgctttccttgttgctccttgtggactgagtaacaatggaaccttcccattgtctttgcccccagcttctttcctgcacagcagagctggggaggaagggacacacacacacacacacacacacacacacacacacgggggggggggggggggattcaaaggaaaaccttattttggtgtggaacgctctgtttccgtcattattggaacagcgttctggttcccacaaggagaagaagcgtctttgtgctcgaagctcttggtgaacactctttacctcacgtcccaagagctttgaagtcctaaaacctcgttcttgggcaggcaggtctctgtgtcgcttatcagtcagaagccagccattcagccagatgtttactcacggactcttttaattctaaagatacaaatcacctactggtgaaagaggtgtggggcagagcagagggcctatggtggctaagaagggggcggggctgcccctttcacctctgtggagctctggtatcctttgtagggtgaggttgtttgactagaatggcctccaccccagcattggttctaagggaactctaagatgggttttgattgacaccacaacccacagggtcatagtgtaatagcaaagatagaacgcagtaggttagggacattttactgcaaaatggggggcttggatgaaacgggtatgtgttagttggctagcatatatgatggggcgttcttaggtcaggtagccatgatccaacatggaatgggagacttgcatcctgtccgcacatcttcatgacacttgacatgaggatagcgatgaagctgaacaggctcactgggtctacaacagaaagcgacttccatccaataaagcatcaacaactaccaagtgtgtgcactcgtattccaacaagcccaaaaggagctgcttctacgaaggagctaaaaatataaaatatacaggatggcagcatactgcgaaacaacgtcctatctttaattctaccttaatgggggaaaaaaaaaacccctatcactaagaaaagacaggctccaaattccatcctttcaaacagagtccttggataatatgttttataacgtggcagcattatattagtatataatattagatgttagtgggcccatgttgagaccgcccccctcccccaggcttcaactatacaacaggtttagtataaaagaaagtttatctgggacataggaagggggtctgggaaagagagtaaaagcagagaaaggttacagagaaggacagaaagagaggagagagaaagaaggggagaggccagcagggaacttgtggccaggcatgaacatgtgggataatggagagagagagagagagagagagagagagagagaggaggatggaaagtccttttatgctaggtaatggttgggcagaacctagaggaaatgctaacactggagatctctgcaggcagaaagatgtttcttagtgaagctaacgccctggccatgaggatgattgacaggttaattgtccagatctcctcccctcataccaccaatagcgcttgccaccttctaactgtagccaagtattggaatgataattctaggaaacactccttttaagctcattcctgtctttgaaagaagaggcaacctttgagcacacaacagttctaccctgggctttgcttacagcggtctccggtctccgcgtggtcatgaaacagactgggaaacctacgtagacagtgagtgaggcccttaggcaagaagaggagaggggaagagataacgatacatggctgggggggaggcagggaattgagggtgctggctctctaagggtcctgccttgcttgaaaggtgaggaattacctgtcttgctgtctttaatgctcagctaactagtccaagcacttgctcaccaacaggaggagagcagaaacaatgaagccattttttttttaaagactgtcttctccacccggcttaccatgatgaacagcgtcaggaggaagatactcagcgccatgatggagaagctatccaggaaccaggtacaccagatgacagcattagagacgccttggtttttcaaggtctccttcagcctcagctccttctccaaaacaatgcccttaacggtcatggagacagagtagatccacgccagcaccatgaagatagggaaacagcgattcaggatgatcatgaagctgaagcgagaggaaaaagcagaacagagccagctgtccctggtagaatcaacgtaaaatacttattgaatggagagttgagaatgaagcccgaagggaaggagagcagaaaaataaatcgttggaccctcactgggttgagccctcttaaatacctttctcatttgtcatttctttctttaaggcaaaatggagccgttctggacagcccagatggaggatgctctatatgtgtaggaataaaacataccatctctttatagtatatatgccatatagtatatttagatcttccccatgaaggcttgtgggaaagactgtagacctgatggtgtgggttgtgatctgaacaaggcaatgatccaatagtcattgattccgagagccatccattcgtaagtggagtagatcctgggataggctctcggcaagcaggacggatttgacacgatggaatcacattagggtaagcgttacaggtttcccctgtgaataatgcactggtaaagcccttgggattattatctattgaaactgttgggtgttgtcaaaggaagggcccagtgcctagcgtgggaggatagtttcactcaaaatggccctagggagggaaccaaccaaccaaaaatcatgcacttccgaggctggccgccagagggctctcccatactgaatgactccgattcccacaggttctccacactcacccgttttcctgccagcccctccccttctgaccctgcaagtggacctgggctctccttcccatctctgcctcttatccaaagtaaaactaacttctgaacagcgaccgttatctctgcagtcttctgcagagctggagacctgatggggccacagtgtcgagcactgctttcccgtgtgtacactgggctttattttacaatctctccagctggccacgggactcttttcaccacgttttgccatctctgcttcccggatcccacagtcacacacactcgtgctacagtgactttcccgtgatctcaacaccccaggagttaaattccttagccaactataggtcagggagtgtttctgaccccatctaccatgataataagccttctgagcacctctccccctctgtccctttctccaccactccaaaatctattttcaacaaaacagcaggctgtttgcttagcatgctactggtcaaagggcggacaggcgttaggatgggggtggtcagagagggaggccagagctcatccaacaacacattcctctaccttttcaccaaacacacatcataggaatgttaattggggaaggagctgcattattctgaggctcctaggtaccaggccttcttgccacgcagtctgaatctgctgatctggcaatcactgggaaaacgccctgaccagaaccttccacataccaaacatactacgaagtggaaatttaaacagcgggcatccccccacttcaacctcactcctattgtttgaacctccaatttcccttttgtacccccgacaccctatcatttatttccccctctgcttccgtctggagtgcagagccagcatcttcttcggtcagaaccctatgctccccagtcttccctcatcactggggttccttcgggagatgctgaagccttgagagcacccccatttactgctttttcagctcagggaggaagatagaggtctgggactcacgagtcatccacaaagcagggataaggcatctgttggagatagactccaattggaggctctgcctgcatctgactcttcacgattccttgctccaccatgtcctgtagataggcaaaacctccccagatgtaccggaaatcttcgacaggatccgccctgggaccagaatcccagtacctaagaaggcacaggatgaagggggaaggatgtaagtgcgagtgggtaactcactcacttcacaagcccaggttaccccacaactcggtcccttgacgaattctcctcaagctgtggtcctcaaccttcctaacgtggcgatcgtttaataatgcagcgccttgtgctggggtgacccatcccccaagcataaaattatttttgttgctacttcttaactgtaatcttgttactgttagaaaaatataaatatctgtgctttctgatggtctggggccagccctgtgaaaggactgtgacccacaggttgagaaatgatgtcctacatgtttcccaaactagccagctctactttggggtcacagtgctaactccgatggccatgactcacgaggtgattgcttcggtctacctccatctgcacaaatcatactttctcccatttagcttcccttcgttgatccataggctgcatttgcccttaatcctctactcgctaccaaatataattcaccatgagttttggagaaacctttcaagactgagccatcacctgtctttgatcttattggtcttctccaccacatctatgtccatccgaatcttgtacttcacatgaggaggtaaggagctggcccagggatacatgccagggaacaccactccggcccagaacctgttctcctccaggagagacagggctcgttgggtgagctgcacttcatcatcataactttcaaacttatccaggaccagacactgtggatggaggatcacaaaggtggggagagtctgaggcccaaatgtaaacaaaaaggcagaagaaactctactgctcaagggatgggtcccccacaaaaaaaactatacaccaactatgtatttaattacagggtctgccattaatttctttgtgtgcctaggttggtgtgtgtgtgtgtgtgtgtgtgtgtgtgtgtgtgtgtgtgtgtgcgcgtgcgtgcaagggccctggaaatgatgacaggttcttatcactgaagagttaatggagactgctctgcccagatgtccaagacagtccaaatatgcaagtcctcaaaacgacacaaatactcaaggttctcactccccagcatggggaggcgagggagtggggtcacggtggacacagggctgctttgaagatcagaaagcctgaggataaaagacttttaaagagagaagcattcctggcattgaatcttcctggctctctccaaacacacacacaggctatccagctgagggacgaaccaggaagaggaaagcaaaggaacagacagccaaaaaaatggtctcatctgagagcttggtctcatgcatggcttcatggtgagagagtggaattatcccaatatctcttttctcagagagagagagagagagagagagagagagagagagagagagagagagatccataagagagagcaaaactaagaatttcctttcaatggaggattgagaggttgcccacttgtacagacttgctgaagtaattatgttgtactggtattcgttttacacggggtggggggagtgtttgtgtccatgattcttagaatgtaactcacaagaggtcagacagccttgtcttgattaatttgttcgacgaaaatttacagagtatatgcaacgtgccagagcctgccaggctcctcaggtacaaggagagaagatgacaatctcttcctgagacaaactcaaacctgatggtggagggtttgtagtgaacccatgagcgtggatagcgggcagaggaaggaaaatggaggtcggcttgaccacgaggagcagcactgtggccttaggggacttgcaagaatagagccgtggttcccaccgtccctcaagctttggagcactggctggctttaaaaagacaccaaagtctttatttcaaaatcttgaggggcaaggccaggcactagcattttgttaaaagacaaagacaacaacaaagccctccccaggtagtcacaatacataacacatggtgagtggttgggaccggaccctttactctgctaggtttgggaatttgactgaccaactgaggggtgtctcaggacacacactttcaggctaagaccaagagaattctggccaagccctaaaatcccatcaggtcaccgtggggttctaagcaaaagtatgacaatgagatcagacagggaagtcacaggggcactaggctagactgttgagtatattctggctttaaagaatagttaactccaccaggagaacctgggagtgagtggctggaaacttatgtgtgctagggaagaaatggtagagatgctcctgggttaagggccgatagaaccagggtcccttcctctctctctctctctctctggcccagagttcttcctggcacaccagggctaagaggcatagcctactgcacacatccagcattgcgtggcttatggatggattcttccacgtgcttacaatgtcctgtaagctgaccagtgaatatagtttatccagtagcccaggaaagttagccacaagagcagtggttctcaacattggtgggaacccctttgggggtcgcatatctgatatccttcatattagaaatttacattacaattcacaacaacggcaacattacatttctgaagtagcaatggcgtgttggagggggtcgccacccatgaggaactgtgttaaagggtcacagcattagaaaggttgagaaccatttctccagaggactggaaacttctaggcagtcgtagagtgattgtcaaacccctagtcacttgattaaggagaaattaaaaaaaaaaaaaaaaccagaaacacaaggaccagagagctaagctctactgtactggcaaggagcaaggagacccagctcacgccctgtgaacccctcacttctgaagcttcttcctgcagaggattagaagagcagtctccttggagggtgttacaaacccatcctcactgggttttctgacctctgagtctcagtgttccaggaaaaaagggaaggtccattcaagatgatatggggaggatcaacagcgcatgtgaagaccaacggggccaagcagggcttaaagggcttgcaatcttaaaaggaaattagattggtatttctttaagaaacacaagagtagacactcacgtcacagagctaaaggaaatagatattcttcagtcaatcactgtcttgcaaacaggacttacttgctaggcttaaaatgggccagccctaaaacaagacgaaggactttagtacatcacacgccaatgaattttcatctcttccaggcagaagcagctaatactctgttcatagttatgtgtgtgtgtgtgtgtgtgtgtgtgtgtgtgtgtgtgtgtgtatctaatgtatagatcattaaaacagctggggaagccagctgcagccagtttgtcagtatttaacccaacagcaataccatcactatgggagacaggttcagcagctgctagtcgggcaaggacactttgggtgtgagctgctacaaggagataacagaacacgagtttactatctgggcagtggtggcacatgccttaaatgccatcactcgggaggtagagacaggcagatttctgtgagtttgaggccagccaggcctacggaggagttccaggacggacaggggtacagaatgaaaccctgtttcaaaacaaacaaacaaacaaacaaatcacgtacacaaaacaaaatgaaacacgtgttttaagtttgctttaggtctgacatcgacgcctgacaaagacaggcaataaaataatcagatttgggctgtttgtcaagtttagaagtagcatgtgtttaaataagatgaactagacacagacaaatgtcacatcttctcactcattgaggggactagtgagtcagagttgtagaagaataaaggagtctctgctatggcctgggaggtatagcaggaaaagggcccaggaagacattcaagatgggaggccgagtcagagaggggagcattcactgtggggtctctttccatgcagcagagtagctatggctcatgacatcctgggatgggatccccagtacaggaaagactagtggctgaggagagaagagctggcaatcgctctcattctgtacatcgtagatatgagttcaactgtcaaactacactaccataatgatttataactattatgtctctctaaaaaaaaaaggcaacatttagaatgaatttgaagttaaatttctaaaataaaatcaaaattatctgtgaagatgaacgcacttttaggcagtttcacatggatactgcacattcactcggcattgcaaggcactaggatgacgtttcctagaggtctgtgctctgatgtccttgctttaccaggaacagatgggaccagaggcgtgaaaagccttgttttagttccccacagctcagaagcaaaatctgcacgtatgccttcggtgtgggccttggaagccccggtgtgtgcatgggtgttccccattgttcctttgggaactaagccataggccatatgcaaagtcctgactttactgaaggtctctcgccttagagctgtactgtctagtggaattttctgcgatgaccaacttgttctctatctgtcctgtctaatatggcagccagtaatgacacgtggctattgagtattacagatttcattagtgccatcctaagcattgagttttcaggttcgtggggctgctggttgctatggggtcagcacagttccaggggtaataagtgccttctggtctgttctgttcaacatggtctctggaatagtggggttttttgtttgtttgtttttttttttcatgctagggtgtcaacaagtattttctgaactgaattggtttgaatttgtgagccacaatgctgtaagtgtggctatccctctgtgctttgaacaaaattctatgttttttcatgaaaaaaaaaaaaaaaactggcagcaattcattaaaagaaaaaaaaaggctttttgctgtgattcaactagggtctaactgttggggaaaatagagctgatataaacaaatacagtgttaaataggaaaaaaaaaaacaaatacagtgttaataacatgacttccaggggcatcagctcattctctttgaaccttatatcttaatatactggaataaacagctgatgttttcggtgatattgttggctcctgcgatgacgtgggctccatcctggctgtttaatcaggcagctgattcatagtcatatttcctgatgtgtttccctagatggggaccttgatactctgagaaacacagaattcagcaggttctcaaatgtttacatctattttaaaacctccaagccggtttcccccttgtcaccttgggaagaggcacagcacagggttggggtccgaccatcctctatgccaccccctcttgctgttccctgtggcttctgctgcctttgctgtaatttgagctgtgcccaacttcagaggttcattctaaggatcacacgaggcagtgattgtaaaaggctgcagtgggtacctcacaccaggattaaaaagcggggacagggggtatagaatgctcacctagcgtgcacgaggccctaggtttgctttccaacatggcaaagcataacaataaacaaacagcaactacaaatatcgaaggtttactccatgccccaaactggcccaagggctttattcgtatgaacacatttcatctccagaatcacatgaaggccagttactgtggtcattgaaagcccacaaaatacgctgattccccttggggcagaatctcttttcatccccaacagtacagtgcactgtctcatgaataacgagggctttataaataccattttactcttgtttttgtaaaatatctttgaacgtcaataaccaagcgcctctcaagttcctgccacggttagtcttcattaatgacagttgttcaccagggcaggcgagcagttattttcttcaaataatctgtgtgaggacacggactgtcctgagctaatactccacagcgttccatctggccagaacactgctgtggccggaagccaaggccacctgggcaatggggtagagagggtggtatctactagctgcccatcggccagtgggggacttccagctgctgctgcccaggggaaggttttataaaaaccaaacacaaatatcacattaccctcaccaaactttctttatgaggtcaggaggaagaaactgctttgaatgtgagtcaggtatgattcaaaatgtattctcgtgggaaggccatctgcctgtggcctgactccctcctgatacttaaactaatccccaaagttaaaccttggctgacgggcacgtatattggaacatgtatgtgctgtaagaggctgagctaataacaaatccctcatcagaggacctggattggatgtatttagcctattgtgacaggtttgtcatgtacaacacactgggttctaatgaggccatggagtctatttttaaatgccatcatgttttatgtcatcgtgggaagtgtgatgggcagcaagattggctaaagtaaagtgctcagcacaaacccagcatacctacttggaaaagtgaataaaatcagtaccctctgccctcagaagtaaggtttgagcaaatgtcacagcaggaactcagaatctcagtgagaaccaggacaacgccctccctccgacagccaacaaagcagagatcgatcaacacacaaagcggtctcctagtcctgcccaccgcccccaacttctcctgcagcttccttccaccaagtgaagttcacagtggccaggttctggaaagagaagccaccctgctggagagaaagactggagcagctgtgcccaggcccttgccagaagacattcatttgttgacacagctaaacaaaacatcaccttggaggagaaactgcaggggaagcaagctcccttcttgagctgtgacctcttggtatccagttcataaacattaagtcatagattcatggaattatctattacatggtaaactgtgtctagcagaggctgtgaagaaacatctttcttttcatttgaacttgataatcaaaggcgcctggcacattgtgctgacagttgggcgtaaatagccatattttgtccatgaaacctcaaaggcatctaggtcggtcttgggagataagggaggcattgaggctttttaatcctgcattacatctctccaaaacagctgataagctctagtggaagcctcctgtggtcccgatagcattcacgcagacacctggggctccttttgaaaaacaccatgggagtgggcaaagatcccagaattagtttcctggcagatgtaaagtgcaaccttcacaatttatttccaactacatggaaaaagccacggtgtaaaaatcactctgggctatttgggttgtttgggatggtgaattagaggcaagaataaatcaggcagtgtgaacaggcttctgaaacattcactcacaaagagtgaattgaattgtggctaaccaataaagaagatagataggtagatagatagataggtagataggtagatagatagatagatagatagatagatagatagatagatagataggtagataaatagatagatagatagatagatagatagatggatagatggatagatggatagatggatagatggatagatggatggatggatggatggatggatggatggatgggtggatggggtgggtggttagatagatagatagatagatagatagatagatagatagatagatagatagatagatagatagatagatagatggatagatggatagatggatagatggatagatggatagatggatggatggatggatggatggatgggtggatggggtgggtggttagatagatagatagatagatagatagatagatagatagatagatagatagatagatagatagatagagtattgaaatgaataaaaagctgaggttgaagaatgaggactcacaaggaccagggcaaatgccctgcgaagccaccagggcaatggtttctacccagctggtttcaatgaaagtcaccatcacttgactaataacttcccaacgtttagctctcctggtttcctgttccattgttccaacaacacctgggggtgagggctagtgtgttgaataataatggggctatatgtgcactgaccagtaggaccattctgtaccacaaacagagttctgcccactagtggttgttatctgaatagcttgggttttactcatttttcagatagatggatagctatgttgtccccagtaacagagcccagacataggtgttgaagagtgtgtcttgtcacacacagaatgaagcttttatgagccatgctggccaagttcagacatcaccagttgtaggatttttggtcacactcacacagtgggctctgaaattgtattatttactgaaaaaaaaaattgtttctagttgtggtgtgactcagcccttagcacacaccttaaatccctctggctggaattcacacatgcccaggtaatgatggcaaagttagtatgtagaaggaagcacccgtgtttaaaaatgatgtctaattgagtgacagagaaagtgacaaattggagaaagatttgacagaatatgatatgcccaactctcacaaaaacatataggaaacagaggcacaagagaaaataaaagaggagacagttttacccagagagaggttgaagagaaaacaccctagacaaaggtaaagatagaatgagccagagaatgaacaggagctagaagattagagctgatcagtagagttagttttaggctaagctgagcaaaaagtcagaggccaagagagaagccagattgtgtcagtcagcatggagaagagtttgagccagaacagtgaaccagccagccagaagtccgaacaaactagaacaggtgagcttacttagcagtaagtctcagaggctgaaaacattgtaggcctaaagtagattgtttggtggctagaagcttccagtactaagcctaggttggcagatggaggcagaaagccttggagacaatgacatcagagtaaaagttactttttttgccgggcagtggtggcgcacgcctttaatcccagcacttgggaggcagaggcaggcctatttctgagttcgaggccagcctggtctacaaagtgacaaagtgagttccaggacagccaggactatacagagaaaccctgtctcggaaaaaaaaaaaaaaaaaaaaaaagttactttttcaatcagcatttttcaatgtcacatctattctctgctcaggttcctgcttcatgtgaacttgtctggtagattcatacctctgcgtctcatttaaacatttttcttctgcctaaaattatctttctggtttccttagccagtggctttaacctttgaggctcagggcaaacattattttctgcttaggtttaacgtttattggtgtctactttatgccactagagatctactcaggaatgctgagaaatcaaaatgaaaaacaagatagaatttgagcccttgacgtggtcaggccagcataggtcgagtgtggacagatcatggctgggctcctgtggaaggaagaaggcctagagaagaaggctagaaaccaaccctactgagacctgaaacgtggatgtgggcacggccaggcaggtctgcagagaagtaagggaagggcgctctagccaagctgagaggtctggagcagtctcatagggtagaaagaactgtggaggcatttactttcacagtgatgagacattcctgaggactggtaagccatatttcacagcgggtttgggtttaagcaatatctccttggagaggaggtgggagctgtccagaagcagcaggaacctgaagggctggggaggggctaggagagacgacaggcctctacaaggagcaactcacctcaaatattgtaaaatagttgctatctttattggattcaatacgtaacttgagcaaatagtattttagggcctctggaccttgtatataacagggaaagaacttcatcactgaagtcagtacagatctgggttagaactctgaagtccctacttacctgctgtgacgtggcagggagtcaagcctcttagaggctttgccttaaacgctatatagtgacagcagttatggttacctggcacagaggagggctgcaagagatgatagcgtccagcacagctctttcccccagggcctatgcacatctctctcctccactggtgtcccaagcctacctccacctgtttgcttttctctgtgtaagttctaggtctttgagagatcaaagaggcataaaatacagtgattgtgagttgcttaggacctaatttatagcccttgaaataataattgcgcttatggcatggattctgtttccctctctaattctcccacaataccttcccagtctctggggtcattgagttaacagaagaaagtaacatgggtacccagccaatatttgcacatctaattctacaacacccaatctgacctcatctctctatccaatttcccccttaagttagcctgaaaaatacatttcctgagaacatcatggttggtggtggtggcatgtggacagaagaattaaaggtgccaaggaaaagtagttaaaaaaaaaaccactctgataattcaagaaaataaccaccatccaattcataaagagttatgcacactggctgagctgatagccaaagaaaagcaattagtgactacatttttttctcaagacttagcaaaaggtagctgttattgattaaggtacaattttatgctttgattagagatatttttattttaaagtttggctgaattcagcttcctgatatgaaacttaagacctgaaattcaaatgtactaagaaatttaaatccactgtgaattgtaaatagtatttgatttatgctaggcttaaccttttgctgaacaacaacaaaaaaaaaattgaagaggagaagtataaatatttcaactaaagggtaatcagaaggataatttgtggatttttgtaattgtgtttttctatggaaaacatgtgaatagagacatctataggttacgaataaaatgtgcatgcatatgaagttatgacgtttacctaaatgtggatcagcaagatggctccgtgggtaaagtcacttgctaccaagcctgaaaacctgaatttattaaccctaaaatcccatatggtagaaggagagaaatcactctacaagctgtcctctgatttccccacatgtcatagcacaccctacacagccctctaccatacacacacaaagtaaataacaaataaaccaacatactccccataaattattacctataaagtcctcactaaatttcaggctccctagatttggagatgtgggtaatgggatgttgtccgggaaaagccactctatatgtgagagatgtgcaggtacaaatgtccacactagcatggctgtctctagacaactgtccaccttctaaccaagaggtttgcctcacttcaacctgtagttctcagggtcagcagaaagccagtagttggctatgggatgagggacagtcaccagaaagctttatccagaaggtagctggaggatacggacgtttctcagcccctggttcactgtccaagtccagcgtgccccagagctgtcctcctaggctctggaaatagacagacccaactgtgactctaagccagttcacccgggctaagccagaggtcagcatgagacgccatgactaacgcttaggcattttcgagtgtaagaaaaggtacagtctttactccgttcatggttcagagcagcagctgccatgtgtacatacatgctcttggtgtgagcccagagtgtctcatgtcatctccacagccgctctgaagaggtattggtcctaaatgttctaaatgaagagcccccaaagcctagcatttgcacacaggtctgatgaatgtgttaagtgctttgctgccgtgctccctcacatcctgttctccacaatgaccttgtatccctacttagaattgtacattcaagaaaatcaagccttagagtgtcaaatttctcagaataactcataagaagcagagagtccagtccataagccctgtgggacaggtcggaccgctctatgtgcggcagtttaacctggatccacaagacagattcaggagagtggatatcctacagggcactccgtccatggaacagacctcaccctaagcaggaaggaagagacttagcccttctggtctctgagaagaaaatctactgaatcactctcacttcccataacgaggaaaatcttaaagatgtcttctttgttctcagagcttctgttgtttttcaatatcacaattaagcatcccattgttatgggtaacagaattcatttgcctaattttccataagtgtttttggtttgttttctgtttttagaataggcacggatgtaggctcctagattgtcccatgaggaagtgttccacactcattagtgcaagtcccatgattgaaaaggaggtaccgagctggcattcttaaataaggcatggtggcaacacactagcttccctgtcctggagaaacctttacaactatcagagaggggttccacggcaagcgtgctactcagggttttcaaggctcctccagatagcccaaaacacaagagcagatgctgaagagctgaggcagaccgctgtggcccctgtccctcactgtctctcccactctgacttctccttcctgtcccttaactctttgcttccctcaccactaccacccccacccaagggcaatatgataagaaaccgaatcattaccacagcctttatcaaaagccttgtaggggtccccacggggaggccactgactcttggtcacagtgatctgtacgtcaaagccctggggaagtcacagtggctgagaaactagatatatggtcagcagtttcatgagcacagagctcaccaccagctgggggccagattccacttaggccaggttctttggtacttcgattaagatttgacagtgattagtgcttcttatatgacagtgtcttgcatgaaatagctcatttaattatcagaaccagccaagtatcgggtcaatactcctaaaatccacatttcacaactatgcagacggaggaacaaacagtagataattgagtctagcgaaatctcaacccagagacttaattcttaactgtttaagagaatgacactcattacgcatctattgctactgtattaaacacaagatgcttagaaaaaaacaattcctttagggctggggtatataggtcagttggtagggtgtggaaggaaggaaagaaagaagggagagagggaaacacaaagggagggaggggaagggagtgaaggagagaaggaagaaaggaatttttcatacacaatacaaagtcaagtcaaagacaagagttattcttcctatacctcacaaaaccattgctgagaaccagtataggagcaaatcagctctctggcagacccatacccatgcgcaggctctgtctgcctaagattaagacaacggggcagcggtagcaatggtgggcctggggatgggggcttaactgcaagaaaggaagagatcaattggtcactgtaaatgccccagatctgtaagtatacgtgcagtaccagggcaatcaaggggacttctgagtcagctggtctgggttggtgctcagaatatgttttagaaaaagcatccaaggtcattattgtcttcaggtaagatggggattgcttcaactcgggtgcttcggccaccatgcttcgtactagctaagaagatgcctcaggagcgtgtgcagtgatgtcagcgtcagggttctagagaaggagggtctagggaatgccgtggccccggggcagcgggagtcctcaagagcagccaagaacacagagccaggccttttctcaccagtgagttattctgaggactcaccatctgggacagaagagctcattcctagaggcctcggattaactccctttccagtttctagaagaaacttcagcctcctaatggccttagttttttggaggctgaggcccagcccattgggtgcgatcaacctttaggtgtgaaaatcttggaggctgtgaggttgagctctgaagatgactaaaatgtgcccactaatgccaggtaacccatcttgacggtcaagcccgagatggacacacagacagcttattcctacttgaacttgaaaaggagcctgaagggtctgaggggagggctgcagatcatgaaggaatgaatttccaagcctgtgagacagcagaaggaagacctgagggcaaagtctcaaattgcagatgtgtaggactgaagagactcagcagctctgtggtggggcacttgcttggcctgtatgaggccctgggttctacccccagtaccacaaagaaaacaaacaagaatgaacaggtagatggtagcaaaagaaaaagtcactataggcttgagcagacacacatttcatcttcttttgggacaatgcctccctcacttcataggaatcttgcttaaagtcccccacagtggcatgtgttccaggcctcccagtcagaactactcccctccccaggcattaagacccagaagtctgatagagggagtggggcgtgggaggaggccctttgggggtattgcttatgctgtgagaaaggcgttcccctccttctgtggaattttctggtgcaaggatgagtgctgagggctgtcagcagctgaggcattaccaatggagagaaacaggctggatgcttctgcgttgagtcattcgggctttaaacatttgagtgatgcaagcagatgtgtgtttggaatgtgatgctggtgtctgcgtggagggatgcctggattaacacagcgcaaaccctggaatccagggagaaagctgctcagacaggctggtacaaggcctcaagccctccagagcccagagagcaagatgtagagttgagagataattgggaggtcgaaaacagacagagcaccgtgactgggcgtggcaggggaagaaagaggtcatcagggctggctctgaattcaggcacacccaaatttggactctgtttggtactcctaatggctgtgggatcttattcaacctctttaagccttggcttctatgtctatgtactggcagcgataacactacatgctctatgggattgctgggggacgagataaggcatgtggatacaaaaacatgcagcacagaagtggcaccatgtaatactcggtctagaaccactctctctgacagtgaaagagaaaggaaaattaaagatgaagttcttggcttaagaatctgaaaaggctactgaaattaattggcactagaagtgcaggaatttactaggaaaggagaacatgagtttattttttgacacatgctgaatctgacatgcccttaagactttggagtaagggtgtccagtaatcgacgagactcagactcaaggtttggtggatactggccaacagaaggtcattggaacaatggcagacaggagatatctaggaatggatgtgtgctgaaagggaaaaggagagagccagaggagtcatgaagttagcgagaggtgaggacaattgcatgcaagtctagaagagaagatgctgtcagatggccgtggacccttatgtctatgtgggaaggatgaaagactgaatccaacaccagctgactggctaacaggtctctagcctcacccatgacgttatctttaagaggctcactatggtcctcaggaggattgctgtctcttacctccaggtattgattagccaagcgtaggaatcggtcagtgatgttgaatatgtccctccagtcaaagctggtcatatcatcagcctgcttctcttggggaccgttagagaagaagtttaatacggcttcggtggtaatgccttcttctccgagctgcctatttatgaagtctttgacggttgggtgctgcagggtgtccttgggaagaagaacattatgtctcagaaattaagaattccacaggctctttggccttagtctcagatcatgtcagatttttaatgattactgattgagacgtgaaggctcactaaacaagccaggaggcttgaacttctattgtcttattctaacacaaaggcttctatgtagaggagaggcaaggcagagtatgggagaagtattgctgagcatgtaaaaataacatagaagatttcctttttatggccttctgctttgttctcattttaattgccttgctattgagagctcttgcctcttgagctttacaaaattgcaaatgaggccagacagacaaaagtgaccatcttagcagtatagagctggccttttgaggagacacctctttgaacctgaggccttcaagagaattcatgggaaaaatactgaccttgtggcaacttttaaattgtcccacagaatttaagaagcctattccccactcaacaccagagatgccacttggtgacatttccaggctagtgcttgaggttctgtcgctatagcttggcctggctgaagttggaatgaactatctctacggccctccccatcctatgttgtgagcatccttactcggatcacggtcatctgtgtgctcttctcaaagaagtaccagatctggggccccacttcctcccaggcttttaccaacttcctaactcgatccagttcttcaaaagttgagttggcctaaaatagacacacagaaacaaacagaagaaattgtaagaacctttgcttctgtcttttagccctcaccataaacctttaaggtgttatattaaggcaaagctctttctcctcctcctcttcctctttataataataataataataataataataataaatagtaacttaatattttaagtatatgggtgttttgtctttatgtatgcctatataccacacgtgagctgccatgtgggttctgggaatcgaacactggtcctctggaagagaagccagttctcttaacagctgagccatctctccaacccacaaggggcttcttggaagtgcttttcctttcctggaatattgccattcctcagactctaggattgacagaatctaatttgttagtatctcagagatacgtacaataatgatgctactgattccaagcctcattgagttgtacttgggattctagtgagcaaatatttatcctccccatctttgcctgttctaggaagccagagatcaaaaaatgctgaacatttccattagggatataagtcacacagtgcgaaagaaaagtccgttgcaggattgcaggctacttcggagagggtgggtccaggcagggcaccagagcgaggcattcctactgtgactgtgcttcagggaggaaacccaggaatccatttaggggaaaataagccagaggggagtcattggcaggagcctatttaaacacacacacacacacacacacacacacacacacgcacgcacgcacgcacgcacgcacgcacacacacacactctacatgcacatgcacacacatgcacaccgttgtcttctgggaggtcccagatataagagaacgataccagctgggctcttacattcttcattatccttcgagcagcaggggaatctggagtaaagaggatttttcccatcagcaatggctttgccgccctccaggctattttggttaaagggtttgactccaggctctggatcaatgaattacaaaaggatgctgtcaagagaaaagggacattttttttttcaaagctccccactgctcataactaaacaaggtcattagtgcatcaagtcacatgcttaactcccattcaatgccacactggatggtttgagaaataatctaagttattaggctggaccctactaataacaagctcccactaagagagactgcggtagtgtctcttaacagcagcctccgggctgagacagagggcagggctgcgcttgtgcttttttctgcttaaaagagaggggctaaggaaccggcttgtgatttttgcaagagaccaaaggaagtgaaagcccaaatcttccctcatcccccaccctaccatccaccccaccccaccccaccccaccccaccccaccccagccctgcagctgcaatctcagctgtagtctcaagtcattccacatctactaactccttctcttcctgtgtgtaactgtctcggccttcaactccttctgctgtgtctcttgctgtcttttttttgtaattgcagagcctatcccagaacaaaatagtgaaagtgagggagaaggcttgccaggggcgtgccagccctgtaggcttgccaggatgctattggcctgagctttattgtaactctgcattgccttctccttcatcactcttctctgcccctggaacttcgtcacagttcagttacatcagtgggaaatgtcccctcttttccctttccaagtgggcggggtgcctcccatggctcatgcccagtcttctatgagcaccattctcctctacaaggggaaggaggatttctgggagaaatctctttgcccaaggccacttaacaagagcaaggagaatcaaccctggcactggggtttcttaaaagtgttaaccagtggctctcaaccttcctaatgctgcaaccctttaatacagttcctgatatggtgacccctacccctaaccataaaattatatcactgctattccataactataatcttgttactgttatgaatcataatgtaaatatctgtgtgtttctatggttttggtgggatcacaacccagaggttgagaacccaacatgctaacccatctttgtgtgtatctgtgtgtgtgtgtagtgtattgtagtgtaaatgcatgtatatacatgtgtgtagaggtcagagggcagcctggggtgtgccatgtacctcattttatcactaactcgggacctggtaagtcagctgaccagcaaacccaccgtcttgtcttggcttcagctgtgattaccaatggcatcacatctggctttgtttttctcagtggattctggggctagaactctggaccttgtgcttgtgcagcgagaactttaccaacagcccagcttccccacatccctgacccatcgtcttaatgcacaccagaggccactttgcctacaggactcagaggacttacttgttcttttgtcgtaagaataggcggggtctttccttgtggaatcaatccccaggaaggctttatagttattgtcttcataccagttaaaggagaacactcgggagcctcctccctctgggtacccacacaggaggtcagacaggatgctcatcagctgtgtgaaggtctcaggaccaccgttctgcaggagaggtctgctcacccatagcaagtcttgaacacttggccgatggataaactaaggataaggaaagggctttgaattagatttttaaagttttatttattttatttcatgcacattggtgtttggcccgcatgtgtctgtatgagggtgttagatcccctagaactgaagttacagatgtctgtgacctggggggtactgggaatggaacctgggtcctctggaaactcagccagtgctcttaacaaccgagctgccattgcagcatggctcggaagaatctaaaagcagacagaatgaaggccgttttccttactcaaagggaaacataagttttctcagcaattcttaattcatctgcagaagaagaaaaaaaacctgctgtcatctacctgaagataaataagcaagaacacaaaagacgctaacaacggtctgttttcctttgttcgggttccttgggattgtgtccttggaaaaacgcagagactctatcaccataaggtaatcgttctcctgttccagaagtgcaaagccatggcaaatttctacgactgaaaactttagaatgtggtgttctatatttggaaaattatcctttgtaagctttccttttatttatgtgcacttgtgtgtcttctgtctgtgtctgtatgtgcatatgtgcatgcagatgactgcagatgttagaaggggctgttgattcttccagaactgggattacacatttacagggagctgctttgtggatgcttggagcagatcgctgtttctcttcaagaacagcaagcactcttaatcgctgagctgcctctctggctcctcaaaatatcttattaacttcattttatcccatgtgagtgcttccattcaactgaaacgtgtggtttgttctctctccctcccaccccacccccatttgagctcaagagagtgtgtgtatgtgtgtgtgtgtgtgtgtgtgtgtatgttttaagattcaagcaaagaacagatgtctcacttattggatgaaaaatctcaaattctatgtccactaagaggaacctggtattcttctcatctctctcctcatggtgggtgtcatggtacccgtggcttcatctttgaaaagtagatctgtgatgctgagaaatctgggggacactggcaagtggcaccagtgtcctggttcctatcaggccacttggcttcattttagggaaaatatcaaataaaaacaatgctgtgtttattccctaaccacaccttactagtcacattctaaggaacttggaaattaaaaaaaaaaaaaaaaaaaaaaccattaggatccaaccaggcgtgacggaaaacattctcccacttctctctcagcgatgtttacctgtggtctctctctttgtacacatgccaacacttgctttccgaaactgatgagcgccgtgtggaatccacacagtgagtcacttttataatcacagtctacgcctcagtaagaaagtcagattctcaggttgcttcaacaacagtgggtcttatgaccagaaggggctattatcattattatgctgcttagttaatcaaagttctcagaaatgaagggctgtagcggggtcaaatgttctgatatcaattaatacacactgggctatctgctttaacctggttctcaaacgctgagacgtcttatctaaacaggcaaggaaatcttccggagcacccacacacagaatgaagtgttgatgggctttgggaagctattcacatgctctacccacttcaccattagtacacagagctgagtttttttggggttttgtttggttggttttttggggggtgttttgttttgttggtttggtttggttttggttttttcgagacagggtttctctgtatagccctagctgtcctggaactcactttgtagaccaggctggcctcgaacttagaaatccgcctgcctctgcctcccgagtgctgggattaaaggcgtgcgccaccacgcccggcagagctgagttttttaagtgctagaaggagaaaagaaaatgttagaggctcccacggcagcaggtggccagcagtattcactctccctctccctgccaggcagagcttctgctttgccatgattgagtttaattttataaacacagattccaagcatgttctttcccaagttggctgagccaaggcagctgggaaaaccaaaggggaaaagtctggggggagaaaaaacaacaaaaggttttccatttcacttctccttgccttatactcatcacacataaagagatgccttctcttcctccttgtctgtgtatccaataaggcttgtgactgtatttgtgtagtctcttcatggctcatacaacaatcaactcctaagtggaggaaccaatttcaacatttgagaagtcttatggaatcagatatgaattacgttgtatacgtatgtcataaaaacaacacgaaacagtcaccctggagggaggaagtgtatccatgagggtaaagtactaaagactgtagccataagcacaataatgaggcactgtgtaagcatttgctattgttgtgggcggcacgtggctcactgctccaccactcagtccgagaaagccttagctacacttgcaagtccatgaagagtcaagctactgcagacaagttgtgggttccactggtgcttatgtcttgatggagcatcacaagaatgggtttttttcttttcccctcctacctaggaggacagatggtgtaggacatgagctaacgctgttagactactggataagaagagccgatgaatttctccttaacaggcaagaggtacagtggaattagttgatataatgaatatattaaaaatggtctgatgacataacaaaacagtggttaatgacactgggcctcttaccttttgcattcttggtgacagatcagataatattcctccccaaaatctcaagttgattccttgagaactgctgtccaggagtgtggggagctggaatcaacaggaaaaaacatgtttttaactgtagttacaggcctagggagatggctaagtcagtgaagtgcttgcccgataagcatggggacatgatttggtccctggcacccatataaaatcctgtttgatggcacaaacatgtaatcccagtgctgggaaggtagtgacagggggatcctcaggacctgctgtccatccagtctagataaatccagtgttctctagaccagagagagagaggtctgtctcaaaaaacaagatgaagagcaactaagaaagacacctaatgtccgtttccagctgtacgtgtatgtgcacacagacatatccatacaggtgtacacacacaaacatctacacaaaaatatgttctacatacacatacacacacacatacaggcacacatatacatacacacgcacacacatatacacacatatatacacacacagacacacacactcacatataaacacatacatacacacacagacacacatatacatacacacatgcacacacactcacatatacacacatatatacacacagagacacacacacatacacacaagtactatctgattttgtacatgttcgcaagctacactttcctctacaactgtagttctataatgtcactttcggaaacaaaattctttaacctgatccagaaaaatcaaaggctcctattccaagtttccctgctgagccagtcaataacagacagactcatggtaacagaaaatacagcagagtaattctgattgctggttcagtgacaccagacaagactcccagaggaagggaaaaaccatgaatgcgtgttgtagagaagagataggatctcctgagattttgggtcctgtgagcagtatctctgccagggaggcagtagactgttctactcctattgggaaggtgacccttgagttgacaagggtctgagatgattgtaaggatgagttgagggcagtatcttgtgcacagaatgggttggggactctgcaaccaggtggagagaggaatgggaagccagacatcgatcagcctggatagagaacctggtaaaaacgagattaggatctggaggagcaggagcctggggccagggcgtgagatgcatttttgtgtctggtcaacactttcttttcttaatcttgctaatcatttggataataatccaccaatcatacatttgctaagcacgtgtcatttgacctccaaaggggaggttcacaggggtcacagatcagacaccctgaatatcagatatttacattgcgattcatcacagtagaaagattacagttatgaaggagcaatgaaataattttatggttggggtcaccacagcgtgaggaaccatattaaagggtcacagcattaggaaggttgagaagcaatggtctggtgtgtgcttagtggcccgcctgcattctccttcctagttattttccacgggacgataaatgctaaggcacacatgttttggagaagccatttacatctcagaacgagctggctcccagcaagcctccctctgaatccacccaccagcttcttaaccatgtggctataaattacaagataacttcctcagggctcactcttccttgaattctctccccgttatcaattccaattcataagacctgctcctgccaaaagaaccaggctgtaactttacttgaatggaaacacttccagaaaaggggtcaaggaccaaagtggcaaatactactattacatatgtcccagacacctatatatgcaagttctcttaatatttcaaatgacaaataactctgtgtcatcattggggttggcactgataacttgagatcaaggtctaattagacttcttacggactactggatctacagatagggttgctatctctattaattgtggttggtctgagtggttcctgggcagtgaagctctacttaagaaagtgatgtaaggacctcacttggggctcctaaagacctctgttaagattcttgaaagacaaagtctattccttccccttggatctgctttctgttttccagtgtgaaatgaagtgtaccagctccttaaacatctcgatgatagtcactgattcagtggctatcacttcatcagcacaggaaaggatttgcctatgattaatagtttttttttccccctctaactcaaaggagctgatctggaaacaatattcatttctaagctgaacatatacccaatgagtgggtagttaggtaggatcaggttaaagtgtcttcgtgaggataacatggcctctgggagacagtggaagattctggactcggggatgcgtaacttgtctcgaaagcatctagaacagaagttaagagccagtgaggctgtggacactgggcaggcagccctgcgtgctaggttcctttcccaggagctgctacaggaagcccaggtttatccgggagggaagttgttgctaggcaactggatgactgtggatttaaagcatgtttgttgcagcctgacagttgttaagcattggataaaaagagaggaaactgctttggtgctgagggggcaaccaggagaggcgccctgcgtgctaggaaatgcgtcatgagtggagaattcagactcagttacatgaggggtgagggacatgccaactgtttccactgggagaggtcatccagacgtgctgtctgcctacactgggaggaacagtgtctgaaggtctaaggcagagggtgggctctggattatgtgaacagtcaagttacgggactttccttagtgcgacagaaactaggcctccttccctcctgacaacttctgccccagtgtctgtttcttcttctttttttttattggtttttcgagacagggtttctctgttcagccctggctgtcctgaaactcactttgtagaccaggctggcctcgaactcagaaatccacctgcctctgcctcccaagtgctgggattaaaggcgtgcaccaccacgcccggctgtctgtttctgatgaaagcaaaactgagcttggaatccagagcgggcagcagggaaaggttattctgtgagatagaccttcctccaatgctggggtctgaggaaggagagaggggccgctgcaaagcatagtgtattctcccccatcacctgtcaccccctcttcctctgtatgtgtgtgtgtgtgctgtgtgtttgtacgtatatatggtatatgtgtgtctttgtgtgtgatatatgtatgtgtgtctgtgtgtgtgctgtgtgtctgtgtgtgtgctatatgcatgtgtgtttgctatgtgtatgtgtgtgtgctgtgtgtatgtgtgtgtgctgtgtgtttgtatgtgtatatggtatatgtgtgtctctgtatgtggtatatgtatgcgtgtgtgatgtatacgtgtgtgtgtgtggtatgcatgtgtctgtgtgtgtgtttgtgtatatgatgtgtatatggtatgtgtatgtatctctttttgtgtatgtgggtgtatataatttatgtatgtgtacatatgtgtctgtgtgtgtggtgtgtatgtgtgtggtgtgtgctgtgtgtatgtgcatatggtaggtgtgtgtgtgtgtgtgtgctgtgtggtgtacgtatatatggttgtgtttgttgtatatatgtgtatgtgtatctgtagtatatgtatgtatgtgtggtgtgtgtatatgtgtgtctctgtgtgtgatgtatatatgtggaaggtatatgtatgcatgtctctgtgtgcatggtgtgtgtgtgtgtggtgtatgtggtgtatgtatttgtgtatatgtctgtgtgtgtgtgtggtatgtgtatgtgtgtccatagtatatgtatgtttgtggtatgtgtatgtgtgtctgtagtgtatgtgtgtatgtgtgacatgtgtatgtgtgtgtgtacatatgtacaggccagaggacaacttcaggggccatttctcaggcaccattcaacctttaatgaatgaatgagtgaatttattcaattttgaactttgagacatggtctctaactggcacagagcttactaagtatgctaggctggctggccagtgaggcctaggaatacactttcctttgcctccctagtgcagggatctataagcatgctctaccacatctggcttttccacataggttctaagtattgaacacaaacccttgtatgtgtaggccaactactttactgactaagacactgactgaactacccaccccagcccaccctttcactttggaataagcaaaacatctttggtttcaaagtgtgtttcccatcttttctctaatacaaatgccactgcaatcccatgacaggtgtcacatgggtcttactgtcaatttcacaaacgtggaaggaatggtccctagaaacaaccccaaattgttagacagtagccagaaagcagtgtctgggtcactaggggatgcctgtgtgtgtcagcaggtggcccaggactcggcctctaccactggtctcacactcaagagccagtgctgaggaggtttatgaaaagagccaaggtcagtgacaacaccagaaaccagcatggctttctgcacctgcctgtcctcagaaggaagaaatacctggccagtgctgaggctaggctgaagtagcagctcagagtcctgggagttagctgacactgtgctggaccccagatgtgcagtcacatctgtgttatgattttctacctgtcgccctgagctctgtagctcagtatatactgggttacaatgacatggggtctccctcatgactgaattctgctgctctcctaattttgcaatatgggagtgagctttctacctcgtacagcttaagggtcttagctgtaattcccttgtgtgcccaaacacagacacgttctcagcatcttcagtcagagcatcttcagtctcagtgtctgccttgtcagagctgtgacacgttcaggttctgtggtcctgtcactgtcctgggtggtcttggcctgtatataataggttctgtgcacatacacactcatgtaagtgcttctggggttggggacagagctctgtcatcctcgttcccactttaaacttttagagtgagtttaactcttgaaaacaaaaaagaaatatcttattttatatatgagacccactggggtacttgtgtattagtggtaggtagggaagaaatttcattgcatgagtttttaacctggggcctgactcccgtggttcccgtgcgtctccacctcatcgagtctgtggggagttacattccctagggaaaggcttagagctggtatcagattctcaaacacaatcctaatccataaaaacaagtcaagagttactgttctgtggagagctgaagcatcaggaacccaaatccttccaaaagccaatttacgctggagggaagctattatctaacatgtgggtatcacatagcataagtacgtgatctatactgactgaacacaggcagagatgccagaccccaccatctgaaccagcagctgtcccagggactggcttctgtcgcaagtcactttagctctgaccatcagggatgctttcttcctcagtctataaagtcgcatctggtctgtcaagaaaacaagccctagcttactgtatttatctggagcctactggaaatcaagacaggcaaatgataagatcattagccccaggcacggtaaagacctctcttctaattccttctttattgaaatctatttgtcaaggggacccgaaccccaataaccactgatttgatgtaggggggcagggactacaaatgccataagccaaatacttctagtgtggcttaatggtttttaaaactctgtttctgtctgagttttgtttctgcctgccatgtacccacacacaccatacatacatacacacacacacacacacacacacaccgaccccccaatacaccctgcccccacccccacccccacctctcttcaacacatgtacactgctgcttgcactagaatttgatttctttctcttttcttcccaaagtaggagaaagttaggtacacacagcaatccagagagagggagggggagagagagggagggaggaaggagggggaagggaaggagggagggaatatatcatggaggtaaagtcactaatgtgacattattgttaaacccgggagatgtggggttcccccagagaattgtgcatagcaaaaagccactcgaaaaattggaacacagagttgaaatttaacaaactgcaggccagtgaccccagggagcagaaagcaaggccagctctcaccaggcaatgcgaagtccgtccgccccctgtttattcccggtggctcaggaattcagggagcagagccaagagtgaagcaggacacgggcagcagtgtgtagtcaggacccccaagcctgggccttttcttctctggaactcaatgttcggctagccaagagtcacagggacaggagtgcaaagtaaaagccacagtggcgtagagatggagggagagggggaaaaaaagaagccgaactgtgctacagtaggtacatttacagaggagaaagctgtgagcccaaaagccagctttcctccatccacagccacggagaagggggaaaaggactggaaactcaagatttcccagcagaatggaggtcttcgagtctgcctcatctcctcggctgagtttccacaaataaacatccacagacaagggacagatttgcttctcagcaagatgtcaaagctgtgcaccagagtgggagagaaaacaggaaggacagagggctggggtggaggagaaaatgggatggaggagggacagaggggcctgcgcaacctgggcgaatcagatgggaaacctccaacccctcaccagacagactaaagtactaaagggatacacggttgttttgatttttgttttgttttttgtgttttttttttttttaatgaggtgcgaacattttaggtatgcaggcagtaatgatgcccagggctcagctccgaacctctgggtttcaagttgcctgctgttagcctgaaaaagtcccaggtgaagatgaacgtcttcacaccatggctattggaggtgaatccaagagaggctgagccatggagagaatccagccacctgatttgttctgagcttccccaactcaatatgcaaatgtgtgtgtgtgtgtgtgtgagagagagagagagagagagacagagacagagagagatagagacacagagagagaggggagggagagagacagagagagacacacaaaaagacacggagagacacatacacagagagacacacagtgagagacccagagagagacacagagacacccacagagagagactatgtgactgggttgggtagagcaaggcccagagaactgcttttggattatttgaagatgacaacattcagttctgatctctaaaggaaagaggaaaaacacagctggccccagttggtgctaactcccactatgttccctcagagccacagattcccaggtctggaggttgctcccaccctacccccacccttactctgtacccagcagggcaggtgccggtcacagtggtttactgagatttttttcctctttctttgttaatgagaactgacttggcatttaataaaaccttatttatataagggctacgtgtacacaagaaacaacccaggagaagggccggccgagcgtcccccccatccccacccccgtggccggaatgacagtggctgtgcgccaaccagctgcaataacagccaggccacagaggctagccatgttcctccagggggccatggggtctgccctggccaccctgtgcctgcctggggatcattttcctaaaaccactcccaggatgggaacaggaaacaatgagagcaaaatctcatttaatgcttgctatttcttctaagttctttattagttatttatttgcttttaatgtttagctgccctgttcgtttggactggggaaggcacatttcaagggcaccagactactagacagggtgtttacagtttgctaggagctcacgagttctactttaccagctttttcctcattgaagcagaagcaggactgaagagggcagcgggcaaggaggatggtgcaggtcacctgctgcctcccactggggggtttcctctgccccatccacctttgcctccctaactctctttaagagaaagagtgggctgagcacttcagaagctccgcactgcactgcgttcttgaagcccagaggtgtttgggttacacacagtactgttacatctatagaaactgagcttgtaaagtcaaacacctttgttcaggttgataatttttgaccttgctggaatttggaattatctgcaaagatcttgaaaatacccaagtaacctgtactgtactaactgactcaggatctctggactctggggctcaaagtgtgccttgtttttttgtttgtttgctttgttttgtttttctttttgagatagggtctcatttagtgtagcctggccttaaatgcctcctgtagccaagggtgaccttaaattcctatccttgtgcctctaactccccccccccccacacacacacacacactggaattacaggtgtacactatcatggttatttttttgttttttgtttgtttgtttgtttgtttgtttacagtgctgagtgctggagatcaaacccagggcctagtaggcgttttaggcaagcactctccaactgaacggtatccccatctccacatactgtagctgttgaagctttcccgctgatcctgtgttctgctaagctgacggctgttgctctcagggacaagtgtgtgctgagctctatccgctgggaagctttgaatggctgggttggattgtttgtgagctgagtgagactaggagactcactgttggcgccatggcctttgctcagtctcagccagtacctgctgcagctgaacagcgcaggcacgtctaagtgagagagactagtaaaactgatttctaaacccaatgaaaggcagaagaaaggtattgactaggaatggcccccgtgtgtttgaatgttttgccatagggaatggcgctattaggaggtgtggccttgttggaggaagtgtgtcactgtgggagctagctttgaggactcctgtgctcaagctgtgcccagtgtggaatccagtctcatctttgctgccttcggatcaactctcagctccttcttcagctccaggtctgcctggacactgccatggaagtgtaccatcatgatgctaatgaggacactgacactgtaagtgggtcccagttaaatggtgtcctttaaaagagttgccttggtcatagtgtctcttcagcaacaaaacccaagctaggaaggttttctggtcttgtttaataagtaaacacccaactcagtggccccagcaggggcttaggtttgtatcttgagtgtcacacaaaggcccatcttgacactagtagaaatggtggatatgtaagggacagggcctagtaggagatctttgggccatcagaaggtctgccattgaggggcatgttgggaactccaagtcctctgcttgttctcttttgcttcttggccgagaaatgagtgggtcgttccattgtgtattcagccacgatgtgctgcctcattactggacccaaaatgatgagtcccatccatcacagactggaatctctaaaactgtgaaccaaaggaagccctgtctccgacggattggggcacgtgttatggtaatgcaggactgactaacacaaggtctagtcactaatggataattttgtccagatacaatctaatctgtctctatccaggactacgtgaactgaagatggtaccccagaggaggcaagggttgctcttggagtctgctggaggagagagatgttctggtcacaggctgttagttctctctgcagtacggaaagcatcaagaccatctctgaggccctaggctttttgtggtggcctcctcgggtcctgatcccttttacctactttggagacccgcccaatgagctggggaaaatgcagagtaactcccaaaggaaattcaaaataaactctgccagaacctgagaggcctattttattttgattcattttaaagaattcatctggcttctttccttctcctttctttttctatgtattatatcccaaaagacaaggcctcctgtgtcctaggttagctggagatgatcattaaagtctggcattcctgcctccacctcctaaatgctgggattacagatggttatatgtgctgtggagataatcctggctttgtgcatggaaggcaaacactcctaccaactcagcaacaaccctgtttccagcttaaagaagctgagagagagagagagagagagagagagagagagagagagagagagagagcaagagagaaggctagagaaagggtctatggagggagttccaagacaaccagggctacacatacatacacacaaagagaaagagagggagagagagagagagagagagagagagagagagagagagagagagagagaagcattaaagagcaagagagagggctagaggaagggggagagaatgagagtgagagagagaggagagtgtacattttctgagatttgagaaaacagccatgaaaacagcaaaaaatgtaaataccataaccaacaaataactttagaatagcttaatatcttagtgattttcttagtgacattcctcatggcacaggttcagaaattaaaatataggcaaaaggacacgtacaatgggggtgctagaaacagtctatcttttctaaaagagtctaatgaatactgcaaagtgtggcttctagggacccccataagaatctcctaaggattgaggcagctccccaccagcagggctggggacttgaacttgcatgtttcagcaacctctgacgattccatacatcttaaagtttgacacctctgtgctccaccatactcttctagcaaaaggagacatttatggattttgggagtctggatggctctagagcagaaggctggcttagcattcccaaatgttgagattatgaacttttctattttgtttttctatctagaaatagcacctttgggggtcaagtgcagttccataagaaagaatttgaatccctccctcatttgttaaaatgtatgaaagctttgtacagttttttttcctctctctctaccttttcctactattttatacacaggtatgtccaacctatggcccacaggctgcagattccaagatagctatgtaggaatcccaatacacctgtagatgacgatgtcatgttacagcgtcaaaaagttgggcacccaggaagtatcatacttgttgtctagatgaacactgggaccaggacagagtcaatgccttgcctgtaaccacgagcggggaactcactagtctgcagaggatggagagcattcttttcacgtttggtgtggatgtacacctaccctatcacatgctcaggggtaaactaactcctttcccttgctgctctttctagaagaactggggttctggagtatcctcaaggcttgccatgagcatcaagcacacacctgccttaatgtcaattcttcaatggcctgcctgttcccaggagtcgcctcccaagcaagatgcaaggaaccctttccttaccacatggaagagtttgaagaagtccacatcggcatacagagtgtcttctatccactgtagggtgacctgggagaggggacacagggcatcgcgtaccgtctgtgccccccgacgctggctgaagatgatgaagcgctgcaggagggcctcgctgcaggcaatgtctgtcagttccaagtctgggactccataagcaaactgcagggaggagaaaagatgctggagaactccatgttggaagacattaccactctcctgaacattaccacatcctgccgaacagaccacatcccacagcaaaggggatggacagagcagacgagcatgtctgctaactagttggtttaacacacacagattagctgggtggtgatagtagtgcatgcctttgatcccagaggcaggcagacctgtgaattagaggccaccctggtctacaaaggaagttccaggacaaccagtgctacacacagaaaaaaaataaaaacaaacaaaacttcaaaacaacagattaacttaggtcatctgggtgggtttaatgtcatataagggtacgtgacgttgggaggaggcagaagaaaagctgtgcgggtactgtgctgtgagaaagaaaggcttggcaggccattgcttgtcttgcacatggagggaacctccatccaaggagtgtgtacagtctgctagaggtggctaagatgagaaaataggttttcctttagacatcccagtgaagaatgtgacttaatggcaccttgactttcagactttttttttaaagattcatttatttttatttatatgagtacactatacctatcttcagacatacaccagaagagtgcatcagaccccattacagatggttgtgagccaccatgtggttgctgggaactgaactcaggccctctggaagagcagtcagtgctcttaacctctgagccatctctccagcccatgactttcagacttctgatctggagagtcataagagaataaacctgtgttgccttaaacctccaggttcttggtcgcctggagtgtgtcgtctgttacagcaataataaaaatgcaaaccctacctcaaaccttactttatcagaaaactctgtggcgattttgagctctccttggaagaggatgctaatgtgccatcaaagccttctcccagtggctgaagtggaggagtagggaaaacatctacagtgacattgaccaacttcttctcactagaattactacataaacatataagatggccagatcaatttggcttttattttgttattgttatttttgcttgattatttgaggcagggtctcacgctagcccaggctgacctggaatttattccgtagcttaggtcattttcctgtctcagtctcctgacgttacaggagcaagccaccatacctgacacagttaaatgtgaatttcagctacacaacaaataacttttagtatgtctcaaataaattccaaagggagcataattatgcctaattttttttgtgattctctgaaatttagcatcaaatatataacttgtattttatccacaatgcttggcctagatagcacacatcccacaccccctttagaagctcacagccagtgacttggagcaccacgactatggcgccccccccccacccccccacacacacaactaagatggaaaggaagacgtcccaaccctgatcaaggcttcttagtcacctggagtgttgcctgcacccatcgttccagattctgtaccatggaacaaattcataagactaggccccgaagacaccgtttaactcctaatcacacagacctccacactggaaaacagagcaggcccaggctctgtcaccctcacagaaacatggagaacacactggtccctccatgaggcacaggctgatggcagatcagctgttgatgattagtctgggggtctgtagtgggggtgttcccacagatcattccgcctttgccccctcctcattttgtatctctgagcaaaaccccatcttctttttagccagaaggtgaaaccgttttcataagctcactttgtctggtcctctcatactgcagaggaaggagctgatgaaagggaaccaggccacagcacccatacatagggattattagctaatgtcctagctttctctccactgctgggatgaaactccatgaccaaaagcaacttgaggaggaaaaggtttattccatctcatagttcacagtccatcatgaggggaagtcaggacaggagctcaaggcaggaagttggaggtaggaactggaacaggcgccatggaagagtgctgcttacgagcttgctctccatagcttgctccacaactttcttttataccccaggcccacctggcaatctcaaggatgctattgcctacagtgggctgggcccttccacatcaatcagcaattaagaagatgccccacaggcttgcttacatgccaatatgatggagactgtcttcactaaggttactgttgctgtgatgaaacaccatgaccaaagccacttgaggaagaaagggtttatcaggagtatgcttcatcttcactgtgtatcactgagggaagtcgggacagggacgcaaacagggcagggacctgcaggcaggagcggatgcagaggccatggaggagtgctgctgactggcttgttcatcatggcttgctcagccggctctcttttagaacccaggatggctccacccaccatgtgctgagagtcctcttcatcagtcactaattaagaaaatgctctacaggctcagctacaatctgatcttatggaggcgttttcttaattgagtttcccttttctcacagaactctagcttgtgccaaactgacaaacaaacaaacaaacgaacaaaaacccgattgacaaatctccacttatccaatcgattactctttcagtgttattcactgaactattgttcagggatcagaatagtgtctgaggatctagaggtggataacataggctccctgttctctgaagagctctctaactaggtgcatatacggacagttagacagtatgagtgtaagatcaaatagatcaatactagaccctgaaaggggaagaatcagtaagttcggtcatggctgagataagcgcgctggcagaatacctacctactatgtgtgacactctgggtgtcacacctaccatagaagagaggtcgagaggaagagttggcgggagagagaaggggagggaagagacagcaagagaatagctagtcaaagttcctagaatttaccagccatggcagttacagggctggcctataatcccagcactcaggtggtagaggcaggaaggtcagaggttcaaggccatcctcagctaacagtgaatttgaagccagcctgggctacatgacagcctgtctcaaaaataatggtgacaaaatatttggtgcttattaagtatgtctagcaacattctaagtggttcacatattctaatttttttttcaatctctccttataaccaccatgtacggtaggcattttcgtagtgagggaacaggcatagagtggtgcattcttgggagatctgactcctagagactcaccagtgcttgctaactagagagtaaggaggagtgaggattggccaaggaaaggaggcttatgagcatctttgaagatgatgcatcagttggacaggggcctgaagcttccgtagaagtcttcaaggctggacagatgggaccgagacagaactggacactttggactcttctcattcaatgatttcttagaagaaagcagtattgggatgtcccaccctccacccccgagctgtgccaggaagaaaggacccggagggaaactactgatggcaatgaacaaagagtccctgcttagtaaagatgatgaatcacagcttccaccggggccgctgaaaaggcatgtcgacattgtgcctgcaagttctagtggccatgttgggtaaaggtcacagagctcagatggagtggaagtcaagatgagagtggaagggtgggtgaccagctgagaagcaaggtggcctgggagatacaaagggagccaggtgggggcagtgagtggcctctcaggcatgacagggaagtggtagaacttgctgatctgattgcattggctacactgatcaggagctggtagcacaacctggtgacctggcccctgtccttgccataaagagcctcagtcctggagccaagagggcagcagtcacttgaactctaaaggccatggctgaacactcttgaaggaaatttcccctaaattccaacccttatctcggcctcccttttattaccaactggaaactgtcacaggcattgccaggactgaagttttacgagctgaagaaaaagcaaacgggaaaactggcccgtcagtgctgatgacaactccctgtgatgaagacagaaggcaggccgtgccaggcagccagcccagctgctcggcctcatcaggaactgactctactttgcctgtctatttctagggataaccatagagtctggatgatcagaaagcaggcatgggatccttcatcgaggtgtgaggaaccagctaaaaaccccttcatcagctgttcccaccaggcgggatgggtctcctccctcatccggactcagatagcagcatcttgtgtagaccttcatttcaagtctgattcatgctctgaaactcccgacttatgttctggtctcccctggagtcaggcggctgtcctgtccacaagagcaatggtcctccggcattcgcttgttcgtctcccagagagcttgctaacacaaatagccctatacccaaaagtttggactcaactgagttgatagggctggggaacttgcatttctaacaggtactcctatgccactgaccctaatggacactgggctgtgagagccagctcagtttattatgttggagttgtgggaccaggcatgggaagcacttgggctctggcacttttagttgttgaactgtgtgcagaataactttaccactagatgcctcagtttcccccatgtttttgtcccatttcaggattactgtaagggacaaagcagcaaatcaatgttaaagtcatgtatttgtgtaattattaatgtaataataatgattataatatacaataataacaatagcaggaaattattaaaatgaatgaaataaatttatggaggggtcagaaatgtctagcatgagctagaaaacaagtggcccaggaatacagaggtggtccttctgcccttgtcagatgtgataaatgttagagtcaccctctatccaccatgttctctttttttaagagttattttaattatatgtctctgtgtgtatctctctgtgtagagacgtgctcacatgaatgcaggtacacaaagaggccaggaatgtgggagcccccagaagctggacttacaggaggttgtaagccaactgacaggggtgctggaaaccacacttgggtcccatcttagccttgttctatatagccactctgtatgctgaagagactcagggccaaggcaactgctataaaagaaagaatttaattgaggcatcattatttaaagtttcagaggttagtcgtttattattatggtgggaaagatgggatggatactcactcatcggactggagcagtagccgaaaactacattctgatttgcaggcaggaagagagagactgggccttggtgagtgcttttgaaacctcagagcccacccacagtgacacatttcctcccacaaggccatacctaaaccttctaatccttttaaatactttcacaagctggtgactaagcattcaaatactggaggctacacacatacacacacacacacacacacacacacacacagagagagagagagagagagagagagagagagagagagagagagagagagagagaagttcttggctggagctcctcccttaagtgcttgcaggctgactttctccttagtaaggaactcttgccctaacatagtgactcctaacagccaggagacacaagagagcctctatttatgttgaccctcctgtggatgtcagtgtcctgagtcataggctttgcctgtctggcccacactgctccagtacttatagctggccttcacgatttgattagtagtaagtaaatggtgaaagtcccatactctccagggtaggctaagcctcgtgattgctctgcttccttcacgtttcaaaagacaggggagtcttacgggtaccagtgctgcttccgagtcctgtgaggggatgcttgttgactcaaaaaccctcaggtgtgcccctgaatatggcgcatgagtcataaattctgaacatggaagcaaaagagaacagaaaccaaatactctttatctttctcaggctcggtgtttctccctcttcaaagggccttacctacctgctccacacgaacttgggagttgaccagaagatgggcaaccgagtcagacaggccaatgtttctcatgagaaatagggtcagcgcctcttcatcttttaggatgtctcggatttgtaatcctcttcctgcatgtgaatgaaagaacagactgttgaagggagatgggtcaaaaaaagaacagcagctagaactgactagaatcgtttctgcttggctcttagaagaaggctgtgttcttggtttccttgggaactctgggaggttgaggccattgctagtatctgccacctggactgtctcactgaagagccctggcaccatacagtgcgaaggcacagaaggtaggaaaagttaacctaagtaggttgggtgctgcctgatgttcaggcctggactgagacaatggctttcaagagagtgaagggtaaggaactacaacggcaggggaattttgtctcttgaggaatatttggcaatatttagagacatctttgggcagtggagagagaccagtagcattgctaaacattcatagtgggcagaacaatgcagtggtcaggtgactccccaaagagtttctctcccccacaaatgtcaggggtgctaaggctgggaagccccactctacctatataccctaccagaaaattcagttttgaaaacttcctatgaaataggaggacaaaaacatcagttaaaagttactaaaaatcaggctggagagatggctcagcggttaagagcactgactgctctccagaaggtcctgagttcaaatcccagcaaccacatggtggctcacaaccatccaaaatgagctctgacgccctcttctggcgtgtctgaagacagctacagtgtacttacatataataaataaataaataaacaaataaatcttttttaaaaaagttaataaaaatcagtgccttttccatatccagataacatattgggacagaggtcagaaaactgaagaagatgctagaagatgggaagatctcctatgatcctgagttgcagaattcatgtggtgaacatggctgtagcacccagagaagtctataagttcaatgtcactcccatagaaattccagctacattcttcacataattagaaaaaatacccaataacccctttgctttcatatgtaagcaaaaggacctcaaatagccaaggtgatgctgtggatgaagaattcagagaatacaattgagccatagcaacaaagccagaatagcaccagcacaagccagacggtagccaatgggatgagaatccggaaccacacccacacggtacagccacctccttcttgggcaaaaatggcaaatgcatacactggaggaaaaaacagtttcttcagcaaatagtactagaaaaactggacagaataatgaactggatccctatctcttactctgtacaaaagtcgattttaaatgagacaaaggccttagcaaagacctgaatctctgaaattatttgttccaattcataggcacaagcaaggactttccaaaagtcaattccgaaaattgataaatggaatttcatgaaattacaaatcttctacacaacgaaggaaatggttaactgcagcggggcagagggcagcctatagatgggaagaaatctctgcctgctatatgtctagtagaatattaatatctggacgatttaaagaattcaaataactaaacatcgaccccacataatccaatcagtaagtgggcagctagcacaaaccgacagcaagaggaagaacaggtgatcagtagctgcgtgcagaagtgctcaacaccttggttggcaagatggctcaatgggtaaaagtgcctgccatcaagctgacagcctaaggggtttctttgttgttttgtttgtttgtgacagagtttctatataaccatggctgtcctggaactctctgtgtagaccaggctgggctggaattcagagagctgtctgcctctgcctccagaattctgggattaaaggtgtgtgccaccaacgcctgcctcaaaaaaaaaaaaaaaaaaaaagaattgttttaagcaaaggaaaaaattcctgtatctggataggagatgtccaatctgttctcactgcagttttgatggatgagaacccttctgtggttcctgttagctcaactcagggttaaagctttgggtattagcatgaacagggcaatgaaggacaagaacaacttcatatcagggggtgtttcaggcctgttccccacggcttgtcctggtcagccttagccacattccctccagcttcacttagaaccttttagaagcaaaaattctttctcaaggaagcataaaggaccctttactgtgaaggtgtccctgggcaagtgatcagcctctctccatgtgaccatggtcaccatgtagactaggtgttgtaggagcaacaagagataaaggaatctgaagcacttaattcccaggcctgcctgatattagttaatactcaataaatgcttattctgacagtgttaatatcatccccacccctcctggaggactcatgccagcacccacttcttctgttgcttcctgggcaggtatcagaatcaaactggctaccgctacagtttatgagatattgaccagagatatgtaaggtcattatggtccaagtcttccatgtgtttgccaccctgctaagctgtgagtatttctccaagggccatgctcttccaacaccctttctccttctgactccagcttcatagcgagctacacctcccacccaaacctttccctctccaggcaagtgcctgacaacctccatcgctgtttcagggttgtgatgttcctgtagggcagcatgactagatccacactgcgaaggataatttcctcttgcagcgcaggggtcaagcctatccatctgccactgtccagggtgggagcaactgtccctgatggttccatacagcagcctcttgtcaggttggatgtctttgagagctgggccagggagtagcccactatcactctcctttgcacaggaaacttccaaagactttgtaagaagaacctgaaggtaggggtccccctggaatagcagaacctaggagaaggtactgtgttcaatctttgtgttcctttcctttgggtaacacagatcctgtcttttttccaagcagcgccctgttctcctaccgctggggtgtcatctcaactgttctcttatagttattcctttagatacagacttacagaccctcgctgtagtattctacacaccgtagagtgcatgcatgtgcacacacaaacatgtgcatacaggcgtgcatgggtggtttttttttgtttgtttttaacatcccttgttttaccaagccatattgaatatacaggagtaagacctcaaggtcatatttattctctctctcctctctctctctttctctcttattttttatctctttcacccagctttaaggcctgacatagtatcaaggcctcaataaatgtctgctgaatgactccaggcactcaataaatacctgtgctcttatcctgagagtgaaaccccattcggctgtttattttttagttattctttaacacactcagctgccgctgcatacaaatgccttgggagaaggggcaagacagagagtcattttgcctgagtatcatacaactgtggcctggctgggtcaggggcggggtgggaggagaagggcagggactcagagaagcacacacctgaggagggtgttggggctaccctgccagcagagtgtggggcccagggtctgagtgacagggtgataccagacaagcccttcattagattcctgagggagaagtgtgaagcagggagggggtggagagagggttgctggggaaagaaaattacattttcatttaaaatgtggttctacttgttctcctccctgggaacgttggaggctgagggtagggggtggagggtagctgcggggtgaggcttccggaagaggggcttaaagatgagaccacagagctggctggggatagggggctatgtctatctgcagctggtggctccccattaaccctcccctgtggagaatgcagccctacaggtttgctgtgagaggagagtgctgtctgggtcagcacagacatactttcccaggagactgggaaccccacaggcaaaagccgaggtggctgcagctgtccacccaactccgagactgaaaccctcatggtaacttcagactccaacgttcaccttcagcaacaaacatcctagaacctactccttctgccatctcgactagacatcagtgcctggcccaaatttcctcccgagaccatatcctttacttagctatggtccctggacccctgttagtttctgtccccagcttctgagaaaaccttggaaggctatcctgatgcccagccatgctccctttaggagattcccccacagctggagagcctgcagaaagatccacttgcctgcccagtcatcctcaagtcctgtttttttgtttttgtttttgtttttgttttggcttagaaagtagtgatttgggttctcctagaaattgcagcaaccacagaaaacttctgcttggaatgggttctcttccactccctgcagccagactcaatttcagtcagacacttcagtgctaagttcacttgatggaagacccttctggatgaagggaggaaagtcaccctgagatcaagacggtggctgcctatcttatctgcttgcttagccttggacaaaacatcttcgtggttggcacattcgcccctgtgttttcttactattaaaaggcaaatatgaactaggcaagttggctcatgcttatcactccagcactttggagactgggacagaaggactgccatgagttctagtctagtctgagctacacaagtttgaggctgtctaagctaagtatggacctatctcagaaattagatagatagatagatagatagatagatagatagatagatagatagataggaaggaaggaaagaagaagaaagaaaaagaaagaaagaaagaaagaaagaaagaaagaaagaaagaaagaaagaaagaaagaaagaaagaaaggaaggaaggaaggaaggaaggaaggaaggaaggaaggaaggggggagagagagagagaggggaaggaaggaaggaaggaaggaaggaaggaaggaaggaaggaaggaagaaaatgctgtcggtttctaccttctagagtccttcatacttgagataactgaaatatgtcctttttcagaagagtaaagactattgtagatatttataatctaggctgtgtaaatgatggccagcaccatctcctctactgctttggaagtaactcgaatgtaacacagcgatctgaatgtactcctgtcccaggctgcaagtgtgtgctgagggtaaaggagttgtatgtaccacaagctcaggagaggagggctggctggtcacaccaccctaactgtactgtttgtaactcggataaaagctgctctgtctggccgctctcgccctttggcttcccctggtagtcctttccttgtctctgtcatcctctgagggcaatctttacagtcaccaccctgtctcaggaacacacatctttctacagcaccagctgctgcctctgaactctattgttggaagtgtcctcatccactagcgggcatttcttgaaagacaccatatacccacaggcctatgacaactcccaggcgactcctggagctttagcttctcacagcctctgaattacagatgctcaggcaatgggttctgacaccacaacttgtccccacaggtgtctaagtgaagctgacatacccacccagtgctcatgggaggcttaagatctagtgctgtcttcttcgatgttagtttgtctcccccaccccaccccacccctgttggtttttgttttccccctcctgaatttccccctgaggctatgagacatttctggccctcctctttgttgttcctcattctaagtggttctcccacctggatgtctgattcattacttatttaattaattaatttattttttcagacaggtttctgtgtagccccctggctgtccttgaattctctttgtagactgggcaagccaacaactcaccaatatctggctacttctgcctcctgaatgttgggattaaaggcgtgagccactatcacctagccttgtctgtctgtctgtctgtctgtctgtctgtctgtttaacttgcattggtattttgccttcatgtatgtctgtatgagggcaccaggtgccctggaactggagttacaagcagttgtgagctgccttgtaggtgttggaaattgaaccagggtcctctggaggaacagccataaccagtgaactgtttctccgtccctgggatgtctgattctcgctctctctcatcctgtgtctgtgtcagatcacagctgatccctcatttccttcacctcttcctcacacacactgccctctccttcgatttccctacatccacctctgtagtacccatcctgcctgattctccctgacagcctaaattcaagcactctgaatacagccatcagtccttccatctcaccctttttctcatcagttaaacaggaccctagaagccaccgaggctactgatcatgcatttcaaaccccccccgcccccgctcccagctaatcctggatgtcaatagtttctcataaaagctcaatgcagcccagacaaaatgcacacagtacaacttctgccttttgttactagggcctccttgatctgctgtagtgcgtccacaatccttctgcctcacatcctgttctcaacagacccacttgcttcattctggatactaaatattgctggaagcgtacattaaagtgtctttgtgtgtgtttgtgaggtgagcactcatgcgtgtgtgcatgcccgtgtctatgtgtttctgcaagtgcacacatgcgacagcatgcatgtaaaggtcaaaggacaactgcttttagttcactggtgtgtgagacaggctggccagcctatgagcttctggggagtctcctgtttcaccttcccgcctcaccacaggaatgctgggattgcaggcatgtgtctctggcatctttcctcacagattctccccactcttcgctagatctcagtttatggcttacttgacgctagaggcaagtacagaatgggaacgccgacacccatgttacctgcaaatctctcagggtgagtcctcagggtgtccatgaactgcgacaaggtgcggagctcggcccaaacctggccaaggtgctggacctccggggtgtccatgaagagttcttgaaaatctcgatatactcttgccaagctataggaaggaaaaatatatttctattcataattttaaaatatttttaatatttatacttttaagcaaaaatatttataaacaaatagctatcattttcagtcttgtgctatttttaaattgttgcttgacttagcatagcctcaattgatggatatttatgattctaacactgacagagatgatgagtaattagctcagaattcaatttggggcagggcaaggtcaccttaaaccccattttctctggtctgttgtttccagtttgtagctactaccagtgagtttttccagccttcgcacaattctctgacctctccaccacccactcctagagatgggacctgacaccatgctgcatccacgaaatcctctctatgtatacccatcaaggctgattggacggggagaaagaagatggacaactggatattccgctttgtggattaaaaaatgcactgtgtaagccatatcccaagattctacctctcaagtcactgatggcagtttaggagaggatttggggttcgttattttcttccaagaagtaaacttcacattgcaagcctgactttgcatttccttgcaatggtccttgaaattcttcatagaccttggatgtctaaaggaggctttggaggaagcagagatagctacaggtggcctgtgggggagggggaaggaaggagcatagtcctcccacccaagcagatgggtgaccacaagtagtggacacttgacagccagggctgctgttagattctaggtcccctcttgggcataaagatgaagaaatcatgtggcttatgtttgaaggttttccccaggtgtcctgctgttagtagattattccaggtaggaagctgccccttccccacactctttagatcccccgcccccattctgcagagggtaggtacacacactcccacatgggaggggaacagaagggggcacaagttcctccctgtaggttggacttacatggagttgttatagtttgagacagttccaggagactctccaggggtggggttttgaaaacaagggttgttcatattgcagaaaatcccctggagccacggtaacagtcctgctgaaggcatcgccttgttgggaaaatggccttaagacaggaaatgaaaacaagacggagttagtcacagaggccagaccgaccaggagcacagactctcggacgctctgtctctccccttgtttacgaagtaggatcatctaatatagtttaggccctgtgctgtgtcctgaggctcagtggcagataaggacgcagactaatggtctccgagcagtagttctcaccctgtgggtcatgacccctttggggagggtgtcaaacgaccttttcgcaggggccgtttaagaccattgaaaaacacagatatttacattatgatttataacagttgcaaaattaccatcatgaagtacgaatgaaaataattttatggttcgagggagactgtcaccacaacccgaggagctgtgttacagggtcacagcattagggaggctatgtcctgtcctaggagcttaggtggacacgtggcagagaaactgaagctagaagataagctttgggggggggggataaagacgtgggctcagggcggttcacaggaaaggcctgcgagttctttgcacagtaaggatggaggctctgcactcctgggagtgacaagggaacaagggtttgctgggccgagaaatggaagttggaaacaagagctgggggaactcagaggctctcaagacacttgagacttccatgtcagctgcctagaaggacaagacaccaaccagcctgtccagaagacacggggagccttccagaaaggcaactgtacaaagcaggctcccatgaggctagcaggtgccctgaagctccagggtataatatttattaagtgtgattctgtgctgctcccttttcactgtcctctatcctctcaccatgtcaaacaaatcccctaaatcagtcatcgtaaaaaacagaatgaaatttgtaatataggtaagtttaaacaaacaacaacaaagcagtcaaaaaataactatatacacagggctgggtttgattcccacaaccaccaaatgaaagaaatgaataagcaaatggcacacactccaaccagggttggcttacactgcacacattttaagacactagagtttgtacagcactggggaacctggtttatacattgcagcctctgaaatggcaacagatgtgatattcccactccaaaccaagagcttccaaaagggaaagatgaccaggtcttctgggttcatacttacattcatgctgactatagagtgggttggcattcctcagccagattaacaccaaaaacaaagacaaaggccacacgagttccactacaaagcgaatctggaaaaggaataataaagtcagaaagagcaaaactgctaagagatgcgaggagatatataaccagggaagacaggccttcccctgtgcaccatccgagcaccaagcctgggctgttgtacaaccatagcccaggtaacacttcaccacagatcacatatctcacagtggcccagtaagtcctgatggatccgaaaaaggcccattactgtcttaacattgtagtgtctatggtgacttcatatcacagggataaagagtggagcagagactgaagtaaaggacatccagacactgccccacctggggatccatcccatatacagacaccaaagccaaacactattgtggatgccaagaagcacttgctaacaggagcctgatatagctgtctcctgagaggttctgccagagcctgacaaatacagaggcagatgcctgcagctgaccattagactgatcttggggtcaccaatggaggagttagcaggactgaaggagctgaagggctttgtaacccaaaggaagaacaacaatatcaaccaaccagacaccccccccccccagctcccagggaataaactaccaaccaaaagagcacacatggagggacccagggctccagctgcgtgtgtactagaggatggccttgtttggcatcaatgggaggagaaactcttggtcctgagaaggctccatgccccagtgtaggggaatgctagggcagtgaggcaggaggtaggtgggtaggtgagctccctcatagaagcaggagggaaggttggatagggagtttccagagtggaaactaggaaaggggataacatttgaaatgtaagtaaacaaaataaccaataaaaagttttaaaaattacagcacttacaattatgaaaaccaaagtcaatgataatgtgactctcacagggcttacacatttactgtgtttaaaccatcaattgggagagaatgtctactcataacaaagtaacagaaaccagaagcttgaagagaagtgtgttggcacagatctgtaatggcagggctttggggggctgaagcaggagttcaaggccatagaagcccggaagacatagcaatgttgagactacactgtctcagaaacaaaaattcactgttaagaagttaactgtaaaaccagcagcacctctcgagtcttgtgttcactgtctctcccttgcatcattttgtcttgttcttgttttaatcttgtgtttattatggctctcagagcaatagactacactattcataaatagatacatagcccctagagctatgctgcctgggtgtgtaggaggctgcgctgtaggtaggtttgtgttggtacacttgaccataaagggtaatgaaatgacctaataaggtattcaccagaatatgccccattgctaagagtatttacctaaaggactatttatctaaaggacttccttcttcagtcctctctcctacactgcctcctccctgattcactacatcaaccagattctgggttcatctgcattctgcccatgtcaactcctgaaaataacatcgacacaagactgccatgagagacctcaggcttcaggacttggcagatagcattgcgctaggcgaatggataccaattcttttttcccctttctccttcttctggtctttcaggacagggtttctctgtgtaggcctggctgtcctggaactttccctgtagaccagcctggcctccaactcacagagatccacctgcctctgcctcaggagtgctgggactggagacgtgcgcttctgcgcgcgcgccctggtcaccacctggctaaggatacagattctgataagctcttatgtaaagctggtacctcagatagtaaatgtctcgtgatctctcattctgtgggtaatcgaagagacctgcagaggtcaggtgacttgcacagggtcacaacaggaagcacaatccagcctgctacctccagggccagactctttctgccctttcccgccgttttgccttctggcgcatggtagaccttgcctgaaggtggccattgaattaatgaatgaactagggagcaaatgactctgaaatactgtgccccaaagcgaaaccaacagaaatccagtaactcaacatttttttccttcaataaggtctatcgcttaagggaagcagaaatcccgccgcggttcctcctccctttccacaaccggaagaggcagctggtctcaagcatcgcagaaggctggtatagaaagactcttggtttagagtcagagttcccccaattctaaagagacgggcgcttgagattggcgctgttctcatccctgcacggcgggaaggcagagatgagcaattaggaagaagagggagagaagctgaattatggaactagacgtgagttaaggaattaggaaataagaggctagcaagtagaggctccataaatgtttaacaaacgggtgtgctgcttaaaacaacacaacagacacacgaagaacccaggatgttctaacatatctgaaaattggtggtaggaaataggtcacatgttgagggaaagcaaaaatggttacaggtacgaggtcactttttctttttttaagatttatttatattatgtatgtgagtatgctttaactgtacagatggttgtgagccttcacatggtttttgggaattgatttttttttttttaggacctctgctcgctcagttcctgcttgctccagcccgaagatttctttgttattatacataagtacactgtagctgacttcagacacaccagaagagggcatcaaatctcattatgggtggttgtgagccgccatgtggttgctaggatttgaactcaggacctttggaagagcagtcattgagccatcacaccagcccacatggtcacttttcaaaaagactttactcaacacataactcaggaggatgggttggaggaagcacgcatacaaacacggccaaaagacagaataggcttctcttaaggtgctcagtttctggagttctcccatagccttttccacaggattacaaaacacccatattaggcaattcccacctgctgtttaaggagactgccccaggaatacttgctagcaattaagattgctggtaattgtccacaggaagggcacatcccaggcagagcctccctggcctaacccctgcctgttacggtctatcctggctcctagaccaacactctcaggcatatctgtcctccactgtgagcccagcacccaccccacgcaaggcaggagtcgcaggaagttcccatcggctctttctgggatgcgtaagtctcagtcaagacgggcctagggtgcttctcagggaagctggagttgacacaaggactcaggccatcaacagtctgaagagtttataacacactgcaccccacaaaggcacgtatagctgctccccctcccccattccagattgtcctgtaagggtggtgggggaacgggtttggcaagatagcagctcgacaggtgcaaaggctgaaactggaagttgctctcagtgtcttctccagggagatgagacaaccagtccagagagtttgcacgtgactcctcccaagacgactgcttgtaaggttggctctccatcaaagcttgcatgcctatgcattgtgtcagcctatgagttgtatgggatgctacatgccacccgtgctgacctgggaatgtgagcatttgggtttcaaccactctcgggcttgctcattttctgtcagttttctcatctatgaaatggggatgttgttttgtcctatagtatacaatgagaattaataacaggctactctggggccaagtactggggtttatgacattgaggaaacttctgaacctctccatgtcacagggacgcatctgtcaaaaaggagtgataccaagtcctgtctcccagagcagttgtaatcatgaaatatgttcatcgtgcccagcacagaaagcagagcctggcacacagaccatttatgtctcatagaatcatagcaagggccacaggagcacagtgggtgacagcaggttacagacagatgatggaggaaatacaatgaaaactaacagcggcctctcagcccctcccccatctcagcatagcaggcaatctcaaggaagcacggggtgggtgggggagggggaggaggagctgatgttttttctctgccagggatcgagagcggcctcattcgcaggccactccgcacaaagactacctgccattcattctccgactagcagaggcaggtgggtcctcctcgcagcctcttcctctcccccagaatcagtaccaccagcccagaagggcattacccttgctgctcaagtgtacacaggcatgccctagggagaaattccacattataataaaaaacatgtctccagagttccccctccccactttaaacatgtctgcaactttaattaagcccagtccaagctcagaagcccccactgtggaatgcttcttaaactaacctggtatttccttgcctcctctccccccacatctttaccattcagcctacatgggggaggaaaggttcccggccagggcagagttgtgcttgttgttttaaaacagccagttgggttttctcccttccctctctgttttcaatttaaaagagaggtaggcagagctggagagcaacagcactgatcctcccttctgggctgagaagccagacgcgactcaaacctggcccgatgccacccggagcctagtatacttgcagctggtgccagcctccctgtacccctatgttcttttcgcccaatgctgagccagcactaaaggccacagcaataccaggcacccgcctcccgagtttaggacacgagccccatttttattttttctagacagggtttcactgtgtagccctgcctgtcctgggactcactctataaaccaggctgtctgcctctgactcctgagtgctgggattaaaggtgtggccatcaccactaccacctggttgtgaacccctgtttttatgagtcctcaggccttcacccaacatcctgtcctctgcaagtggggacctggggacaccaaaggattctaggatatggaagaaaaacttgtgctaactctggcctaccagagtgggcaagtaggattttggacagagcctttgggagacagggctgtgagggttaagatcctgagacattgcctctgaattcccggcccctccccaccccatgcttccacccactccgtccaccaggacttccacttctgctcaggaatcacgtggcagcctccttctgcctgacacattccaccaggcaagggctatgctccgttctccctcaggcatgcaggtcagacacgcactggggttatagatgcaatattactttacatttactgccctggtcggtgataaattaattacccagtcattctttctttgtgatatctgtgactagtctgttagtcagggcggtggagtttgatggtcacgtctgctatccggaagtcacacatggttaattacctgtccaacccatgctaaccctgaggaatgatcctcaagtcacttcattggtacctacagggacaactgtagcctgcattattggtacccacagggacaactgtagcctgcattattggtacccacagggacaactgtagcctgcattattggtacccacagggctaaccgaaacctctcagtccttaccatgagagctaaatgatgtgactaatttagtaccaagccaggcaagtactttgtaacatcagataaaggctaacagaagacgggaaaagaaggaagggaagcaggcacttgaagacgcccttcctgcatcttgaggggaggaaataggaggatggagagaacaccttgctatctgtccattctcattgttttatgggtcagtcatgcctcactttctgcagtcaccatttcttgcatgcagatctttccagaagatccaaaggccttgaaaggagctgcagactccctcatagaggtccaaactgagggtttaggaaaatgttctcatcttacccagacatcctggatacattggctatctcggggtaccgaggagatctcagtttccaggccatgaaggtgataccaaacacaggcttaagtgagacagggttcacagtatgaatgacccatcccccggggagcacacagtgatcaggaaggctcccatcccccaacaggaatccacttgccaattcgagcgaaaggctcagtttccccgagtcagttctgtgtctggaaaccagcaatgggagcatcgctggtcacagtcccggtgtgaggggagggctgaggaggagatacgggaggcggtgggcgggcacattgaatttccctggcaatcttacagcgcatttgcaccctgggagcagaaactgaattgtctcatctatcattgggaacttagcccctggcacactgcctggtgactattatttcttgaccgaatgaatgactgaacgcgatgaagttaacaatgagtcttgctcgggttttgacagggttttcattcaggaaggggaagcctttggttactgttagcacttggtccctgggggtcccaaataacttcaaggctaatttgaaatgacaccagcctggtcagggacaagcagccagccataggacaatggtgtccctgtgggtgagctcaaaactggagtgtggcacggccaccttcacataaccttagttttccactcctttcccagctgccagttgtgtgcttagctgacacatccccgttttcatctctctctgaccaaacctgcctaaggtaccccacaggtcttcacacgaccccaccccaccccaccgcctagtcccatttcttcctaacgttccctttggtccccaggagaggcctagtccaccaacagaaacctaccacaaaccatgctcttccccatagcctgtctccttcctgtcctcttcatgaggttcagctttcgtttctcttgcttatgtgtgttgaatgcatatgtgtgtgcacatgtgtgttagggtgtatttgtgtgcggaggctacagttcaacaagggatatcttcctcaatcctgggccccgtaatttaatctcagccctctctgcttcgcacagcaaccctcccccctcccatcatcttccttaagctgtttcatgtttttaggactctgtagggctctgggacagccattccttcctaacttcccttcctcctcctcctcctcctcctcctcctcctcctcctcctcctcctcctccttctcctactcctcctcctcttcctcctcctcctccttcccccccctctctctctttctctctctcactcaacaggatcacatgaatcccagactggctttgaactcactcactagataaccaaggatgaccttgaatttctgaccctcttgctgggtactgtgcccagtttgtgtggtaccggggatgcaagcactctcccagccgaggcacactctcagccccatttcgttatggatatgaatttgctccttatccttccacagaaaaaaaaaacaatggaggaaccatttgtagcaactctggaggggctctgatctcccacagcacacatcagcatttctcctgggatatttggcctacattactttatattagtctggattctcaaaacatacttcaggatttcccagctgaaaaaccagcttgggggtgggggtgggggtggggtggggagtgtgcacgttacacatttaaacccttagtccagtccagccatgactgatcgcagaagaggtttgggtaaatctgtggttaataacacaattggaagatgcaaagttatttttccacagaacagaattgtgggcagcgcaactgtgacttctctgggaatttacatcccagttccaggaacatgaacgtgtaaaagcaccccacgctctagcgtcaaggaaatttgtgtttgtttgtttgtttgtttgtttgtttttcagggaccttgaagcttccaacctgtggtgggagctgggccagcaggtgtcgaagctggaggggtggggagcggtagtggattcctgtgctgggcaggggacagaatagttttcatgtagccaaggacaagagaagggtgtcatcctgtgggagggcacctggtcactgagcagctaaaggtggcctccgaactaaaggacaaactagctctcttcttcgcctctcctccccgctccctcctcccaaccctcctccaccccgctcccttttttaccttctgccttttcctcagagtccagttcttccaaagcaaaagctgtatctgtctgaggaagcccatgccggaccaccccagcaccgggagaatcaccccgagctggggctcaggcaagcaccggacacaaaggccgctaggaccacgtccagctcagcccgctgtgtccttctggtgattaaaggccgcgtttccccttcaagcataatccccctctaattacctgtaagcccttttgtgagggaaaggagacaggcttcggtttctttatagacggagaaaggccctaaatacacaagtgcgggcacggagggccctgaaatgagtctttcaacgggaaacggagcggcttcaggtgccctcctccaccggacatcagaggggctcctgcggcttctgaagaagatgctctggatatctctgcattttaagtttgggacaattccctttgcatacctagaggctggatgtttgccttccagtgctctgacaccgggcaggatcctgatttgattgcttctccttaatgagggagagctaaagtaacccgttctctttcagccctttgttttgcccgataataacttcaagtctaatcaaccggtcctggctgcttggtataatccaaactcagcaggatagtagcaaagtctgccacaggcttcagcacgttacttgtgagcgatctagctcagcagggatgggagtggagatgttgctagacagatcgaccactgggcaatgcagctgtgattctaaagacctccaaacatgtctccccggtccttccccatgaaagttttgccccagcctcctcaaatctcaggaacgtttttctctttgaaaaaccctagacatcaagacctccatagggtggaacgagagccaggaatggatactaactgggtctgtttgtaaacatgggtcgggatgttggctaacctaagaatatacggggcagtcatgagggctgacaggcgtgcttggtgaagcgtccaattacagagcgagtaaatttctgctttgagtgtttaaaatgttccttggaggtagtggcatttaatataggctttggtcattgtaaaatagcattttacccatagttcacttaggacgtggtataactgtaaactgcctttgagtatcttgtttctgtcattctgaggtaactgtctgcttagttttacagggaagcaatctgaaacctcgtgagattaaggactccactagttgttactctcgatagccctgagttactgaactaagcagctcactaaaattccccgagagagacagagaggcagaaatagaaatagcttatcctgctcaggaaaaccacaaggaagaagggcggctccaatgggcgggagaccctggaggaagaggctgttaaaggagacagagaccaggctcagaaactcgtgatgatgatagactcaacatagatgaaatgagcaaatatgacgagatctccaagtgtctcacaagtgcagggcagccccaaacagaagcaagctctggacagaatcatgaagcgcttcttccatgtgagagagtgtgtgttttatcatccaggaagagatatatatgtaaaaaaattacactaattcagtgcctaccaaaggcagctgtgtggggcaggaagattgagagcagggagtgacagcaggtcacgaaggaaaggggagctcagagagcgaccagaagcaaagagacagataggtgactggaagtcagtggtgaagagggaaagggcaactaggaagactggggcttggagcctgactggctggacatgagggatgactcgtccctctgagggaggaatgacagtgggtgccaattaagtgggtaggaggagatttgcatttgattctgatatttttaaagttagtgttttgagacagttctaggctggtctggaactggatatataactaaggatgtccttaaactcctgattctctggccttcacttcccaagtcctgggttgtcaggcctgagctaccccatccagcttcctcgaggtgaagtccctatgatgatcgctgcactgaggtgtccggcaggcagcggatacctgggtccggagtcaggagtctacacttttagttaggagatagagacttgagactcgtcagcatgtagacagatgattaagtcctaagcatgattgatcgggttgccaatggcagatatttggaaagcgtgcgaggttatggtgggccagagacagctggcgatggactagatcttcttcaagttacccagagatgggaaaagttagaggcatcagattatcagcatgtaaattgtctcctattataattttgttttatgtttgtttttgttttttgagacatggttttctgtgtagccttggctgtcctggaactcactctgtagaccaggctggccttgaactcagaaacccacctgcctctgtctcccaagtgctgggattaaaggtgtgcgccaccactgttcagcactattataatttaaacagtctacttttaactgaattagagagggatgtgtttagctaatggcgctcactctgctataactcagtgggtagcaatcaggcagcatcctccctctctggctggagatcctcttgcctgaacaaatgctgactggaatgaactgtttctctttttcactatgaaatatacatagcataaagttaccatgtcagtcagtacatcgttcagcactgttaagtcatgtcccctgccagacggtggtggcacatgcatttaacctcagcaccctgaaaggcagaggaaggtggatctctgtgagtttgaggccagtctggtctacagagccagttgcaaagacagttaaggcatatatatatatatcaggacaggaggacaggagatatatatatcctgtcctgaaaaaccatccaatcaacccactaaacaaccaaacaaaaagaacatgtgccctatttatccatcaccaccacccatcttgataaactactttttataatattaaaactctgtgcccaataaataataactcatccttcttctcttcccacagaccatggaaactattgtccctatttctttcatttctgtggaatcatatggtatttgttatttttatgttcctttgaccgagttaactatggatatctatgctgtgatatgtcttaatcactaccataactatcagatgaacaatagatttttttttccctcatcgttgcctggtgaggccccacttcctggttcctacacagtgccttctgtgtgtgtactcacacaagggaagaagtaaaggactctcattagccttttataagatggctggtcccactcagcagacctctgttctcatgacaaatccctcccaaaagctcagacttctagtactatcatactaggtggtaagaattcaatttatggaccttttgttttgttttgttttgtttttttgttttttgagacagggtttctctgtgtagccctggctgttatggaatttactttgtagacgaggctggccttgaactcagtaatctgcctgcctctgcctcccgcgtgctgggattaaaggtgtgtgccaccacaccaggcgcaatttgtggatttttcaaaggccatatacattcaagccatagaatgtgagtccagatttctttccttaaaagccaaatggtattttattacatgtatatgccatcttacttacctgtctacattttgaccattatgagtagtgctgctatattacaaatattatgatatgtagcacaggctagcacagaccctaaggctgcattcccagaacaacactgtgatgtcaaggggatattaaaggacactcagagaggatgagaaagacgacacatgtcccagcctcagccacgcccctggccagctgtcattagacatggctgggcttctgtgtctcaggcagtttagctgtaagagcctggtgctaatgctgcttccctttgcctcgacacattcacatttgactcctgtcacttgtaacaaagattcttgaccaatgtaagttatattaaccacgaataacatacattcttccacatagattacgcgcatgcacacatacactttcggattgtactcttgcataggtccatgatcatagtattacggtaaaggggaacttctattgagttctaaaaagtgttaaagagaaaagcctcaatgtctgtcatgtatattgttgacatacatgacatgaagaaacccatgggtgctaagtttcagttaggagcaagttccagtgctacttaatactcagtcggtgaccacaaatagcaaagatgaactgtacatttcaaaaagccagaagggactgagagagttgcttagtctgtggggtgactgcctgcctgccttggctttgaccctcagcacagcataaagctgagtgtggcagatcactgctgtaatccaacactgacgagcgagaggacggaagagcagatgttcaaggtcatctatagctatagtttaaggccaaccttggctaaaaggccagccttggctacatgaaatgctatcaagaagaaaaagaaggaggaggaggagaggtagtggttggagaaatggtaaagacttaagaagacggatatgcagatgtacttaatgtgacttaaacattccatggtgtatacatatatagaaagatggcaagggtctgcatacacacatcagatgtttatgttcttatactaatttggaaaaatgtaaaggtaaattaattttaaattttaaaaaaggaactagaactctcaaatagtccatattatcaatccctgcacataacaagacaaggctgacaaactagttaagtcaattgacagtacaataaataaagcaatgtgtggcaagctcacggtccttgtcagtcaccacacattatgatccaggaccgaaacacattcatagaccatcaaaacttaaggattatattaattgaggtgtggtgagaccaccaaggaggagagagcacttctcatgcaagtgtgctggcctgtgtttgatttctgtatcccacagtggaaggagagagctgattccatcattgtcctgcgacctcgacacatacactcactacacacacacacacactcatactcacatacttacactcacacacaccacacgtacacactcaaacatacatacatacatgtacacacaaacatacatatactcatatttacactcacacacaccacatacattcatgcacatactaactcacacacacacactcacactcatacttacacacacacacagcacacatacatactcacacagacatacaaatactcatacagacatatacacactcatattacactcacacacaacacacacacatttaacacacaccatacacacacacacacacacacacaccactaataataaaatttttaaaaatttaattatagtaagtaactcagtgctttggaagctgatgaatcaagcaagtgcagtatttgtttccaactttggattttgtttaagatgtacttatcagtcactgagtgctaacagaattccttgcatgagcctcagagtgaaaatataaacacactttcccttcgtgtttagaagtagaagcaataccacatagtttatcaccagagagaagtgacgaatgcttcagaactggcagagagcagaggatttaaaaaagaacaacaaaaaatctctaaaagtcccacaagaaagagtgtctttggagaaaaaaaaagtgggtattgcttttatttcttcagaacagcatagcatgcatcactatggttttctagctatattattaaattaaacatataatttttcttaggacaattatactaaattaaagtaatccctgtattgtcaagtgcaggaagggcaggacatgcaaactgttctctagggatgtcatgcaaatgcaatcccagaatgcaacagtaacctgtatctgtgtagccctgtttcattgtttaatcagccttgtctgttctcttacctcacatggtctttggttttgcctgtggtgttgtgtgttgcatgaatgtgtttatatacgtgtgtacatgtgtgtgagagtactcacatacacgctcatgtacaaggggcgtatcgagtgttttcctaaatgaccccctaccttactttttgagacagggtctctcactgacttgacctcactggttgggctgtgtttatattgagccttggagcttagagccattttggattgctttgatttggctcatcattgaaacaagaatggcaggttcgttttctacttagtcttgctaagcacattcacagtgttattgacaaggtccaggcacaattactaattgttatgaaacaagaaaatgaatgatcagggctttactatgtgagcattaggatctgtttagtccccagaataaacgtttaagatgttatatgggtataatcccagttccggggaagggaagagagacagaccgctggggtttgttggttagccagcagatcctatgtggtgagtttcaggttcatagaaacaagatcgttaaaaaaaaaaagtggacaatgctgagaaatgacacctgaacttttcttcaactcccaccaggatgcacacatatgtgtatccacttacaaacatgtgtccatgtgcatacacacacatacacacaagaaattaatgatcaaactgagagtttaaggactctagtcactgtacaaaattattggttctatcagcaggaagaaaagaaagaggtttttactaaatgaatcactgctgtaagaattttgtacaccaggtgaaaataatttaatcttgcctgagaagattctggatggactttcaggtttttgttgggttaaaaatgcagatagaaaactttagtttataaaaactgtgtttgaggggaaaaaaaaaaccacacctgaacattccatgagcttctttcttatcaagagagaagaaatatttactgtttttacatctaaacagtcttcggccacctcatcctccaaatttccagacttctctgggcaatttcacaggggatatctcagtatctcaggagatggaaggagccggccttctaaaaaaaaaaaaaaaaaaaaaaaaaaaaaaaaaaaagcacacatttctacatttcttcacctctttacctctttttaaaagcaaaatccagaaattttacaaatgtccatcacagaagtatggatgaacaaacaaactatagtgtattctattgttgttgctgttgggtgtatgtgtgcatacacatgcacatgtataatatatatatatacatatactacctatgcatatgcatacatgtagtggacacttaagggttctttgggaagtcagttgtgttggatggtgttttgctggggcaaacatgagaaggagcgttttgctgaagcaggcacaggtgaaaggatgtcttgctaaagcaagcacttgaaaggacacatgatgaaggattcttcactaacacagcacacagatattagtctgccttacattgcatagttgagctccatttgggactccatagagagaaacacaccaaaactcttctggtggtatgccggcaactttttgatgcttccttggacttatgccaattggcagaatgatgtcagctgatatagactaacatggagttttgctaagtcagactcacatgctaaggcaagacctatggaggacatgtggtgtttggagggactacaaatagaactcaacagactgtgatggagcctcggcctggcttgctggtacagctagctgtgcaatgcttgttagtcttttgtcttagctgatctttgctttgctgagagaggcacagctgagaacttctggtgctcctgttggccctggtccctcctgctgactcctgtcaattcagctgaggccgggccattcctgttaggtcattctactgctgctgtgatcccaacactacctaactggactgctggtgtatccgtgaagggtttgcaaatggatggagctgccactgctgacctgtgaactaaaatgctgatttcctgacagcccagatggaattgttccaaagaacaatttctaaacaggtccactacccctgtatcctttctttttcactacctctggtgggtggcaggttagaagggaggttaaagcatttaagaaccatcattgaaaataggctttgaaaaaaataaagttgcacatatatacatatatatgggcatgtctcatgtgccacagcacatgagagagctcagagaataattcacatgaatcaattctcttcttccaccaggtgggtcccaggaatcaaattcaagtcatcagtcctggcagcaagggcctttatctgccaaaccatcttgtcagccctaagagttatgttctttctgtcaactctcttagaacaatgagaacaagctagaactctaaaaaaaaaaaaaaaaaaaccgggcacttcctgcacaccaagccaacagagcatgaggtagctctcttacagcctggactcacataaagtttaaacacaggcagaacttatctgtggtgctggaaggaggcatagtggtgccttttagaggatggacagtggctagaaagggtgcctggtgtgtttctaggggtgctaggcaccctctcccgtctgtcctgggtacttgccacatgggcatgctcagcttacaaatttaacttgagcactcatgtgcatgtatgtgatgtttcaacaggctgtttaaactacaggaagaggaggaaaacccactaaaggctgctgagcagggggatcgagagactgtggggggtgagaaagtctgaaaggaggaatttctctggacaccactgaaggagaaatgcgtcaaggaggaggagggggagggggaggggaaggaggaggaagtagtccaccataccaagtgactcaaaaaagagtcaagaaggataaaggctgaaaactgcccatcggatctcacagctgaccatgaagagaatagttttaacaggaggcaaaaggcagaaaccagacagcagaggatcgcagaatgggccacaagcacccgactctgtagctgctctttcatacaatttgattgagaagaagagtcagagatgcagtaaatacctagggatcacagcaggtcagggaggtcttcatttcccttaggacaggagagagagacctttttaatatatggggaagccggctgaatgagagatgttaacattactgctgagtgattgataggtcccaaggatggcagcagcaggaattagccttgggcaggggaaggggatcttacattccatggacactgtgggaaaggaggccacggggctcaggtgcagcttcacaaagggagccagggcaggacctgacaaagctagctctgcagcccttgccttcagcgggaggtgaatagagacattaagggagatgctgtggaaatcctgtgtggtcacaaaagtgagaaactagtgcatcattcttttgacttccttgatttttcttctcagctaagatgttcgttcagacatctctaataaagaaccgtctgtctacagtgtggtccaaggggcaaattcttcagtctaccactcttcttccccaacgctccagccctgtcatttgtagtaaaatcacagagaaagatggtggctattcagttcatcttgatcatttaaccgataatcagaaccaactactctggtcgtctcccattgccattctcttttctttctttctttctttctttctttctttctttctttctttctttggttttcaagacaaggtttctctgtgtagccctggctgtcctggaactcactctttagaccaggctggcttcgaactcagaaatccacctgcctctgcctcccaagtgctaggattaaaggtgtccgccaccactgcccggcccatttgccattctttctggtccaggataactgaacctttgcagagagctgctggcccttgggaggtgaggcctagtgataggtcagactattcccctctgttgcctgttgccagccccccaaaggctccctgtgcactttggccattttcgtacagacccagttatttctctggaattttgtgtcagtagaaacaggctggctctcagatcacactaacccgaggaaaacaatccagctggaaagaaaccagaaatgtcagctacctttggaaaactcttcctgggtttcaggaggtagcaccttagaggagatgtatttcccagggtgaggaactcctctttggctggcagggtaaagctaaaccaaggcgttatcacaaacgagggggcggcttgatatcccccagagcatgttatttgttcattccaaaactatttagttttgctagcttgacattcagaaaagacgaagagcccaaaggtcttacattttctgggtattacacacataacggagaagttgccagataagcattttaagggcctgtggaggaggggtggttcgaagaagagcattggtctgggctgttatcactaagcatagcctggaaaccctaagcaccactcttctagggtcagaagagccctgaatgggcatcagaggggtgggaaatgtggtggggatggggctgtaggcaagtgtgggagtccctaaactcagctgtagttgggcaccaagggtcgtacattctaaaaggctctggctagaagctagcaacaccagcaaacgacacaatgaacacagaaagccattctagtgccaggaaataatttgtgagaatcagagcaccagacaaattcagaacaatttctttttaatgatcctcttaacatgaatgagataaacaagctaatcttgggagacaaaggcaggcaaagaaaaaaaaaaaaaaaacccttacaggcaaatggcagcctctgccctggggaatttatgttccggaagttggaaagtgacatttccatagactcaggacttgcaggtgcccgcctgactttcactaacagatatcaacagtgacttctccacggctttcccactaatgacgaccagagaccacaagggctgtctgcttttcagcaaccatctgaccttgagcttgggacaacagaagggaaccggaaagtcccgaggcagctttctgtgagccagagcagacggtgtgggaaactatgtctgtggttcctgcctgctcagcctgacaaagaaagagtgtgatttgttttcagattccttccattaaatgtgtcaagagggagaaactggctctctagagagaacttgatttccacgcagccttccccccttcttccttagtgactcactggccctgatcctgtctctttctcgattattccttgaggcccggaagcagaagagagaagagattgagaagcggagctgcaagttgtgtgtcagccttggccccaccatggactcctccccgactctgccccactgaaaacgtcacatggttattttagcaaatggacgttcaggtagacccccgttccagcccttatcccaggagcccccacgagtaacatatgagaagcttctctgttcctttcttaaaactaacttatggggctggagagatggctcagcggttaagcgcactgactgctcttccgaaggtcccgagttcaaatcccagcaaccacatggtggctcacaaccctccataatgatacctgatgccattttatggagtgtctggagtcagctacggtgtacttaagaaataataaataaaacttaggggggaaaaaaccctaacttatataaaagtgctattcttggggctggggtgtagctgtaacgcacagtagtacacagctttaatcccaacactcaggaggaaagcgcaggagggtcaaaattcaaggtcatctgcagctgcatagttccagccagcttagtatagataaaacccagtccttaaaacaaaagagtggggtttttttttttgtttttgtttgtttgtttgtttgagacagggtttctttctctgtgcagctctgtctgttttggaacactctctgtagaccaggctaaccttaaactcggagatctgtctggctctgattcctgagagatgggattaaaaatgtgtgccatcactgccctactgaaaa

SEQ ID NO: 5 - DNA, 132385 bp, Homo sapiens
ccacatggctgggaaggcctcagaatcatggtgggaggcaaaaggcacttcttacatggtggctgcaagagaaaaaatgatgaagcaaaagtggaaatccttgataaacccatcagatctcatgagacttattcactatcataagaatagcatgggaaagactggcccccatgtttcaattacctccttgtgggttccccccacaacatgtaggaattctgggagatacaattcaatttgaggtttgtgtggggacacagccaaaccatatcaactacgttgattgatttttgtatgttgaaccaaccttgcattcctgggataaaaccctgttaatcatgatatataagccttttaacatgctgctgatttcagttttctagtcttttattggaaatttttgctttcatcttcctaaggaaagtggctttggtatcagggcaatattgacctcatagaatgaattagggaatattcttttctcttttctttttcagaaagaaattaagaaggattgttattaactctttaaatgtttaatagcattcaccagtgaagccatttagtcctgggcagtcatgtagggcaattcttctagcaaccaacttcatcagctttcgtttctcgcggcatatcttgattttgccttcatttttgaatgatagttttgccaggtatagcattctttgttgataagtttgtttgttggtttgtttttttaatcagcactttaaatgtcatttcactaccttctggccttcatggtttctgctgagaagccagatgttaatctgattgagattccttgtatgcaatgaatcgtatgtctcttggtgctttcaagagtctgtcttcgtctttgtctcccaacagttgtatgattatagtgtgtcttggtgtggaacctctttacatttatttttcttagagtcagttcagcttcttggatgtgtagattcacattgttcttcaaatttggaaagttttcagccattatattttcaaatattctttctgcccctttttcttttctcctgaaactcccattatgtgcatattggtatatttgaaggtgtctcacatgtttcttagactctgttcatttctattcaccctttttttctgctcctgaaagtgtatttttttccttttctttttctttttttgtagagatagggttttgctatattgtccatgctggttttgaactcttggcttcaagtgattctctcaccccaacctccccaagtgctgggattgcaggcgtgagctactgcacctggcctaagtaaataatttcaatttgacttatgttcaagtttgctgattcttctgacagctgagatatactgtcatgatgactttttatttctgttatttaaacttttcagctccaaaatttctatttggtttgtttttataatttcttctttttattgatatcgtctacttgctgagacattgttcttttggtttcctttttttgtttgtttatggctttctttagctcttaagcactttacagacagttgacagttgatttaaagattttatctagtaaacccaatgtctgggtttcctcaaggacagattctgttaatttcttttttccttagactgggtcatattttcttattatatgcatgctttgtagtttttagttgaaaattggatattttgaactttataatttgataactttgaaaatcatactgtcttctcagtgtagaaatttttttgtctttcttattgagggtaatagttcttttgtttagtgactttcctaagctatttttctgggatcttctttgttgatccctgaagtttctggttttttttctcagcttaatagccagccagctgtttgacagagatttacctagatgtcaaaaaaagaaattaatctgcagatcttttctgattggctgtgttggacactcctgaatgcttagccaggctgtttacaaccatgaattagtgtttatttcttgcttatgctaaaccacaagatcagctagaagtgaaaacttatggtcttttctgtgcatacatcctgccttgggtatacatgtgactttctagattgcctagtgctcaaagaagcatttcaaatcccttattccccaaagagtctcactccccagcttttcctacccagcttttgtcatgtctattgtttgcttcaattcttgatttttgtctcaggtggtagctgcttgttcatttatctttcaatgtttttgaagaatgtcctcaactctgaaagggttccaagttaggcaatagaaaggcaggtccattgtgtcagttcttcaggaaaccccaagttggatcaaaacaaatgtgattccttgggaacaaggttttctctacgtccttcaggaccatatatttatactggggattcaggctgccatcttcaagattaccatcaagccaaggaggtgggtggggaaagggtaaattaaaatgccacaaagctctcttactgtgtcttagtgacctttctttggttagtgacctctcttggttgctgtaaacctttttcctatcttccacagttccaataaggatgatcttgacagtttttcccatatttttggttttctggggaggcacaggccccttaaggtccctactctgccatctttaatgatgttaccaagccacttcaatgatgtttgaatcccttttctatgtcttcatttggataccagattgatccaaaactactaatttagtttaatttcttctagtatagtttcttctttgatgattgtagagaataatggtgaggttttttttttctggctcaatgtctggctctcagatatgctgaaaagatgaactatctgaaaaacttaccttccagaattaattactagaagctcttctggtttttattctgcttttctataagccaatttttaaaccttttttatggattcccccttctttggcccagccctaaatggtggagtccttcagggatcaattatagaatttcttctcattctatattctcctagaagatattatagtctcttaagcctataaatactgtagacaccccaatgactccataattgatatccccagtctattgttacttgttgagttccagacccaattgctataccacatttctgcttagagatctcgtactatcttaaaataaatgaatttaaaaactgaacgcttagttttacttttgcaattattttttttctcagttcgttcctatcttaataaataacacttctacccatccagtggttctctaggaattttggggtcatccttgattccccattcctcgttatcaccagacttactgatttaaaaaaaaatcaaaaaacacagctgcaggcccttgcaaggagaaataaaaaatgtcaagacagtggaagtgtgaaaaaaagaggaagtgagtctcaagagttgaaagctgtaaggagtttaggggcttagagacttaaaagatgataattaagaaccagtggctcactcctgtaatcccagcactttggaaggccaaggcgggtggattgcttgagcccaggagtttgaggccagcctgggcaacatggcaaaaccccgtctctacaaaaaatataaaaattaaccaggtgtggtggtgcatgcctgtagtcccagttacctgggagactgaggtgggaggatcggttgagccttggaggtcaaggctgcagggagcacagattgggccactgcactccagcctgggtgacagagtgagacccttgtctcaaaaaaaaaaaaaaaaaaaaaaaaaaagcaaccaacattgaaagttatgaggaaggatgtcaaacttagtagtgctgtgaatttttaccagtattttaaagtgaaaaatttaaacttgaatgtttgggaatttagggtatagtaggaaatatcagcaatgttaataggattttatgcatgaagaagttatagaaaatttatacattatcttattttattcacatagcagtctgatcacacatggtccaaggacactcaaataagaagtcaaatataatcagatgttaaaggctgattttcaaacattatagccaataacaccttgctcacctgtgatctcactgatataaaaccatgtccgcacctcagtggcctgcaaaacattcagcacagctttttaaaatataagctatttaaagcactgttgatcatcttatccaggctctaagtatctgcagtgatctcggcaggggttggaggatccaacctctcctgacatagtgtcaaaatgtggccaaaggaggtttccagtaagtgtgaactaaatgatgagaactcatggacacaaagaggggaacaacagacactgggggcccattggagggtggaggatggggggagggagaggagcagaaaaattaactattgagttactaggcttagtacctgggtcatgaaataatctgtacatcaaatcctcatgacaggagtttgcctatataacaagcctgcacaggtactcctgagcctgaaataaaagttaaaaaaaaaaaaaaaaaaaaaaaaaaaagtaggtttcaggaaactcacagcagtgtttgtcagagccccagagccttctcagtgaggtaacaggcaaattggactgtggttctagaatggaaagttcattaccccaatggctggctgaattgggcatagatataagactgataacaagaaaggattccaggaagtagaggtgtggaaagagattagtgctttagccatgaatttgaattggcagtgacacatgagaaatctggggtgagggaggagagggaagtcaataatcatttgggtgagggatcactcagcgaagccttgagaagtcatcggaatgaagatttgagatgagtcattgaagaatcacttagttgtactgttctttccttttctcagttttcttagctggacttcctttttttttttttttcctttcttgtgtcattttctcaattccctataataaaatcttcagaatatatgaaattgtgtgtgtgtgtgcgtttgtctatacctttttgcaaagtaataatgcaatttaatttctgaagctatctagaaatgtaagagatatcaattggcatataaaagaccatctcagtaatgacgacttcattattttgcattgcataaaacctggaggtctttggttagaaggtttgttcactggttcagtcataccaccaaggctcaggttctttgtctctctccatcctgccattctcagcatgtggctctccattatttggtatgccacctcatggtcaccaaatggctgctgcatctcttgatatcacattctcacacatgagtgttgaaaacagaaaaaaaaatctaagggcaaaataacttctcttgttaaaatgccatcttttcgtcagaaaaaaaaaatttcccagaaggatctccacagattttcttcttatatttcactgaacagaactgggtcacatgtcttaactccattctatcaaaaggagtaggggaatggaatgaccatgactgatttagactttggagctggggctaggcctggagcccaccttccctgaatgtgtttctttccaaacttagggttttgttagtaaggaagaaagtactaacatcaaatagtgactgtcagacaagatagagtaaggcaattggcaaaggtctttaaggagcaacttggctttgtggagggggtatatgtttggagccctgtgggcttgggcttaaatcctacttatcacacgtgcatctttggacaagtaaattatttaacctctgaatctcagttttctcattaaccggagagatgagttattatcttgaagagaataaataagttactatgtataaagcactagcctagagccattttgtcctacctcagtttgaggtttggtgcccaaactcagggtccctgtagttaactgttcttaatcattgttttttaaaattgtcacccccaaatgtgtgcctagtcagtgagaagcaatgaattagtggcccaggtctagacagcttatggcttcagagcagtgtttcacaacctaagtttcctggagtcgtgaggagtcacccagggttagtaagggtggaactggaaagttatgaacagccatatgaaacataacaataaaaataatatgtctgccttccttttttccccttcaaagataaaaatattagtttaacgacatttataacaacatttacttagatcgaaaagctcatatagagaactgaatcttgatttcatgaggcaactagattgctgaccaaagatgtgttgactaatttggtgaaactagtttcttattacctaagcatgttgcattgagtatgaattgccttgctttaagctagggagtagtaggcaccacccacagcttacttataaccacttgacatagatcactgtgacctatgcttgactattaacaagcacccacttcttatcacctcctcttccacctcaacaaaggaatagtttccacgactgaaacatgactttaagaagggaggtgtcctggataaagccaagacatgaaaatccaatctacccatacccccaggcagacttgccccttgcgagtgataaattctacagttcaaatgagtattcaacactgcaggcacaattacttataattgacttttgttctgtagcagaattctctctgattcctcttctttatttatttcacctatttcttttcatttggcaattataaaggtacccttataatttttataactttatgcacaataatgagccttcagggaaagacaagaactaccgcactcaaaaacatcagaaaagatttgcttatgaatgaagtccatattttttgtgctggttttcctcattagagggagaaccaaaaatataaattctaaccaagtactgagtgctgtggagatcaatgtatttcatttagataactataaatgacaacttgctaggattgtaattagtcttatttggcgttattaattctacagagggagcataaaacatttaataatacattggacttactcaactcactatttcttactttcgtccttaagatcatcttaaaggaaacatggtttgaagaccataatgaagtgttgtatgtgcccactattttactctaaatggcccacaagtgaggcctgaaggaattccaggagccctacccagacatgatgtggaggtggagcaaactaggcactgagccaaaggggatcagtgatagccagcttttgggagagccagatgaggcagagagctgggatagggtggatctacctccaggttcaggacattcagggcacaccactgagcaggagcatcaggtaccatgacacagggctggtctgtgttaggataaagcaagttcttaatgggctttgaatccacagaaactttgcttgtgatgtccagatgacggccccatcccttctgcagaagtcagagttttcccagaaaaaaagcaatgactgaactacagctaatatttggagaacacccacatagttgtactctctatgtatttctaaaaatcattaataaaattttattatgcattattattgatatttcctttgtcatattcattattttcatttaataacttatatgtttaaaaaatagtttacccttattgtatataatttagaagatgcagaaaagcatgaggaagaaaatgaaaaccaccctcattcacatttgcataacctacagataagcactttttatattgtacttcttccagtcttttctacatgtgtacatgacaaaattaggaatacactaattttggtaggtaaaaaaatatacacaattcaattaaatggctacttgggggaggaactcccaatccagaatctatggcacagggaagttcaggcaggcctcatcatcctgtgcaggtggtattctcactcccattttacagatgaagaaactgaggctaatggagattaagtaacttgtccaaagttagatagctagtaagtgaacacaaacctttgtgatttcaaagaccatctcttgagattggttaacttttaactaaacctcccagacacacagcctgaccttatcttccaatctttcttgcagttaggtgtggttatgtggcacagtcctctccagtggaatctgagtagaagtaatggatgccacttccaggattggcccacaggaactttccatacaaaatgctccatattttctcttccctgtgtgatggatacatgtccatgtccaaggagaccttaaaagccacatgttgaggatggtagagcttctgtcagcctgggtctctgaatgactgcatggagcagagcacctttgcccaacaccgatttccccttattcaaggcctactggacttcacatgaggggaaataattagcaagtatcactaccttaaccaaatcatccaacaagtaagtggcaaaaccaggatctaaagccagttctttgtgacttcacaagcctgtgctcttttcactataccattctgcctccctctgcagtcaactaaactacagaaattgtgtccttccacacagcttgctttaaaaatacataagctacctaagaaagctctaatttagacatttttctctctgctagtctctatgccacaaaaaaacatagccaattatattgtgttaactgactcatgctggctttacacaatttatattgattttcagggtggtaataaccagcttctgtgattggtgtgcatgtgcaagacttcctgcctaacccatccttcttgtggctcagctttgtaaacactggccctgggtggccgtgaacagaagttcttatcttagactgcatgcaactcatcctactggcactgaaagcccttctttgtctttcttcacctacttaagcaaatttacaagccactttttgcctcttctctcagcagccatcttggtcctttcaatgttgcctgtgtgcactcatgctgtatttatgacctggtccctctcatactttgagatataactcaagtccttccttctttgagaatccatactgatgggtcactttttaaatacttaaggtctgcatcaaacattataacatttgctgttcttcttttttattcttacttggtttatatactaagctttattatccttttaaggttaaaactttctcaaggacactaactgtaatgtgtacaacttggtagccagcgtaacatttgacatagtgtcttgtaaaaagaagatactcaatcagtttttgaatgattcaaagagtaaaataatggcaacttcttttatctcttccatagtgcaatcttcaatattttttaaacaactattggctgaattctaccattgtggtttagagctttctctgagacatttttgctaaggttttgaaacaggttccaaattggtccacagtgacctccaaggctctacaggagtggtcctcaagcttcagctcattgggccccactcccagagtttctgattcagtaggtctcaggaaaggaccaagaacatacattcctactgggtaatgaggaggctgctgctggtccagtagtcacactttcagagccactgccctgtgagctcatggcactccatgattcccgccacactgacataatccccagctgacttcagtcttgcttactccactccaggttcagcttccttacatacaccaggcatgctcctgcccagagctttgcccatgtggtttccccagatacccatgtacttgttcctttacctccctcaggtcattcctcatatgtcaccatctcagtgggcccttccataaaacccagttaaaaatggcaacatccttctcccctcacacgctaactgacacacacacatacacaaacacactctctctctcacacagcatacgtacacacactccctatcatatccctttcctgcaatgcttttctccataccatttacaccatctgatgtattgtatgtgttacttctttgtctcctctctatactgccccctccctgcccccagaatgtaagattcctgaggcagagattctcgtctgtcttattcattcctgaatcccagaactgagaacagtgtttggcacataaacattcaaaaagagccggtattttaattgggtgactgtagggaccacaaccctacctattttcagaccgtgaaccataaagaagacaagcttatagctgaagtgaattaagcacgatcaactcagtactcacactgcccagatgtgtctggccagcatgagggtgcagaggaagacaccctgaactctccagggccctggacagatggccactctgtcttcacttttctcatctataagatgaagttgttggatgatatatcaatatttacaatgttgtttctagctctaaaactctatgcttttatcttcccttggatcttcatggcaccagaaggaaagtcttaggacccttggacctgtgagcagatcagctatagtcctgagttgacaaatttctcttggcatttttaccctttgactgctgtcaataacttcagcacagcaaaggtagcaaaattctattgggaatcttttcccaatcaaagctacagccccatagctgtgttgcctttttggttttgtgtgaagcaaaatttttttcctgggtcctaattggtgccaaatccaatattactacatttgcgtcaactcagaagtcaacccattcagtttgcatagaggaaacatctagaaatcttgcttttctttgctgaccttgatatatttgagatttgaacatataataacatataaaattatatgttataattttgggttttatgggctaagtcataaaccatcttatacataaattccaatagagaaaaaatggtggatgctgaattttaataaaaaatttatgacagagaaacctaaaattgagaaaatttgatcttacagtttaatttctgcaaattaagaagcactggcccatcaattgcatttcagagcacagagtggaagaaggttagcacagactggcatgtggcttcacatctactagttgttacaccttaggaggattatttaacctctctgtgcttcagtttccccaactataaaatagaaatgacatgatagcacccaactcctagggctgttgagaggcccaaatgaggtgatacaaataacatttttgaagtgggccaggcacccaaccaagtcttgaccaatgttgcctattattattcattgctgaaggctggagtgagaggcatttagggaaaagtaagctcaggcaaaggagaaaaaataagaacattgtaggaaaaatggaaagattcacaagaagggagaggaagaggcagcacaaatatattggaggagctccacatgcttatttgactcaagacctgttcatttgaacctttagaaaatcgttcatctttgcttatacagagcttcatctggtgtgtccatgccagggtgcaagagttgtctgtgcactcagacttttgagcaaggctgtttcaaatgttcttttagggtatttgtctccacaaaactctatagctgggccaggagcatctggatcctgcaaccagggattttccaagagcaatcttttatattgagggggaaagtttaaaggtattttttttttttgtcttgttatgtttttaagtaacttttcacaactacaggcctgtaaaaaataagggttgggatagcctgaattccagggctcttgctgggcccactctgctcaatttgcctctcgttccaaggtgaatcagcaatttccaaggcctgttgacaccctcagagggtttcccaagcacactctgtgtttggggttattgctctgagtatgtttctcgtatgtcactgaactgtgcttgggctgcccttagggacattgatccttaggcaaatagataatgttcttgaaaaagtttgaattctgttcagtgctttagaatgatgaaaaccgaggttggaaaaggttgtgaaaccttttaactctccacagtggagtccattatttcctctggcttcctcaaattcatattcacaggtaagtaacttatacttgtctctgcaaatccattccctcttccctttaactcttactttgtggagtggagtgtttctggtttattaaacattggtctcttgtccagtgtaaacaacgctacaatacttggatagaaacttacaggatgcattaatgatttcacaacattgtatacaatacagatgactcttggttgctgtcttctttatagcaatgctatttcatgtatcaatctcttagagagagagagagtggtgtacatgggtgtgtggtacaaatggccgaatagattgaataatctgctcaaagtaaaaataccagtgggcttcttttttaacttggctttgtgaaagcacaattctgtttgctctgataatcacagattcaatgatcacaaattctacccttgaaagctggtttaatgcagaactacaccgactttatcttttctccaacaccgtactcatttcttcattgtcccggttttcaaaaatatagatgcaaaaaaaaatgagctgtggatgcatgtttagaggggagaaagtttgtttctaggatctaatttcagtttttaggtcacccaagccagtgggagtcacatattgctaatggcttgagcacagagatcaaatattattcacacttcagactgggaataaaagacagtatttgtcaacattttgagggggaatagctttttagagatgttagagacaaattatagtggttatacctaaaactttttaatattaggagttagtagtggtttttattaaacatttgaagtgataacttatttatgagctgttgtttaatagaagttcttttctgtgggcaacctcgtcccctcactgctcacccccctcaccttggttccccctgctgtgctctgtaacactgtgattgtctctggttgaagcctccatttccctgtctaggagcttctgtttacactccaccccactctagattgcaagccccttgaataatttttgtttcctagtaccaagaataatggtgacaaatattaggggatgactcctaaaaatggattaagaagctatttagggggaaaatgcccattttgtggttttaaaagatgctacaattgccataaaatgcccaagtttcattgcagaaatcaaatactggagttgtgttttgcttggtcaagaggaaagaactggccgggcgcggtggctcacgcctgtaatctcagcactttgggaggccgaggcgggtggatcatgaggtcaagagatcgagaccatcctggctaacacggtgaaaccccgtctctactaaaaatacaaaaaattagccgggcgcggtggcgggcgcctgtagtcccagctactcgggaggctgaggcaggagaatggcgtgaacccgggaagcggagcttgcagtgagccgagattgcgccactgcagtccgcagtccggcctgggcgacagagcgagactcctctcaaaaaaaaaaaaaaaaaaaaaaaaaaaagaggaaagaactgtacatttagagacaaagaatcgctgtggcagttaactttggtgttacattctgttttcttcctaagcaattctttagtcctctacctcaacggtgcctctgaagaaaggacttacgtggccaatgggatcaccgtgtatttatttcccttccctatcagccatagccctcagggctggaagggcctcattttagtctattcccagactgggtcacccacagtgttgacacacagcatcaaccgacagtgagcttatctggaaaataatgcctttctattttctttgtttcttagcatatattaaatgtttctttccttctctaataatcttttagataaagaaatcatttgctgagctgataataacaaaagtatcctacctacatttttaaatgtcagcagtgaaagacgttttaagggctttaaaaaaaaaaaaaagaaagaaaagaaaactgtagtttagaaaggacatccaaattgaagaggagcaggggcagttctgttctctctgagcagctctgtgaagggggagtttgtggcgctggggtcttgaaagtctttacagagggcaagacttcacaagagaaaagccgtggagggaccctcacatgatcagaatattcacagtgtgatgtggggcatggtgggggcgggtgctctccactcccgggcctggcttggttcccctcactgtcctcagctcctcaatggctttgaggacatttagattcttcttaccatcttggcctgaatgtggaaaaagctctttttccttaattaagtctagaaaaggtcaacatgtttcaaaaaatagcatttgggtggaaattaaatggaaagtggaacaaatctctgcagagaaaatgcaaaaccctagaacacagacagagccatctctgcctcttggtctggtgggatctctattcttctcaaacccatttcctaacctctgtgggtgtgggctccaagtcccaagccttatcagggtaactttttttaagtataaatttgatcatatcctttcttgcctaaaagacttcattagcttcccatggcctttaggataaggtcccaagttctcagtggtaaggatcatgaggccctgaaggatcaaccagccacatcctcccgagttgcccatccgcctccctgagattcactgggctccttcagccttggacccggctgccctgtctcttgcatctgggcctttgcatgtgtccttccctgcctggactgctcttccctctcctcttcccatggaaaacttgctctcatcttcaacatctcatgctaagcacttgctccagagccttctccagctctctagacaaggcagctcctctgcatcagggcccaggagatgcctgtatttcccctttcctcactgccatcctgcttgacgcctaatttcccagataatgtctgccttccctgccacattgtaagttccatgagggtagggctggctggagggctggtgctccacacaatttttagggtaggtaaatcaggtcctcagagatttcttcctgggcctcaggctgccctgaactgatctcacagtacagggattgacattttctgcaaagagctgtatagtgaatattttaggtatgggagagagaaagggccatacattctgtcactgtagcacagaagcagccaaagataatagaaaatgaaagggtatgactgtgttcccataaaactgtatttataaaataggatggtaatggtatctttcagcccagaaggattcagctctggagacaccttttctcaaccctgaccctttttttttcttcaattcttctacaataccaatagccaattgctagtattgatcccagccattggtgaagatcagcctgtccatctgttgctccaggctgacatccccaccagttcacactagcagccttgctgtagtggcaagtagtgggcactgacattttatgctctcaggatctttgatttctttctggcatggcttgtagaaccctgtatctcctccaattttgacagcctcaggacctttgtggtactactcattcaggcccatttttaaggtcagtcaaagtactaggttctctcaagtgaccatctagctgatggtctctcttccccatcccctcctccccagcagtgaggtctttcagaatgctgttgttagagtgtaagatagaaacatctttgatatgtttttaccagtaattgtcaggagactgttctctaatgtgcgtatctgtgttgataagattacacattttatcaagagaaaacttcaaccctgaatagttaaacagaagcgcatatagtgtgcaggttatagaccacatgtcacttagcagagaggaacactggagttggtgtggacaattaagaattcttgggggattctatgattaggtgtccaaagtctgccaactagtgcttagacatctcgatttcctgctttttactcttagattcccttaagtttattggaaaatacatttttctggaatgccttgaaaattctcagtctgttcctgaagagattttggggaggttaaaataatttaatatgttaaagtgcacagtaaaaatgaaatagcattggatgttattttcaactctgagttttcttgtgttagtttaagtaaaattttgttattgtaaatttgttaagaaaccctaattaaagcctccttcaatgtatgaaactcaaatcaagttattaggttaggtgctaaaaaagtgttacagctaatggccgagacagtagaactaggtgacattatatctacttgtaatcagtgaggaaaaataatgtggcaaaacaccatggtactcttaaatcatagaaagtgccaaatgaggaggaggtacactctcaagaacctgcaaaacaaatatgtttatcaccaaaaactagattcccactgcatttccagggtttcagagactggcagccatgtcctccagcatctgatgtatgggtttcccaacatctcatctgataaaaaaaataatttgccagtggaagaaaacatggtctaataatatatatcagatatatattctacattcataatgatacatggcaattcatctaatattcaattctgaaaacctcttttgtggcaaatatcacaggcaaggccttcattctttctagaaatttcggtttttcagtgtactttcccaaacttagtgttataaaattcccagtgtttttgtgggtacatgcaagtaattaagattttcagcacaatggccttcaaaaatcatcacagccgtttctaagctgcccaaagataaagggactagcttccatttctgactgaacaaccagtgcatgcctttagccctagagagtatacatcttttgaagtatagctccttggcatgtcaaaaaagaacagtggactaccaaagttcagagtgatgcacttgatgctgagaaagaaaacaaacaaagaaaacaaacaaaagaacaccctgttccatttcatagctggcctggtactcacacctaagccatgttattctcttattagacataaacaatctcacagagtaccaacctcaaagttactttgagtcaatgcaaggtcaatttatactttgttctcagcaaaggcaaaatcaaggtcactgtgcaacccacaaaataccaaacaccttgctaaatgaatggctgttatttctttatctagtcataacatagtcccagctttttaacagcatccaatttagaacaaatacccactacattagatccttccccaaatcatctgactaaagcccgagttctgtaacaggttctttctaacaccattttactgagatgccccacagcccctgacagtgtgttcacccttggtgcaatgagtagcaaacacgacttgtttagctacagatgtattcttggtgctcactgactgaggggcattgacaatgctgtgggcatagagacgcatgatttaatggatttttgccttttagaatgtaacttttaacagtaaaatagaaaccacaaaaactatttgtaggggtattcggaaagaagcaaaatgtaagcaattgaaacctaatgtatggaattgacaaggggacacagaaggaaagtaaagagaataggttagtggattagtattcctgtgcttaatggaggacagattactacaaatgaccctggaagggcagatggggtggaggatcaggtagggaggactcggtctttaagcttgaagggcaaagggaacttcagctgctatctcccttttgctggctgctgtagagatacagtttcatttcatcttcacaccagtcctgcaaggtggattttaccaccatcaccaccacttcctgacatgaaagatggagaaatcaggacgtggagagagattttaaaataaatccaactacgtagagtgaagcaacaggtgtatcaggatctgagagactccaaatttcgtgggcaagacactacaccactgtcctctaaatactacgaggtatttgcacaccagtggaaagaaatctttttaaatggagagctaagccaagggaaaaaataaatggagactaaatttttttaatattgtattttaaaattaggaaatgcaataacacatctgtggttaaatgttgtttattattttctcattattaaagagtctctctgtttttttgaaaaaaaaatttggttaaaacttcaaaaattgtgtaaccggcaaatgttacagtctctgaatataatactgctatagtgagcaaattttgttcttgaataaaataactttgaatctggttcctttagtatattttaaaccagcctcataaactacttaattaaataatatttcttactctacttcttaatatgctattaagggacattctacaaaataagtgatgagtactcctcaaaactgccaaggtcattaaaaacaaggaaagtatgagaaattgtcatagccaagagttgcttaacaagatatgacaacttaatataacattataaacttggtatcctagatggaatcctggaacagaaaaggaattaggtgaaaaataagggaatttgaataaattatgcactctagctaataataatgtatcaatattggttcattaatactaatgcaagacatttacagtgcacattggtacgttaatactaatgtaagacattaatactaataatgtaagacattaataactgggtgtggggtacatgggaattttgtaccatcttcacaatttttctataaaatcaaaactgctctaatttgtttaattaaaagagattcaccagggttaagaaaaaaattattttctgtcatgaagtgttttattttctgcaaaatgattttgttttatttaggagtggtatgctgcttaagatggaaaaatacatgatgatggtgcatagtgcctccatcccaagcttgctaacattaacccttttgtggcattatccagctttccatatgttcttttttaagttttattttattttattttaagttctggggtacacatgccagatgtgcaggtttgttacataggtaaacgtgtgccatggtggtttgctgcacctatcaatccatcacctaggtattaagcccggcatgcgttagctatttttcctaatgctctccccactgccctcccccaataggccccagtgtgtgttgttcccctccctgtgctccctgtatccatatcatgaaatattttaaagccacaggaaaaaaaagagaaaaacttaatgaacaccaagttacctccttccaactttatcgtatcttaaaccctatgccatacttgctggaactttttgttttaagaaattaaaacatgcagatacagttcaggggccctctgagcccctccccagtctcattccacttcttttcctcagaggtaaccactatcgttaattcagtgcttatcagtttcaggtaagtctttatatttctactgcgtatctatatatctacgaacattacaaatagtgatttgcaggtaacacaatttacataaatggtatcatacagtatcattctgaaactttgtcttgtttgtttaaacttacgtttgttgagatttatccatgccaattcattgattttaatggctagataatattccactgtgtgtctattctatagattattgaatcaatctcttgttcatttgtattttctcctagctttttgtttccaaagaagtactgcaataaacaagcttacacatatctctgcatgcattttctgagtttcaatctcggctgtatcacttactaacttgtgctcttgagcttgtgacttagtccttcatactttagtgcccttatctggaaaacggggatagtcataatacccatctcaggaggctgttgggaggttttatggcatagcatgtataaagcatttagaacagtgcctgccacgtattaaatgccatttcattgttaattattttttaaattgttgaggaaaataccagagaaggatattctgggatctggggtattaacatgtttagccttgctagatatttccaaattgctatccaaagtcattcagtcaatttatattctcattagctgtgcatgaaaggactctttcctccacatcttaacaacactttgtactactggatatttcatctttgccaatatttcaatgaatagttttagtattcactgctgatcattaccccaaatttattcattagggttgcaaaataatgatttttttttaattttataggttttcaaaacaggaatggataatgatttttactgaatactttttgcatttatgaaaatgattaattattttttaccttaaataatcattgcattcctgggatcaacattgcttcatttttttcataaactgctgaattatgtttaacatattttatttatcattttaaaatctgttttcagaagtaattataagcctatttttatccttctttgttttgatgtcaaaattatacttgctttataaaatgatttgggtagcttttcttatttttcttttcaccaaaactatttatataagattagaattatctactgtttgaagttttggtaaaatttgcctgtaacattatctagccctgttgttttttgaggtgggagacttttgaatattgaatcaatattttaatagccattactttttaagttttctattcctttataaacaaattttgataactcatatttttctagaaaattaatcttaacctggttttcaaatttactaccatgaaattacttagtatttgcttatgatttaaaactttatttattttacctttcccattttcaattagtatttgtgatttatatctcttttcttcaacagtcttattgacttgcatgtttttagttttcaaaaaacaacttttgaattgatatatcctttctactgtttttcattttattttgttttctatcttataaatcttgcattttttaggttcttgattagaacataattcattcattaatctcttaaaagcaaaatgcatttatctttataaataaatcttgaagtatctttttagctgtagcccacaagattttacatatttatcaccatattttaaatattttctatttctgtcatgatttcatccttaacccatatttatctgcatatgtattttaaagtttgtaacacacacaattttactgagtatatgtgtgtgtgttttactagtgtttaattttttagtttttatttaattgcattgtcagaatatacacccttaagaataacaacaatatagagaaatacatagtttttcatttgtagaaattttttatggcttattaatgggtaagttttataaaaatgccaaatgtaattgaaaaatgtcttggttgcaggttccatagtaatgaaatttgtcatgaaaatctatcgacattgtgttacaattataattaaatatatatttgattaaatcaaatgaaattgccaacatttaatctttttttacttagaaagttcaactaatatatgaacaatgttcaaccaaattttaagaaaaattttatgtagtaaattacataaaattacttattttttatttgaaaagcttttatgttttctaattttttgtctgtttatcagtttctaataaagttgtgtttaaatttttcattacagttgcaggctatgttgtgttaggttgctgggtatatacaatccaataattgatttgtcttctagctggattgtacttttaattattatatgtcctttattatatccattattgttttgaacatggattctatttttctgacattaacataacagctttgagacatcagtatttgcatgacgtatccttttcaccctttaattttggaccatttttatgattttataaattatttcatttataataagtatatgtctggattggctgggtgtggtggctcatgcctgtaatctcagcactttgggaggctaaggcagacagataatcagaggccaggagtttgagaccagcctggccaatatggtgaaactccatctctactaaaaatacaaaaatgatccaggcatggtggctcatacccgtaatcccagctactcaggaggctgaggcaggagaatcacatgaacccaagaggtggaggttgcagtgagccaagattgagccactgtactccagcctgggcaacagagcaagacttggtctcagaaaaaaaaaaaaagtgtatgtcttgactttaaaaaattcaataaactgacctgtctttttttaaaaaacagccttttgagggtataatttacatatcacagagttcacctatgtaaagtattcaatggttttcaatatattaacagagttgtgcgaccatcaccataatctaactttagaacattttcttcatccccaaaagaaaccttatatctgttaccagtcactcctcattcccctcccacccctacccctaccccagcattaggcaaccacttatttattttctgtccctatagatttgcctatcttggacatttcatgtaaatggaatcatacagtatgtggtcttttgagaccgtcttctttcacgtagcatgattttgaggttcatctgtgtagcatgtatcagtacttcaatctacatacatttaccgtaattactgaaccgtttggactattttcaataatattcatttatgttttctgtttgttatgctttttttagtttctttagttttttttaacttttgttggattgatgacattttctacatacttagtttttaatcctttgcttatttagaaactatagattttactggtactttttcattgctttttcttaaaattttcagatattggttgaactttgttcagatattagttgaactttgtaattaaaaaatggttaaatattggcaatttcctttggtttaatcaaacatatatttaattatagttgtataaatatgtatttaattataattataaaacaatgtcctcagattgtcataacaatgaacttaacatactttatctgcatatcgaacaccttatcttgtgttcaagttacactcatatctacatactgtgtagagttttaattatgttcttttgaaatataaaaggttatacttggtatcaatatttgattggccgtcctgacatattttgttaactcttgtgctcacccttgtttctctctttcatggctcccttctggatactccttctggctaaggcacatcctctagttgttgttttatgcaggtctgtaagtgtaaaccctctgactttgaatgtctgtaaagatgctgaataattttttggctcagtgtaaaattctaagttaaagattacttttttttctcatcactttgaagacattacgccactgttttctagcctctattgctgatgagaaaacttctgtcagtctgttctttatatttgaatatgcattttcccctttcacagtgtttaggatggattttgtttattcttgatgctttactacagtttgattcttgaacaacacaggttgcaactgtggaggtccacttgtatggggattgttttcaaccaatctcagatgaaaaatatagtattctcaggatgcaaaaccagtggatatgtagagccaatttttcctatgcacaagttctgcaagccaactgtaggacttgtgtatacctggattttggtatatgcaaattttggtatacatgggagtgctagaaccaatctcctgcatatactgagggacatttctatataatgtatctaagttttgactgatatctattccaatcaattcttggtgtctactgttaatttgaagaatcaggtaattgcttctggaaaattcttagcaattatctctttaattattacacttctgtcattctccactctctgcttctgggattccaattaggtgaatttagaagattttcataactccccctttctctcttttatttgtacatgtgtgtatatatgtatgtaatacatatcacggtctcctcctgtgacctccatgggtctgcatttcatcataaggaatagatgcttcaatggtggccagcagtttcctcagggtcttctcagcagtgcatggggcccacattagctcctctggctccaagcgaagagatggtctctagccccctgtttgatttggggcacttacagtcctctcgccagctaaactctcacactcgtcagcatccagacgctgaggggaaaataccagctgcttctgtgctctgcttactcttcggtacttctctgccatttctggttcctgaagatgtttatttttatttatttgagtctgactgtatctctttttaaaaacatgttatccaccattgctatatatttgaagcagagaaagttagtgaagcataaacttcatgctgaatcgagtgtctatatcctggaattctcagcctgtaccctctataaactaatttttccactgtgaataagactaatcatgactctgtcgacatttacattttatttagaaaatgtcttccttctgttcctttgatccaagcttgactcaccttaccttgaggttgcatttacaaaggaacactgaaggttacccaacagtatgtgggtgtcgttcatcaactacagtgactcaagaatatcaccagttggtttgcctttctcatggttttaatgttttctcattaaaaataaataaagcacagataagcagaaagaataaccatccatccaacaactagaggaaaatttatcaatggttttgctttatctttcctataattaagctataaaaaacaaccatccatgtaacaactagagaaaacctttatcaatgactgtggcttatctttcctgataattaggctctttcagggagttattaaccgattttaaaacttttgtctgagattgattagtaaagattatttcttgaaccaaattgttctttcgtttggctactttgattaaagaagaaagaagagataataattgcaatgattcttttattttattttatagggtcgttggctgtgggttgcaattaccatgtctgactcagtaattcttcgaagtataaagaaatttggagaggagaatgatggttttgagtcagataaatcatgtgagtggcttttttccctcactgcatcttgtacaaggagaggtgagaacaaaagtaggacaagctggtcaagtttcaaggagcagaaaaaaatcagcaacagtaggtagaagtatcattgtgtgtgattcttatacacaactgtgtggctctccctagaatccatgtaacgtaatatctgaaagcactaggtaagaacacaccaagtgtgtgtaaatgaaagcatctctcaccaacacctttcctagatagagtagggttgttccagtggtggctgttatgactacctttagtcctgtattgttattattaatcataattgagtgagcgctcctccttaggaagaactgtgcccagactctgcagaccagaatgagatcatgtggagggggcctatagcactagcacctgggatgtcctgggctcagatggttctaagctattgttttctaaccctatgattttacattttacagatgacaaaactgagacttggatatgtttttgaaacttggcaaggaactcatgagtaaaattaatggaaccataattctaatccagttgtgtttgattcccaagcccaagatattgccgtctgtcaacattatcatgcttctttactttaataagagtaaacaggcatgatagtgttgaatgacaaagctccctagtggcttccttacacccctggctataatcactgactttcacctcctgccctgcatctattctgacctacactggggaaaacagtatgtggtctcaatcctatggcttctactagtgtagaagtgttaatgacatcttgttattaacatcttattgttaatttgtggtctatattttaaacagataaattctgatgcttttaaagaaccagacaataaataaatatcaattttattttgtagttcaaaaagttgctgtccatttgatattcagatgatgcaaatatttcatgtcctgaagaaaagtccataaatgagtaaaggtagcagcactcctggaccctaaacgagtgtcttcgtgtgtgtgtgtgtgtgtgtgtgtgtgtgtgtgtgtgtgtgtgtagaaagatagagagagacaatatgagcaggaagaaagaaaaggcaaatagtcatttgctaatattccatgaataaaggtaatttataggaatatttttctagagcaaatttcttaatgactgcgttgcattttgtcattattattaactgcttttttgcgttgatttttttttctgacagataataatgataagaaatcaaggtaagtgactgatttcaacaatgcagcatcttttctagaataactccataatattcatatcaaaggcacaaagcagagaatactttcatgcacattgcacttcatataaaataatatatacaatccattctttttctctttaaaatattactataatttgattttaaaaaccttttggaatatcccttctaggttaggttcaaatgtcccctctgtattcaggaatggcacagaactcctgacctaagagggaggaggaaaagttgaacaacaagtataatttcatgggcattggagaggtctctaaaccccaaattcttgccacaggcaaagagtagagacctaaagtgtcattattgcatatttctgttcagctaaagattttgaattctcatatagaacacatatcagctaatcacagtctggtatgaaggcgggattagatgaggtctaatttagaagacagaagtgaggcatcaggtaagttcctgaagtggaggtggtggaaacggaagggttaaaggtattttagaaattttaagtaattcacagcagagggaggaagtgggagtggtaagattagctttgggctgggagtggtcaggtcagcctgggcctctgagagccacacgtttcttattgcgtgggaagtttaaaaaatgggtgtggatgtagatgaatggcaaggagaggatgagtaggaagttgaatgagttgctttgtttttagaggaggtgagcatggaatgagaagatcacagcaaattttgccagagctgctgagaagaatgggagcaatccgcagagaaatgaagtgtgcattgcatgttgagctggagagcacacattcactccattaattcattcgttttgcaaatattgagtgtctatttggtatcagacactattgtaggtgctgcgggtatagaaaagaacaaaataggcaaaaatgttggcccttgaggagtttacattttagtgagggagatataataaacattgtaaataaatcaaatgtatagcatggtagctagtgataatctatcactttctttctgagaaggaaaaataaactggaaatggagctatgaaatggtgcgtggggggtggggttgaaattttaaagactttggccaggcaagactctgttgagtaggtgatttcaaaggaaggtctagcggaggtgatggagctgtccctgtggttacctaaagaaaatgcacctggggagaaggagtagcaggtgcccgcacccagaggtgggaacagttgggcatggacaaaggtcagcaagaggccaggcaagtggggtgttgagaactagaatatagttggaggaggtgaggtcagagagccaagggccagaccgtggggagtctcagaaaaaatttaggattcttttctgggccagaagggaagcttagggcagctgagtactagactctgcctgtgttggtatccattcacaaggtggtgaggttgtgtccagcaggcccagcagcctggcttaaggagaagagggcaaacagctggatggatgcaggatgaagtttacaaggatgatgtagagaaaataattgaggatgatggtgagagtgtggttcaaatgcctggcagagggaccttggctgcatggggaaggaagcaaaatcttaatggggtttagcaatggaaggaaatgaaggatttaaaggactgcatggctcaagtgaggttgacaaataggtgtggaaggaggaaggaagcgagaaaatgaggtacatgggcagtcacagagtgccaaggagttaaacatgtcagacagtagttcctggtgacagcaaggtccagggtgtattcatggactgcgtgactcaggttaagtcaagatccccgaagttgaagaggtcaaatacaggttaaacatggccttatgggaaatgaaatgaatgggaaatattaaggaaatatgattctatgaaaagtgtgggcatgttcttgaatttttcatcattatcaacattatttaatgtagttgtaatatttttaagcatgaggaagctttaaaattagctaatccaaccacttcaacttacccatgaggaaatgcagtcacaaatagattgagggtcatgactgagggcaaagagttatttgttggtataactgggagtatagaggactttttactttctctccatacctctcaggtgttcatctctgtgaatcgctagtgaacctgagattgagctatactgaaatctctagaagagggaaatctagaagaataaagcttgtgtttaagatactaggtttggccagaattttccagccagtggggattttctttcttactaaagaataactcataaaatcaccacctagggagaatttcccattgtattggaaagggtggtctttaaatccttatgtttttctcatcaggttacaagatgagaagaaaggtgatggcgttagagttggcttctttcaattggtaataaaactgtgttgatttatggcagtgggtgtgcagctataaattgtttagatcatgaggggagtgttaaatctttagtcatattggcaggtttttaacttcagtgatcactttttcagtcataggctttgcctatgtgataacatgctgaataactattagaaatatattgctcataaagcatacaaatcctatccaatagatcagaaaaatgtcttggaaaattatcactaagcccatggttatcatatttgtaaggaaagtcatcacaacaatcacatatatatatttattcttatgacaaatctttagaaattttaaagtataggtgtttactccaaattttctcaggatggaggcatttctaggcagaaattggcattcttcatagtcactatcagttcaacaaaacaatttatagtatttctcaatgccccacacagtttatctacttggcaatggcatcaatgacagtgattattttcccctaagttgtagatgagtagctaaaaacgaaagtcagctcctgaaataaacagaatgaattcagagagcaggaaatttataacatgatctaacaatgtaagagtctaatgttttagataattgatgtaccgtgccgtttatttcaatataattagtatacgaactctgccactcaattaaggtgattcccatgaaatttggtgttgagtactattcatgagaatctagtaactaaattaagtagtcctcctacctctcctgctcttcacccatagatgatctctgaaccctttgtttttcaagtttcggttttcttcatcaactgacatttggctgatgtttgtgggaagtttgtgtgcatttctccatggaatagcccagccaggcgtgctactcatttttggcacaatgacagatgtttttattgactacgacgttgagttacaagaactccagattccaggaaaagcatgtgtgaataacaccattgtatggactaacagttccctcaaccagaacatgacaaatggaacacgttgtgggtaggttgtttttgtttttaattttttacttttttgctcatatcttaaattgtaattcaaaatgtatagaggggattttactggctgagctggagtggtatctaacacaaagagaatagaaacatgagtttacccatatttctagaaattactctgcctcaagtttccttctatcttactatgttttaaaatcttaatagaaacaggattgaaagtcactcaccaaatacattgccaaaatgttaccactttattgagtataggcttgagcatgacactaccaatacttaacgtcactagggaggtgacccatgaattttacttgagtatcatctccaagagttctatttttcccccccaccaactcccctctgccccttagctttgtggctgtggctggtgatccacttgatcttaacccttccatctgtaatgggaatttcatgaacaggctgcattactttgagtaaggtacactagtctcaaccagtagttgagtttgtttttttcttttttcttttttttttttttttaagatggagtctccttttttgcccaggctggagtacagtggtgtgatcttggctcactgcagcctctgcctcttgggttcaagtgattctcatgactcagcctcctgagtagctgggattacaggcgcccgccactatgcccagctaaattttgtatttttagtagagatggggtttcaccattttggacaggctggtctcaatctcctcaggtcatctgcctgcctcagcctcccaaagtgctgagattacaggcgtgagaaaactagggcagtgctgtgatcagaggcaaccacgcagaagtagccagaactcacacagacacagtcactatgctactgttttctttgtgataagcctgacaggccaccttgtaatcagtgagtctgtcgtgtactcagggctgactcactgtcatagcatggcctttgcagtgtgcctcatgctggctcaagttcagaacagcttatttgcacataggaacccacatattcaggttcaagaatcaagggtggggcacatcttggctagaaagacactaggaatggctccctcagaggaatttatagttttcaccttcatttttgaaattttctataggcttgattccagactatgaatgagtccttctaaatcattgacactcttccataatattatctctcttagggtctttcattcatttactcattcaaccaaaatttttttaaacatcaaatataccaggaactcatgaaagcatcaaggacacagttgtcttaagagcatggtcctagccaggtatggtggctcatgcctgtaatcgtaacactctgggagggtgagacaggaggattgtttgagcccagaagttcgagacaagcctgggcaacatagtgagaccctgtctctacaaaaatttttttaaaaaatagcttggctttgtggtgtgcccctgtcatcccagctacttgagaggctgagatgggaagatcacttgggtctgggtgtttgtggctgcagttggctgtgattacatgggtgacagaatgagaccccatctcagaaaaaccaaaagagtcatgatccctatctgtgtgaagcttaagcctagtaagccatcattcagtcaatgatcatttaaaaacatatgcagtgacagacttggaggtacctgacagaaaacacaggataatatacaatgtgaattattctttataaacaacaagcctacttattctatataagttccctaatgtctaaatatgtatgtttcttttctaaaattggaagtttcttttcatttgacaaactcagagcaatttgtataaaagagagattgagttcaacaaaagtctttgaaatccttcatttatgcgggaggacagaagtgaactgctttttacagaggggtttgaccacaaaacataagattaatcattctccccttggagaaaaaaatgcattcagacctatgtgtgatgtaaattgacccaagccacggataacacttatgaggataagtttttgaggaaaaggtcctcaagtatatcttatcatgccttaaaatttggaaataaatgtgagaggagccaaaatttgaggcatatacatgatactaggtgcttatgaatatttatccaatgaattaaagaatgaatctactttcaacatttgcatcatagccatctattaaaaaggaattctctgtggccactcattactcactgtcttcattgttactggatcacatacctgaaggcgagcaaagaatacaaactgaggctttcagaagtccactggctttggctgaattcacgtaataccaaatgtgaatggacatttgtccttttctttttaaaaaaattcatacagatagctgaaattgtatagactatacctttctaggcatttctttaccaggaactccttgatgagttaaatactgtcatcgtgagttattgtgatcattgacatgaatactatttgttctattctgaataacatgtttgtttagctgttttatggtaagatcaccgcgatcttatgacttgggtgggacagaggagaaaagagaggacatttttctacctgtaagtagtttatatacctccaaagtcgcccaaactgtttgcaggtttctttcgtggaaaaagtatatcattaaaagtacagtttctccttttattacaatagatgtattagccttagaatatacaagacaacccaataattttagcaacaaaagcatgtgtgtgtaatgacaggagctggttttactattttattatattggtttccacatgtcaattgtaatctagtagatggaatttttaagttaaagccttccagatggctgtcagtgaattacactgataaggattacagagtgtcaggtctcttgattagcttatcagaatttctggtcagaacagtcgaataatagataaaaaaatgaaagcagatgaaggaataggaagttaaaataccacagttgcaatttcattttattttcttttatccaattaaagtgtaaacactcaaatggaagccacaaagtctcgtgtaacttaattgtagaagagacatactgtaatttctgccatattctatgggtcacagaaaccaaccctggtgtaatttggaaggagtctaaacaagtgtgaatattgccagatgagaattttaggggctttttggaggctgattactactgcgggcattggggagctcaagtcttcacttcctctcatacagataaatcaatgcagaaatctaggcctgtcctttcacttggatttcagtctatgttcttagcaatatatattcagtttgtataagcaagcactattttgtagctagacagtttaggctatatacttttgtaatggctttgttgagatacaattcacatactataaaattcacccactcgaagtgtacaattagatgttttttagtatatttacagagttgtgcattcactgccacagtcaattttagaacattttcttttttttccttttttttaattatactttaagttttagggtacatgtgcacaatgtgcaggtttgctacatatatacacatgtaccatgttggtgtgctgcacccatcaactcgtcatttaacattaggtatttctcctgatgctatccctcccccctccccccaccccacaacaggccccagtgtgtgatgttccccttcctgtgtccatgtgttctcattgttcaattcccacctatgagtgagaacatgtagtgtttggttttttgtcctcgcgatagtttgctgagaatgatggtttccagtttcatccatgtccctacaaaggacatgaactcatcattttttatggctgcatagtattccatggtgtatatgtgccacattttcttaatccagtctatcactgttggacatttgggttggttccaagtctttgctattgtgaatagtgccacaataaacatacgtgtgcatgtatccttatagcagcatgatttataatcctttgggtatatacccagtaatgggatggctgggtcaaatggtatttctagaattttaaaacattttcattactagaaaaagaaaccccttgcccctcggccatcactttctagtacctcatcctcctccctatccctaggcaacactaatctgctttctgactgtagatttgcctattctgaacatgtcatattaataatatcatataatatgtgatcctttgagattggcttctttaacttaagcatgtgttttttgcagttcatccacatgtatttttattgctaaataatatttcgttatatggatataatacatgttatgtatctgttcatcagttgatggacatttggattgttcccacttttgagctattacaaataattctgctgtgaacatttgtatacagatttttgtgtggacatgtcttcatttctcttgggtacatgtctaagtgtggaattgctgtatcacatggtaactctatgtttaactattctaggaactgccagactattttccacagtggctgcaccatttacatttctgctaacagtgtatgagggttctaatttctccacatcctcaccagcacttgttatttagcatctgtgatatctctcataggtagaataatgacccccaaagatatccaggtccttatccctagaacctgtgaatgttaccttgtatgggaaaagggtctatgcagacgtgattcagttaacaatatcgagatgggggagactatcctggattatccaggtgggccctaaatgcagtcatgtgtgttcttaaaagggatggttgctaagaagaaggcagagggggatttgcctgtagagagaagagtagaggcaaggtgactacagaaaaaaagaatggaatgacattgccacagccgaggagtgtcagcagctatcaagagctggaagaagcagggggaaatttctctcttagggccttaggagggaacacagccctgtcagcaccttgatttccacccagcgaagctgattttgggcatgtgaggggatacatctctcttgttttaattgtggtaattgttacagcagtcataggaaaccaatacaatagccatcctagggagcaggaagtggaatctcattgtggttttgatttgcatttctctgaggaccagtgatgtttggcttctttttaggtgcttgttggccatttgcacatcttcttcagaaaaatatctattcagatctttcatttggaaataaataatataacaaaatatgtattcagccctttttaaaactgggatatatgtctactgattattgagttgtaggaattctttatatattctagatataagttccttatcagagatacaatttgcaagcaatttctctcattctttgggttgtctttctaacttcttgataattatctttgaagcactgaagtgtttaattttggtgatgtctagtttgttcttttgttgcttctgaattggtgtcatatctaagaaaccattgccaaatccaaggtcttgataattacctttgaaccactaaagtgtttaattttggtgatgtctagtttattcttttgttgcttctgaattggtgtcatatctaagaaactattgccaaatccaaggtcgtgaacattacacttgttttcttttaatggctctggccatgtgaagtgccagcttccccttcatctttcagtatgagtgtaaatttcctaaggccttcccagaaacttagcagatgctctaatccttcctgtacagcctgcagaattgtgacccaactaaacctcttttctttataagttacccagtctcaggtatttctttatagcagtgtgagatgaactaatacactcacggttagtctacgatccactttgagtaaatttttgtaggggtgaattaggggtccaaattgattcctatctgcatggatagccagttgttccagcatcatttgtggaacaactattttttccccattgattaatctcagaatccttatcaaaatcaatttactgtaattaagagggtttatttgtggactctcaatgctattccattgacctacacatctatctttatgccagtaacacactgttttgattaccgtagttttatagtaagttttgaaatcaagaagtgtgattctactactagggattgtctattctgggtctcttggattttcatataaattgtttaacttctgcaaagaagtcagctagaatgctaggaattgcattgactctgtagatcagtttaaggaatattgccgtcttaacaatattaagtcttctgattcgtgatccacttatttgcgtctgctttaatttatttcaacaaggttttatagctttcagaatattttgcaattttttgttaaattgattgctacgtattttattatttttgatgttatcataaatggaattgttttcttaattttattttcagtttgcccattgctactatcgcaaaatacaactttttttgtatattgatcttttatcctaaacctagctgaactacttatgagttcaatagttttttagtgggctctttaggattttttatacaagaccatatcatctgcaaatagaaataactatacattttcctttccaatctagctgccttttttattttattttattttattttattttatcttattgcctaattgttttggcccaaacctccagtacaatgttgagtagaagtggtgagagcacacatccttgtcttattcctatcttagggggaaagcatttagtctttcaccattaagtatggcattagctatgactttttcacaagtgtcctttattatgttgaggaattcccttctaatcctagtttgtagagtgttctaatcattaagtcatgaattgagtcatgtgcttcatctacatctattaagatgatcatgcagttttgcccattataatattgatatggtatattacatcaatgtatattcatatgttcaattacctttgcactcctggaataaatcccaccaggtaataatgagtaatcattttactatgctgcaggattcaacttgtttgtatttagtgaagatttttgtgtctatattaataagagatataatatataagagttttcttctcttataatgtctttgcctgcttttggtatcggataattctggcctgatagtttggcagtgttcccttccattctgttttttgaagagtttgtgaagaattggtattagttctttaaatgctttgtagaattcttcagtgaagtcatctcatcttagactctttgttgttgaaagtttttgattgctgattcaatctctttagttgttataggtccactcagattttctatgtctttaaaaatattttttaatttggcacataaaaattatatatatttatggtgtgcagcatgatgttttgaaatatgtatacattgtggaatggctaaattgagctaattaacatatttactacctcacacacttatctttttttgttgtaagaacactaaaaatctactcttggcttcaggcttcctgggatgccaaaaaactgtgtgtccgcttgctttctcaatggggaggcttgtggtctggggcaaattttcagccctggtcactggctgcctggaaatagattcagtgctgttgttgggggcacggtgggcatgagattaacctctagtactgcgggctgagtgggagcaggttaaggcctgtaactgccagctttcccccacttccctagtgacctgtatgacttagcagaggcagccataatcctcctgggaacataactccattggactgagaaccacacccccatcccccacagcagctgcagcaagccccgcccaaggagaggctgagctcagaggcgcctatccctgcccctacatggtggtctttctctacctgccctggtagccaaagacaaaggcccaattctcttgggaactctgtggccctgcccactgcttgggaaacctgaatagataaccaggtgtcctgagggcaactttgcattctccctataggaccatagctgatgcactcttgaaagtgccacctcctagctagaggccaaccaacataaaaccaacacactaaataaaaacacaacagaggaccttcacggagcccacttcactcccctgctgcctccaccaggtgcaggtgctgttatccacagctgcaagaactgaagacagatcacatcacaggactctttgcagactcttgccagtaccagcccagagcctggtaactttgctgggtggctagacccagaagagcaaaaacaatcactacagtttagcttaccggaagccccattcataggggaagggagagaacaccacaccaaggaagcacaccatgagacaaaagaatctgaacagcagcctatgaatcccagatcttccctctgacatagtctacccaaataagagagaaccagaaaagcaaggttctttaacaccctgaaaagatcataccagctcaccagcaatggatctaaaccaagatgaaatctctgaattgccagaaaaagactttagaaggttgattattaagctaatcaaggaggcaccagagaaaggttaagtccaactgaaggaaataaaaaacatgatacaggatatgaaaggaaaattcttcagttaaatagatagcataaataaaaaaacaaccacaacttctggaaatcaaggacacacttagagaaatgcataatgtactggaacgtctcagcaatagaatcaaataaacagaagaaagaaacttcagagtttgaagacatgggtttcaaattaatccatcaaagacaaagaaaaaagaatttaaaaaatgaacaaagcttccaagaagtctgggactatgttaaatgaccaaacctaagaataattggtgttctcgaggaagaagagaaatctaaaagtttggaaaatatatctgaaggaataattgaggaaaacttccctggccttgctgaaggaagatcttttgtctagggatgtagacatccaaatacgagaagatcaaagaacacctgggaaattcattgcaaaaagatcatcacctaggcacatagtcatcagattatctaaagtcaagatgaaggaaagaatcttaagagctgtgaggcaaaagcaccaggtaacctataaaggaaaacctatcagaataaaaacagacttctcagcagaaaccctacaagctagaagggattggggtcctatttttagcctcattaaccaaaacaattatcagccaagaattttgtatccaatggcacttaacttcataaatgaaggaaagatatagtcttttccagacaaacaaatgctgagggaacttgccactaccaagcaaatcagggaaatgcaaatcaaaaccacagtgtgttatcatctcactcctgcaagaatggctataatcaaaaaatcaaaaaagaatagatgttggcatgaatgtggtgaaaagggaacacttttacaccattggtgggaatgtaaactagtacaaccactatggaaaacagtgtgtgattccttaaagaagtaaacgtagatctaccgtttgatccagtaatcccactactattaataggcatgtacccagaggaaaataagtcattatacaaaaaagatacttgtatatgtatgtgtatagcagcagaatttgcaattgcaaaaatatggaaccagcccaaaggcccatcaatcaacgagtggataaggaaaatgtaatatatatattacgtatgatacagatatgatatatatgtaatatatattacattttatattactatatattacattttaatatgtttttgtgtgtgtgcatatatatatatatgcacacacacacacacacacacacacgcaccatggaatactactcagccataaaaaggaatgcaataatggcatttgcagcaacctggatggaattggagactattattctaagtgaagtaactcaggaatggaaaactaaacggtgtatgttctcactcatatgtacgagctaagctatgaggacacaaaggcatgagaatgatacattggactttggggacttggaggaaagggtgggtggtgaggaataaaagactacacactggatgcagtgtacactgcttggatgatgggtgcaccattctaaaatctcagaaatcaccatcaaagaacttattcatgtaacccaacaccacctgttccccaaaaacctattgaaataaaaattaaaattttttaaaaataataaaatgtacattataaaacaaaaaaaataaaaatctactctttcaataattttcaagcatacaaaacattgttactaactatagtcagcccagtaaatttcttgaacttattcctcctaattgaaattttgtattttttaaccatctccctaatctccccacctctagcccttagtaactaccattttactctctgcttctatgaattcaaattttttagatgtcacatttaagtgagattacactgtatttgtctttctgtgcctggcttatttcacttaacatgatatactcgaggtgcatctgtgttgttgcaaaggacaggatttttttaaaaggctgaataatattccattatctatatgtaccacattttctttatccattcatttgttgatggacacataggtggctattgtgagtaatgctgcagtgtgcatgggagcgtagatatctttttgatatattggtttcattttccttggatatatacccagtataggattgctaggttatatagcagttctatttctaactttttgaggaacctacatacatatttccataatgactgtactaatttacattcccaccaacagtgtacaagtgttcccttttttccacattcttgccatcacttgatgtcatccttcttttttataataaccagactttgcttcatgtgttttggaggctctttttttaggtgcatatatctccataaatgttatcacttcacgatggattgacccttttatctttacaaaatgatttttatctctagtaacaagtttttaaagtccattttgtctgatattagtatagccactcctgggttcttacggttgctttttgaaatgattttgtttttctatctttttgtttcaacctgtttgtatctttggatctaaagtgtgtctcctgtagacagtacatagttggatcttgttttatttaatgcaatctgacaatctctgtcttttgattgtattgtttaatccattatatgtaaaacaaacataacatcctgaaaagtggggggaaaaagtcaactggctagagccctcaggagccaagtaataacatgttgataagttccctgggtatcttatgcctgatatgtactagattaagtgttagaaaagctggcaaactggaaaccccaatgagtgcagaccaaaaagactcaacaaaatcctgctttttctagatagtgggtcagaaagagaaagcctagtagaaaacttctaagcaataattgctctactctagccaaacaccacagaagaaaacggtgacctcactctcacccatgccagcgaatgttgatttgggagcatagactcttccacacttgctaggtggtaataagcccctcttgtgccaccccctcactcacccccatggtgtcaatggagaatatgtgggaggcctgactcatccccactatagtaaggcacctctccccttacctgctgggttggggtgacagagtcaaaacattaccaccaccgccatggaaggggaaatcaagacattttcagatgaaataaatcaagagaatttgttgccagctgacttaccccaaaagaatggctaaggaatgttctttaagcagaaaggaaataataaaagaagtcctagacatcaggaagggagtgcgtagtaacaaaactatgagtaaatgcaatagaccttccttctcttaagctttctgaattatgttttatggtagaaactctaacactgtgatatgatcctactctgacactgtctgatgtgtgtttaatttggaaatagataagacacttattaacgaaggagagtagaggtatgtaatgggaggtaatctttatatatttcacttgaattggtaaaatgacagcactagtagactgtgaaaagtgatgtatctataatgtatttcctagagcaaccacttaaaaagctatacaaagagagacacttaaaaacgctatagataaatcaaaattgaattctaaaaaaatgttcaagcagcccataggaaggtaagagaaagcaaacacagaaataacagagagaacaaatagaaaacaagaaagaaaatgacatatttaagccctaatatatcaaaatataagcaagattttttgtagatatagaaaagattaccctaaaatgtttatgaaaatgtaaaaaaactggaatagctaaaataattttgaaaaagaataataaagtgagaagaatcaatctacccaatttcaagacatattatatagctaatgcagtcaaggctgtgtggcattgacagaggacagatatatagaccaatggaacagaatggagaactcagaaatagacccacacaaatatgtccaattgatttttgacaaaagtggaaaaacaattcagtgggggaaagataagctttttatcaaatggctgtggagcagctggacatccatagggcaaaaaaatgaaattacacaaaaattttcttaaatgaatcatggacttatatgtaacaaataaaactaaacttttagaaaaatatggaagagaccattttcatgttctagggctggacagagcatgtagatgacaccaaaagcacaattcataaagggaaaatttgataaattggacttcaataaaattaaaaactttgtaaaagatcctgttaagagaatgaaaagacaagctactgactgggagaacatatttgcaacttgtatatccaaaaaaggactaggatcccgaatatataaaaaattctcaaaactcagtgttaaaataacaatagcaaatttcagttcaaagatgggaaaaagacatgagtaaggacaaaagatggcaaatgagcacatgaaatatgttaaacaacatcaatagagaaatgcaaattaaatcaaaatgagatattactatagacttattggaatggctaaaattaaaaatagtgataaccctaaatgttgatgaagatgtggaagaattggatcactctaccatcactcatgccattcaaaccatgtcatagctatcctggaaaacagtttagtaattaaaaaaattctaaacactcaactaccatatgactcagcatttctactcttggggatttattccagagaaatgaaaacttatgctcacataaaaacctatacacaaatgttgatagctgcttaatttgtaatagataaaaattggaaacagcccagatatcctccaaaggatgagtggttaaacaaactgtgatccatctatctatattatatggaatcctccttaataaataggaatgaactgttaatgatgaaacttgaaagaattatgctaagtggaaaaaagccaaccccaaaaggttctacactgtgagatccatttatatgacattcttgaaatgacaaaattacagcaaaagaaaacagactggttgtagctggggctaaggaggatatggggattggatagaagcatgtggagatataaaaggacaatatgagggagtcttgagatgatgagaatgttctgatcttgattatatcactgtcaatatcctgggtgtgatattgtactacagttttgcaagatatttgcaagatatggctttagtaaatctgtaagcttgatgtgtaaattgaatgacaaaacaaggtaaaatgaaaaaaaaaaaggtaaaaagtttccaaaacaaggtaaaaagaaacaaaaaagcaaaataagtcctcatgtcataataatttgtaaaacgtctctttatcttttttcctctaatgtcatctctctcccttctttgctattcaacaaatggggaatcttaattcattcaagtagattcaggtctgtttttgctgttaaaaaaatgccattctgtggtccaaatcacctgcacactttatagaatccttcctggggttttatgatgacaagtgttcccaacattcaggcaataaagaccttggtatgcagtcaagggagcaaagccaggcctgctcttttccttcctgtcagtttttctgataggttttttctgttgttccagaaatattatcaagttctctaaagccttaatcacctcttcttcccagaataaaataaaaatgagttaaccactcatttcagagacaccgcaggagtgaagagagtgataaactgcatatatctttatctgcaccatccagcagtgatagaattatcttgacctttgttccagaaaatcccagagctgggccagtgcccaacacccttaatccacatatgtttgtaaactggcatttttaatgacagtcgcttcatcacttccgcttacagtgcttgtagaataaagacaccacaggaaatttaagttatttattgttatcattttaattgtcacataagtatacatatttatgggatatagtgtgatgttttgatgcatgtatacaatgtgtaatgatcaaatcgaataattagcatttccatcacctaagacatttatcatgtcgttgtggtgaggacattcaaaatcctctcttctagctcttttgaaatagtcaatgtattattgttaactattatagtcacctactatgcaatgtagtaccagaacttattcctgaacagtaactttgtacctgttgaccaacctctccccatccctccccctccactgctcttcccagcctctgttaactactattctctaagtaaaatgtttggacaaatgcttatagttttctggtttgggacaccccaaaacaagctgaaaatgaagagaattgactcatgtataccttagaaagcttttacttataataatatagtatactctctgttcagagatatttagcttttataagagcctctgattgtggatattcatcgataagtttatgattttctagttcttgttcatctcagggttcttcttagtcatcatgaaagactgggaatgtggtgagcacaagagaccttagctggttttgaggttgtcagaagggttgaccacagcagttatttcccttcctaattagtattttgaaagtcaaagcaaaatcaggaaacatttattgatttcaggcagagtgaccaagcagtgtaagcccagcccttgaccttgagtagcttgcaatctactagcaagacaagcataaatgtactcaatataaatatattcaataaagatattgactaatagtgcagtttattctgtattaaatgaattatgttgcaatgcttgacctgagttcaatagagaaaaaaaatcaagctcaagccacaaaaagaaggctgacagagagcggaaaggatgtaggatgaagaacccatgctgaagaggctgcttgctgattctctaaagtagactctataccatttaacttgtccctgaagatcataactgtcatcaaccaatatgttaattttctaattatggaatgccttcattcataaaagcaatttcagaatttttttttcctccactccctggcactgccaatcccaaaccctgtgcagcaacatggtagtgctgctgggaaaaatgccaaagtatttttctttgctatttttcttcttgctatttcccacaagtgtctttggcttcaaccttagaaattgtcctggtgaatgaacttaggctgtagtcagcaaaaagacagggctaataaaatgcttttctctcccatgggaagataacaggcacatttttcagtgtcactctgagatagagaagttgaaaagctggctagcattcctagaagaggtaacagtaagcctcctgatttacagcacacatcgttctatcagtttcttttcagacagcctgtctggcttttgaaaatctttcttgcctgtgattgctctatcactgcatgatgagtatgcatggaagagactaaagtggaccaagccctgggctgccatttagggtaccctggcttccaacaactgctaattaattatttcatagtcctagcatctctgcctataaaaatgaaggggatatgcatattttctgtgattggtaccatgaggtctgtttagaaatttggttggatttattataattttgcatagataaaatgtcttactcatgtctaatagaaatatactatatatagtatatttattatatattatatatatatttaaaatatatatattttttaaatccctctatatccacaaatgtaatctctggtggcttgatcctacttgcaagtctgaacattcttttccctcttttgaaggttgctgaacatcgagagcgaaatgatcaaatttgccagttactatgctggaattgctgtcgcagtacttatcacaggatatattcaagttagtagctcctccgtataatttatagatcaatatctgacctcaaagacactacaatgagatgcaatgtgttgccactctttaagctaatcagaagccctaagaactacagtctgtttccagaggacatgagagaatggagagggattcttctctcagatggaaacttaggaggatacaagtggctgtccagagagatgcataatagactcgtagttgtaatgtcctgtcctccccctgcctttccctacttcatcctctcttctatatccagaaatggacatttgcaggtgtgtttgtagggggcagttgagtagcttgaagaatgtggggcagggggagatagaggaaagcaaaatttactttctttttctcgcattgctaaagtctcaacaaactgcattccaacccaaattctgaaaggctgaatctagagcatattttagatttaagtgttggaagggcttggaggtacttaactcttattaagaaagaaaaatattttatcttttgccttcttttgtagaaaaataatgaattccttcccattcattcaagaattccacacagtgctgtttgtaaagagaaatgaatcattttttcccatttaggcattgggaattttaatgacaggcttttttttttttttttttttttttagttagggaaaatctatcagcagattagatttttgctgatgtcataatttttgttttacatttcttgaaaattattgcctgaaaactatgcatgaatgcttctaggcaggtctttccgggaggaaattcactcagaaatggcattaaaaatagttatttaagaacaataatgccttatttttggtgctgtgagccttctttcacacatggggaaagtgaagctctgtagggtaaagtccagaagacatgggcctgcttaagtgtcagagctggattcaaacccaaatctcaggctaccctgctgaaggttctgtttacctccacttttagcagcagatgacagagctcacatcttagttcccaagaagaggcattttctgaattactttcccccttttctcaactgttgtattgaaagtactttcttctgaaaaaagaaattaacaaatatttcaaacattgcaatgctaaacattcctttgtccatttccagatatgcttttgggtcattgccgcagctcgtcagatacagaaaatgagaaaattttactttaggagaataatgagaatggaaatagggtggtttgactgcaattcagtgggggagctgaatacaagattctctgagtaagtagctggtaaaacagtattttagtgtgtgatttttggataataaaacccttgtttctaaattaaataaaaatttaaaaatattttcagttttcctatgtttcatctcttaaattgggctttcatatgtggcatggctttttcataagtaatacactgtcaaatatggacattaaaaattgaaacccaaggtactgcaatttggtgtgtagaccttaattaaaatattagaaaggaaatattatagaagacagttaaaaaggttatttagctgtccaggtgtaactggatttaaatccagtttacacctagtttaggtcattaacagccacccaggaattctaaatgagaggaattagaattggtcgaaccctattgaactgaattttgaggtcccctgaaagacagtcactctacagtgtagataaagcacactgaaattcaggacccctgacttccggcacttactctgctccttactgtgaccttgagcagttatctaaccctgctggaacacaatggcctaatacctgggtgatgtcttaggttctttcttgctgtttagttccaagctctcttcactccaactggacaagagattaaggaaatgttctcaggaatatgaatttaatataattatattcaataaatattctggagcaattgccttgcacttgtgctcttgaggaacttacagcctcgtaggggaaataagaaatgcaagcaaataatcagaactaacacatattgtttattatatgataggcgctgtcctataggctttacatatattcgctactttaatcctcattattacccattggggtaggttctattattgttcttattttacagacaagaaaattgagccacaaaaaggttaagtaacttgcccaacaagagtctgtattcaaattcctagtctggctccagaatctgcactcttcaccactactctatactgcctatatgcagaatgcaataattccacacacatacaaatgcacaaggattaattacagtgttacggaaacacagggagaaaggtgttacttcttcttgggggattatacaagattgatgcacgagaaggtatgtgactagaaccttgaggctgaaaggattcagcaggcatgaagaaagaaaagctttgcaagacagagcaaggatattagctatgtaaaagaaaaagacaaataagatggtttccaaaagcctttatcaacactgagtaccagctgggaaacctagattaagaacaaaattgattggctatcaggaaagaggcttgataacatcccaaggtgcagcaaattttccaagatctgagaggctgttaatgctatccaagggtgatagggatagagagatgggaatgtttaaaagggaaagactgagactttcagcaagatatttgaatgatcaaattcagttttagtgaccaaaatctttctggtttctagtgatattaataaaatcaatgatgccatagctgaccaaatggcccttttcattcagcgcatgacctcgaccatctgtggtttcctgttgggatttttcaggggttggaaactgaccttggttattatttctgtcagccctctcattgggattggagcagccaccattggtctggtaagaatgtctttttgcatctctccatgggaagacatttgccttcataaacagccaaaaatgtgaagcttgagtcccttttcctgagtacagttagcaacataattatcactatcttcatgtagtttgttagattactccccagtgtcaaatgacatttcatcgaatagggattaatgatgttttaataggtaaatattgttttattaacagcaattacatttattgagcattcactgtttctctaggcactactaggagcttaatagtcattatctctaatctttacaacaatcttataaagtgagcactaacatcattttaaatataagaaactaggctcagaaaggtaaggggatttgtctgggactgcacagctggcagagtaggattcaagtctaaggggctctgactccaaaccccactcactctccaatatgcctattgttctccatgtcctcccaagcttgggcacttccctgaaaaggcacaacagacaaagagcattaacaagcacacaagaaggatttctgcaatcacaactgtgttctccatttcatcttatctttcagataacctctttcagagagaggtgatctgacccattccaagagttatcccagtcactgtctcggttccccaggaattgaggcctggacaacatataggaataggaatttcgggtcacatcagctaaaaacactcccaaggactgagaaattattattagagcagccacattagatagcacgttatggaatcaggcatactaaaactgtgctataaatgagaatagaatttaactgaaaaactgcatacaccctcacacatcgttgagcaataggtaccaacttcctattgctcaatagcaaaatattctcacagtgtctacattattcaaacatttcccagataaaatagaaaatggtttaaagtgacaatagcaaagagctcgctccatttcattaggtcaccacttggctgtaccgctaacaggttgtgtgactcaggaaaaatccatttaacccctgaaaacctcagtttccttgtctttaaaatagggataatacctcccaaaaacattatgatgattcagggaataatccacgttatgcatttaagccgtgtcgggcacagaatcaattgctaaagagagatgtatatgtttttcaatccactatatcattcaagttttacggcagtctttcctactaaccactttccaactatactccagagaaccctcaacttccacagaagagcttcaggggttttgcaaacattttttcattttttttctgaatacactaatctctttcttcaaacctgtgataaagtaatatacacactcacgtggatcataggccacatttcaacatgttggaggttaacatatagcccagttcacttggttttaaacagctctaacgcttagtttctctagtcatctcagtacccatttctagcttctcataaactcgtcactgatttggaatgttgtaggtctgcacatgtcttgtcttgctttcaagtctgtgtatgcttgtccttatacaacaaacttctacaagcaactatacaacaaactatacaagcaacttcactaggctcaaatgtaaattttaatgttaataaaaacagcttccagtcttggtaacacagtgagatcccatctctacaaaaaaaaaaaaaaaaattttttttaaatagccaggcatggtggcatgtgcctatagtctcggatacccaggaggctgaggccagtgaaatgcttgagtacaggagtttgagactgcagtgagctaggatcatgccactgcattccagcctgggcaacagaacaagaacccgtctctttaaaaaaaaaaaaaaaaagcctcactttccttactgttacatgtttaattcacatgttttataaaatgtacactgatgaaattaatatattgtttttaaaaactactatgaatacttacttaatttacatcttagaattccatctaagattttgataagagttttgctgctaaaagtttggaaaaactactggaagataaactcccttaatctgggtattatatatatttttatatttctgagctagttgatcttccgcaatatgtgttttttcctcttcttatttattaatctgtgccagggttttctttgggggttcattttgactaggactcaatccaagtcagttttagaaaaagtaatgtgtctactgttaagtacagatgtcttttcatttccttttgtaaaaatcaaaactacatagttgagcgtctccaactgagtgaaaatggactttcttttctggaatcatctgaaatcgtctttcaacatcatgcctatactttatatgttatatgtcatatattatacccaatcatgatatctgcatgtgtctctggcgtttgtctataaattatgcaatggccattggctaatagcaatgaactatgacatggtctaacttaacactttattagtataatgactgaaacactttagtcttacagaatgtcctatttggaatttattctttgaggaggttcttacttttagtagggtcattttgatatatcaacaaccagacaaccctggatgaagcttaccatagaccaaatttggaccagatttcttcctcctgtcaatgatgttacagtgagaatctaatattgtattaaacccatgccacatgttaaatgaatctgaatgacagactgacttacctaatttcttggacttcacattttcttttcttctttttgatttttagagtgtgtccaagtttacggactatgagctgaaggcctatgccaaagcaggggtggtggctgatgaagtcatttcatcaatgagaacagtggctgcttttggtggtgagaaaagagaggttgaaaggttggttaattggaatctgattctttccttaatttcatcaatcagcatagtaccctgagtctctcagtttgtgcaaagcggcagacccaccttggtctgtggcctccagaggaagtacttgttcaagagggagctaagcagagtaatttaggttggtaatttaggtactataagaagtcccaagcctttagcagtatgtttttaaagatgttgcagttggcaatttttagaaagccagctcagggtagatatttatttcaaactctgatggtatgtatgtataaatattatacctcatatcagtctataatgctgtttgctgtcattaaagaaaagcctacatgagacattacaactgataccacagaaatacagaagatcataagagattactaaaaacaaacgccaacaaattggatgacctagaagaaatggataaattcctataaaaatacaacctgccaaggttgaatcacggagaaataaagagaaataaatctgaacataccaataatgagtaaggagattgaatcagtaataaaaagtctcccatgaaagaaaagcccaggacctgatagcttcattgctgaattttaccagacatttaaagaaaaactagtaccagtcctcctcaaattcttccacaaaattaaagcggagggaatacttcacactcattttacaaggccaatattaccttgataccaaagccagaaaaggatactacaagaaaatcaaaggccaatatccatgataaacatggacgtgaaaatgctcaacaaaaatactagtaaaccaaattgaatagcacattaaaagaatcattcaccatgatcaagtgagatttatccctaggatgtaaggatggttcaacataggcatgtcaataaatgtaatataccacattaacagaatgaaagacaaaaaccatatggttatctcaatagatgctgaaaaagcatttaacaaaattcaatatcctttcctgacagaaactctcaacaaattaggtataaaaagaatgtacctcaatacaataaaggtaacatatgacaagcccacagctaaatcatactcaagggtgagaatttgaaagcttttccccctaagatcaggaacaagacaaaaatgcccattcttgccacttcttagcaaccacaaaagaccttgaatagcaaaaatcctgaacaagaagaacaaagctggaggcatcacgttacctgatctcaaaatctactacaaagtaatagatcattattagattatttgattactatagtaataaaaacagcatggtactggcatagaaacagacacatagaccagtgaaaaagaatggagagcccagaaagaagtccatgcatttatagtccattgattttcaataaagagaccaacaacacaccatgaggaaagggcagtctcttcaataaacgatgttggggaaactggatatccacatgcagaagaatgaaatttgatccttacctcacactatacacaaatatcaactcaaaatggattaaagttttaaatgtaggatataaaactgaaaaactactagaagaaagcatagggaagaagctctatgacattggtctaggcaatgatttttttgacacaaccccaaaaggacaggtaacaaaagcaaaaatagacagatgggattacatcaaactaaaaagcttcaaaaaggaagcaatcaacagagtgaagaggcaatttatagaatgagagaaaatatttgtaacccatacatctgataaggggttaatatccaatacatataagaaacacaaacaactcaatgacaagaaaacaacctgattaaaaagtggtcaaaagacctgaatagacatttctcagaagaaaacatacaaatagaaacgtacaaaaagaaacatacaacaggcatgtgaaaagatgtcacacatcactaatcatcaaggaaacacaagtcaaaaccacaatgagatatcatcttatacctgtaagaatggccattataaaaagaagaaagatatcaagtgttggcaagcatatggggaaaatgaaacactgttacacggatcgcttttggtgggaaagtaaatcagtacagccaaagagtatggagattcatcaaaaaatggaaaacagaactaccatatgatccagcatccccactactgggtatatatccaaaggaaatgaaatcactatgtcaagagaaaactgtactcttacattcactgcaacattattcacaatagccaaggtatggaatcaacctaagcacccattaacagacaagtgaatgaagaaaatgtgtgtgtaaatttacatgccatattcaatagaatactattcagcctttaaaaagaagaaaatactgttatttgcagcaacacgatgaacctggaggacattatgttaagtgaaataagccaggcacagaaaaataccccatgatctcactgacagagttgaactcacagaagcagagagcagaacagtggttaccagggactttgaggtgggagggggcaggcgagaactggggagacgttggtcaaaggattcaaaatttcagttaaacaggggtagtttgagatattttaaaaataatgacattaattatctaattgtagttgttttaatttagttcatggtgatctaaaagaaacccttccttattcacatttaagaggcagtttataaagtcaagaaatgtgttgttaacatggtgactatggttaataacatcacattgcatacttgaaaattgctaagaatagatttttaagtgttctcatcacacacacacacacaatataagtatgtgaggtaatgcatgttaattatcttgatttagccattccacaatttatacatacttcaaaccatcatgttgtataccataaatatatgtaagttttgtcaattaaaaaataataaagaaatgccagcatgattcaaaatgctatttcacacatttttattgaacacctttttaattaaacacactttattcaggtactgtgctacatgttctttataaagtctgataagatttctatttggtcaaacaggctgggcacagtggctcacacctgtaatcccagcactttggaaggccaaggcaggtggattgcttgaggccaggagtttgagaccagcctgggcaacatggcaaaacctcatctctacaaaaaaatacagaaattaaccagacatggtggtgtacacctgtagtcccagctacttgggaggctgaggtgggaggatcacctgattctggggagtttgaggttacagcgagctgtgatcatgctactgcactccagcctgaatgatggagtgagaccctgtctcaaaaaacaaattagtgttgaaaagttatagagcattattctagagattaactcccagtgaaaagaaaaacccaaatggccaaaataatacagttgtccaaaatgtaattttgtttattctttaatttatctggtatttattgagtacttactacgtgccatgctttgatttttataaaatagctaccaactgaatagcaactcttactttatgtgttgtagatttggtaagatggtgttattctcagttgctaccaaatccatcaagtaaaaaagagaataggatttacaacctcttattatcgtcttttccccacttcttttggtttgtggagtgaggttccttatttcttgtaaaaaatttcagtagcatatttcttccaccatgaaagacattatcttttattgtcaataaaagagacagtgtagtgttttaaaaatggtaacaaacataggatagaccttcagtttgtgtcctgcaaaaggttaaaagttctccatgaattcaattcctgagatgtaggaaggcagtttcagaatgcctgagctatatatgagacaaagcccattgttaatggctagatcatggaattactgaaacctattccttgcattggacttccacatagtttcagttatccatgtctcatggctgtgaacctgaccagtgtgtcacaacacagcgtctcagccacagggcagatgggtgagttatagatgagttggtgcaaacactagttccaagcctggggagctggaaacaaaaagtctggtctgcttatttggagccagttgcattattttctgataaggacatgtcatgtgactcaaggaaacacttcaaacataatactagatctctcttgttcatatatttatgttgaaaattcttttctcttggggccaagcttacctcactatgcaatccaagcagcaatcaggcagctctgttaagtatcgccctttcaacatgtttcattgtcaggttaaaacaaactttaaaaaactacataaaggttattggagatttttctccctgaagctgctctgtgtttgcgatgattttatgatcattttgtaaaaccactgcatcacggcctgttttaaacattataacttgagctgtttctgccgaaattgactcaagcattttgtcttcacaggtatgagaaaaatcttgtgttcgcccagcgttggggaattagaaaaggaatagtgatgggattctttactggattcgtgtggtgtctcatctttttgtgttatgcactggccttctggtacggctccacacttgtcctggatgaaggagaatatacaccaggaacccttgtccaggtaccttggacttattgaccgagacatagcatttccttctggtatctcagaaaagtccatggattagatattttgtttattactttggtgccttcaggaaaaaagcatcaatgattttatggagtctgtctgtggaaacaagtaataccttaaatttttttttatttccataatttttttgggaaacaggtggtatttagttacatgagtaagtcctttagtggtgatttgtgagattttggtgcacccatcacccaagcagtatacactgaatccaagctctggtcttttatccttcactgccttcgtacccttttccgctgagtccccaaagtccattgtatcattcttatgcctttgcatcctcatagcttagctcccacttatgagtgagaacatgcaatatttggttttccattcctgagttactttacttagaataacagtctccaatcccatccaggttgctgtgaatgccattaattcattccttttattgctgagtagtattctgccatatatatatgtaattatatgtatctgtgtatatatatacatatatgttatatatatatcacagtttctttatccacttgttgattgatgggcatttgggctagttccacagttttgcaattgtaaattgtgctgctataaacatgcgtgtgcaagtatctcttttgtataacgacttcttttcctctgggtagatacccagtagtgggattgctggatcaaatggtagttctatgttcagttctttaaggaatttccatactgttttccatagttgttgtactagtttacattcccaccaacagtgtagaagtgttccttttcactacatccatgccaacatctattatgttttgatttttttattatagccattcttgcaagattaaggtggtatcacattgtggttttgatttgtatttccctgatcattagtgatgttgagcatttttttcatatgtttgttggccatttgtgtatcttcttctgagaattgtctattcatgtccttagctcactttctgagtttattgtagattccggatattagtcctttgtcagatgtgtagattgtgaagattttctcccatcctgtgggttgtctgtttactcgctgactgttccttatgctgtgaaaaacctctttagtttaattaagtctcacctatttatctttgtttttattgcatttgcttttgggttcttggtcatgaaatctttgcctaggccaaagtctagaagggcttttccaatgttatcttctagaaattttatagagaaacaaataatacttatatattttatagtaaagggatgctaaacatttgaattgataagaccagcaatttaataatttcaaattaactgaacactttatagctatgaaatgatgattttctgactgagtccaaaaagaaaatatgccatgaaaatggaaactcagtgatctctcagctaaaaattaacagctcgtataactgagctttatgatagtccaagatatatactaataaatgtacttgtgaaacataatgagttactaaaatgccaggtcaataacagccttaactgaacaggtgctacaaatgtactttattgctcacttgtgctaaagtagctaatgcctttaattttcattgtctttacagttattcattcaataagtaattattcagcatctactatgtgccagacacttagaaaatgcaggggattcaacagtgagcaacggaaatgtggttttgtttttgtttttgtttttttgccttgatgggatttacactttaatggagaagacaagcaataaataagtaaccatgtaaatgaatacagacaaatagagacatgctatagaggacagagaaccttgacagtgaatagcaggataaccaggtgtggcgggggtccaggaaggcttcttatcctgctccctctcccaaggcctttcctccttagcttatggctctctcttgttgcaactggactctgatcattgtttgaattctcagctaaatgccactttcccagtcaggccttttacactcacccatttttcattctcttttgtgatctgctgtacttttttttcaaagcacttttgtgatatggaatatttgcatttatttacacttgtgcccacccgtttctaccctcagacagtaaaatctacgaggtcagggaaacaaaaaatgaaatatctgtttcatttgccctgcaagtaaatagggagtcgttttatatcaaattcttaagtaaaattttttagctccagattccggatagagcaaacaatgaaaaatatcaaaaccttgtataccagaaatttgctagctgagagcttaaaattcaaaatctactgctttaagataaatacattgccagggaaaattgagtaggattttgatttgcaaatggaagtgattatcagaggtcaaaccataatcattccaaaccacggactttatttcattaagaacatgataatacacaaagaacaactttttcaattcagtttatcttggcagcatgaacagctgacatcttttgaactttgttaaagaaaataaatatgataatacaggttaatgtgttttgtaaactttaaagagatagtatggatgggaagtgttaccaattttataatttaaccacttcttaacaacttagatacagtttttacagattggaaaagccactgaagtattgcaggtccagattttaactatagtcccttgtctttattgatccaattcctcctaagaactttgacatttaccaaaatagggatatcagtagttggctttagtcctagctgcttatacatacttgctatgcaagaagacaagcattgagaaaacttatttttccttttgttccatgcctacaaggagaggatagaggtatacaataataatggttcagagggaaaagtgaattggtaaattgaaaatcaaataatacacaataccaactggaagcacttgaataaaaatccctttggtaactctctgtagtaggaatccaattttatgtctctcatctttaaatttcctgcccattgtacagtgagctactctacttttgtaaataatttattctttcaaccaatatttcttgagtccttgctatgtgcagacatggcatactatgggtctctaacattttaatcaactgattattaacctgttactcccaacgtctttctgtaagcctctgcttatatcttaagagaaaatttcctttgggaagatgaaatgcatcctttaacactatattccttgctctctctctctcttctctctctctctctcgctcgctctctctctcaggtcttggccacacttctgagcagcaaactatgaaggctgagtgtgcatgggctgagttgagtgttttaatccacaaaactaattaacggtttggttaatccagtacgttttgtgatacacaaaatcgttactggctgcatggtaattgggcataaatggtaagtagttcacataagtgactgtaattagtatcacttgtgcacagagaaaaaatgcactctgtggtctggtagggaaagatgaaggggacctgaatggtgcagaaggttgttctttcatgaccttcctgagtttcagaattcattaataaaaataaacacataatggagcgtgacattcattcagtatatacaaagtgtcaagcactgagtgacgtattatgtaataaaattactgcatgtaatgctctcaatctcattccgtaattggtgtcattatactaccacttaaaaatgaaattgaagccatgaagtcaagaaatattgagagggatttgaactcaggtctccctgactttgaggcctacctattaaccactgttttcctgcctctgactctgtcttcccaggggccatggacccctttttctccagcacacccatagcttaattgttccacagcagtctcccttcccatctctctgtctacactacttctgctgttcacagggctaaagaatatgatgttgagtgacaaatgatggcttattgggatgttgctagctactgtgatgatttgggaatgtgcttttgtcctgtctcactcactcctccccatccagagagccattcaaagagttggaccccaaacttcaatttaggcctccagtcagccaggagtcagcaaactatggtcgacaggccaaatccagctcactgcctgtttttataaataacattttactgggacagagccacagtcacttatttacatatgtctatggctgcttttatactacatggcagaactgagtaattacttcagagcccatatggcctgaaaagcctaaaatatttatttggccctttttcagaaaatgtttgctggccccggatctagggcaaatggaaggttcctttgctgaggtaggaagacctctgacgtgtgtggtcttaaactaaattggaccataagaagtgttctatctgcttcctttaccgcctcctaagtgtgggacctcaatactttcttcactgtcagcatcatcatcaccaacatcattactaccattgaagagactagcactggattaatcatctttacacacattatctcatttgatcctgtaataatcctatgaaatatatgctatcattatccctgtgttgcagatgaagaaatgggggcttgaaagattacataatctgcctatgggaggaaccacctgccataattgaggacaaggaaatgaagagataatttttgtccctatgcataggctgggattctagggagaaagcgtgagtggactaacccaccacccatgtatggcagccctggccctgttaatcatcctaatgtgtggaatgaagaggttactgaagagggagagacatggctgagaggctctgacactttccatggttcagacactccagccacaaggaagaaagagaagcaggagagactcaggcaatttgcctcaatgtgatacaacaaatgggaagggtctggcctatagaaaccatcacagaccaggatcatttgatcacctgaaaaagactacattcatgcagggccactctttggcttggcaatagactgtggccaatgaaacatcctctatgcgagtcacaagagtaggaccattctttggttgacagggtagagaggaggagactggtattccttctggaggccaacttgaggatttgcctcattgtctcttccttacctttataaacagtgctgataataaaaacagagtgctatttggtaggaacatctgggcatgatcaggtagccttcccctaaggtaatgagatgactgcattggtaagtcaaagaacagctgccccaagtctgcacaggaacctgaccactccacctgcatatagccagcaacaggtgagtctgggagctaggtagaatggcagtcaaaagcctggattcaaattctgctctactacttatgacatgttgtaacctagtgcaaattgggagcctccatacctgtctgttcactcttctgttgtaaagataaaatgaaataatacagataaaacacttagaaacatacctgttattattgttattattactgttattcatagtagttgcagtagttagcccagtgactactggaatagtagcattagtatagcggtaacaacagtagcaggttggttttgcatgtaccagcctctagaatagtcaggctgatcttagtgtctgtattgtttttggcaaccctttaaccagaaaatcactataaggctgattatataatgaattcaattatcaaatcactattcaagtccactttgggtctacaggctaccttgcttagacttcttactcatttcaagacagttctactttgtagaagagtaatattcagtaaaaaaataaagtggtattttaaatcataacagtggaaaacttggagatgctttacagaacaaaaattattttgggtatttccaaacagccaaagagctagcttttgaacccacagaagagaatttctgataactctctgcgttaacatggaagacccaaatgatagtaattactatttacacattaacaaaaacacatgaaaaatctctctcttttcatttcagattttcctcagtgtcatagtaggagctttaaatcttggcaatgcctctccttgtttggaagcctttgcaactggacgtgcagcagccaccagcatttttgagacaatagacagggtatgtataagccaaaagtaaaggccattaacaggtgggggctggggggtggggcacagaatgaactcctgaagaatttaccttaaagttaaaaatataagaagctatcgcaaggcccttaattcagcaacacttattaaatgctatcatgtgctggtgccaattctttttttttttttttttttttttttttgagatggagtttcgctcttgttgcccaggctggagtgcagtggcacaatctcggctcactgcaaccccctcctcccaggttcaagcgattctcctgcctcaagggagtgaatgcaacagggaactagaacaagtaagacccctgttctttactcatgctgggagaggacaggcagtaaagaagtatgcacattcaaagataagacaatagcagagagtggtaagtaaataaaggaaataaaatagggcaatgtgacagcgactggggtgggagaaagagtctttaaattgggtggtggtggcagtatctctgaggaggtagcatttgagtggagaactgaagaaaagtcagccatacaaatgaggattggaggaggtggggcgtgggaagtaagagcagggagggcattcatggaagagaggcccccaagttggaaaaggctgctgatttaaagaagctgaaacaagcccagtgcaactgaatagagtgaacaaggggcagaggctggaggcatgggaagggcctaccatgcaggacttcaagaccatgtccataaaattcgcttatcttctaaatatggcaaaaagggattttactggttagtctatggaagcacactggaggccaagctagggagtcaaaatccaagaacaggccaggcatggtggctcttgcctgtaatcccaatactttgggaggccaaggtgggcgcgtcacctgagcccaggagttcaagaccagcctgggaaacatggtgaaaacctgtctctactaagaacacaaaaattagccagtcaagatggcatgtgcctgtagtcccagctattcaagaggctgaggtgggaggatcacctgagcccagggtggccgaggctgcagtgagccatgattgcgccactgctctccagcctgggcaacagagtgagaacgtgtctcaaaaaacaaacaaacagaaaaccaagaacagaaggggaagttggcaatctgttgttctttctctttaaaaaaaaaaaatgccctgagctgagtccaaagcaagccctggaaatccagaggtgatttgcgggctccctgaacctgtttggttcactgtccgctgtttgatactctttcgccaaacagtgaagttgtaacctattaaggaagtgactcattgctttatctgttttataatttggggtttcatatattggagtacagagagattgttaaaaaccacataaaaatgttcattgatggccaggcatggtggctcacacctgtaatcccagcactttgggaggccaagtcgggaggatagcttgagcccaggagtttgagacaagcctgggcaaccctgtctctacaaaaaatttaaaaagtagccgggtgtggtggcacatgcctatagtcccagctagtcaggaggctgatatgggaggatggcctaagcccaggagtttgaagatgcagtgagctatgatcacactactgcactctggcctgggtgacagagtgaaaccctgtctctgaaaaaaaaaaaaaaaaaaaaaaaaaaaaagtcaatttattcaaattctacctctttcttaagattgttatatgctcaaataagatgatgactctaaaagtgccctgaaactaaaaaattaaggcatttaaaaattatttcttacctttattagcaacccagtaaggaggtagattacattatactcctcaatagagctaaagtgattgatatggtttggctttatgtccccacccaaatcttatcttgaactgtaatccccatgtgtcgagggacagacctggtgggaagtcattggatcacaggagcattttcccccatgctgttcttgtgatagtgagggagttctcatgagatctgacggttttaaagtggcagtttcccctatgcgctctctcctgccaccatgtaagacatgctttgcttcccctttgccttcaaccatggttgtaagtttcctgaggcctccccagccatttggaactatgaatcaattaaaactcttttctttctaaattacccagtctcaggtattctttatagcggtgtgaaaatggactaatacagtgatgaatttccatcactagttatggacaagggaagaagatgatgctggagtgttctggtagcaggaagaggccctcacttttctctgattaaccagagtggttaaattctagattgggcttgttgctagcagaagaggtgaaattcaggacaacaattgaaagttggtagcatttgaacacatcatttaggaacactcagttttaatcatcatctaccatggatactcaaaagaataccctcggacccccgattggttgactagttgcctggtcttagaaacttaatctttctgcaattcctccacttcttcaactgaaaatgggcatatcaccagtctagtttggtgacggtgacaattatgtaaataaaagtataaaaacacctagtacattgtctcctatattatcttagtaatatataatatataataatattgttaacatatgttatacatttataatattaatacaacatatgtattatatatgtattattatataatggcacatattatataatatctcagtaacaacatgataaataataacaattaaataaattaattaaatatgtattatgttaatatataatatctcagtaatagctcaagaagtagtgattattctcactattattaataaacgtttaatgagtacacatctttggcgtatctctgcaatgttttatctggttgttgttctaagtaaattcaaattaagatacatgcaaactaagaggcacaataaatgtatacatcttcatttgaatttactcataaaacagagcaacaaccagataaaacattgcagagatacgccaaagatgtttatttgaatttacaatttgaattgagttgtgcatcttagtttgagtttacactgtgtcccttttgtatttcactccagaaacccatcattgactgcatgtcagaagatggttacaagttggatcgaatcaagggtgaaattgaattccataatgtgaccttccattatccttccagaccagaggtgaaggtgagtgctggtctgttccccagaatagtaaatgttttcttcttcgatgatttatttgcataaccacaaattgctcattttctgaagcctgactctgtttccagtaatagggaatggaggtgtctttctctgaaagtatcctcgggtgttggcttatctcaggcaacagaccacattcctttgtgataaccataatgtgcaaatcccctggttgggacacagtctggcagtacattcaggctaaatgaactgtatgacgctctgttgaaatgagtggcaggtcctgtctttccatgcaagtgctagataaatgacaaggcaattacaacaatcaggaagcacaggttcttcccaaccttcgcagagactgcagaaagtggaagacactgagtatagggtatgaagtggcaaaggaaagctgccattatgtaggtttttacttcccatctgtaaattcactaggtcactgcatcagcccttataggaaggtatccttgtgatattatgctcacgtgtcttgttcagggcacatggtgaaaaaaattatttcctgcctttaaattatctttacaggcaatttactctacaagaaaattaggatctactacccctgaataaattggctttgaaattagacttattcctcattttcaacagagtatctctagccactctctcttaatatttctgttatctgcacagaactaaatcccattttgttagcctaacttaattctgacaccacatacctatcatatatatatgtgatatatatgatatatatgtgatatatatatcatatatctgtgatatatatatgatatatatatcattctctctttgaatatatgaatatatacagagagaaggtaaacatatatataaaatgcaggtaaatatttatataatataatatttgtaatatataatacatatatatgtaaatatatatttatctataaatatttaaatataaaaatatttatgtatttatatatttatctataaatataaaaatatttatgtatttatatatttatctataaatataaaaatatttatatatttatctataaatataaaaatatttatatatttatatatttatctataaatataaaaatatttatatatttatatatttatctataaatataaaaatatttatatatttatatatttatctataaatataaaaatatttatatatttatatatttatctataaatataaaaatatttatatatttatatatttatctataaatatttaaatataaaaatatttaaatattcatatatttatctataaatatttaaatataaaaatatttaaatatttatatatttatctataaatatttaaatataaaaatatttattatatatttatctataaataaatataaaaatatttattatatatttatctataaatatttaaatataaaaatatttgtttatacatttatctataaatatttaaatataaaaatatttatatatttatctatattttatatctatatatacatacctacattatcagtatgtaggtaaatatatctataaatatatataacaaatgtacaaatataagtgtatatctctatttaccttcattatatacataaatatataaaacataagtaaatatatattctgattacataaagtatatttttattatctattacatatgtacctaaacatcaaatgttataacatatgtaaaggtgctttgtaagctatgaattacaaagtaatacacactcagtaaatatttttgaatggatagctaaaacttatattacaatggtggagagtaattgaggtttttgccattacttttaatagtgaaataaaatcttcttacttaaacctatatgtatttattcatagtacgagtatgtttttaaccctctgtgtgccacattgtactggtgctataatgataaaaaagcacatttgatgcctgcttgctctgggagcttacagtccaatacaggccagtaagtgaaaatgtatttgcaagtttgactcctagtgtgaaatgaaaggcgtgaggttttgtgacacagaggaccccaaaccacattttccataatcagtacaaaaatcacctcttaattggtgaaaatattgacagatagttatgaattagcttctcattctttcctcgcaagacctactagccagcattcagcctctacgtagcaaacacaccgtgtatatttattaagtaagtttattcaaatggtatgttcatacaccatacacatgacggacggcttaaaatccgcaaatttccttactgttaatccatgatcagtaaattagtactatatttctaacttaatggattttttttctttaactaattggcatagtctccttatcctagtatgtcaggagtattttaaatcagattttgggacataattttaaaagttaacatgtcttatttacttcacctgtgttaatgtgcatcattttacttcttggtcatggctctcagttaaataattaagtaatgtgctaaatgccaaaacctcatccttgccaatgtttccttttactggtttttgatggatttcagtggacgttgctttgggggcatacataaacgcacacacagacaccgagtatcaacacaaagcatctgcacctgtagcctaattgtttgatttggtaaacagtgacaatctgaactttgctgttttctttcttctccagattctaaatgacctcaacatggtcattaaaccaggggaaatgacagctctggtaggacccagtggagctggaaaaagtacagcactgcaactcattcagcgattctatgacccctgtgaaggaatggtgggtgtcttccagaaactcctcaatacatggggacagtaaagtgcaaatggcagtatattgatcaaacagaaaggtgtagcatacattgagactgtcctggcatgcatagttaacttaatgatttgttactgaattgatgggacacgcttcctacatggtaacagtgttcagtgaataaccagtcaattccattcactgtataatgtaactgaatgtgcagatacagtcagatgtggcatagcaacatttcagtcagtgattgatttcatatatgatggtggttccataagattataatggaacatgtatagaaatctgatatatgtcacttgatgttggcattgcagatcaagttaagagaaatgattgatatttagtaatggtgctaggacatttggaaatatatatataccatctaaatttgtgtaactacactgtgatgtttgccagtgatgaaaccacctaaggacacatttctcagaacgtatccccgtcgcttagctatgcataactgtacatttaaaatgctattgctgcctcttcagtgaactgtctattccacttttttctttgtattataacgaaaatattattgtgtccttaagttctccagacactaaatataggaataataacagggcttgaaattaagagagagcagtcctaagaaactaagaaaaatgagtattagtaattgccatttatttatcacatattatgtgtcagatactttattaaaatgattacttattgtcacaatgacccccaaaggtacataggcccatttgacaaacaaggaagcagagagtcagagagatggaaacttgtctagggtcattcatcaggtaaatgaccaagtcaggattgaatccaggtgtgttgggttccaaagcccatgctcttttcactctgtctcaaaattattcttgtcagcatctccttgatgccttgagatggaatcgtttaactatttaatggcttcaacaaaatgagttctctatcatgcatatagtattacacaggcatggcaaacataacagagttttcctttttcacagacatctcatctctgattgggtattctttactacctaccaccataactgcactctgaatatatagaaatcatagtttcttgatgtaagatttttacatttttactaatagtgatttttatttgctcccactgatagtttcacttgctttttaacagcaaagtgttatttgatgaatctggccagaaagtaagacttactataaatcatatatacaagatagggatcattgtttatttttattatatcttttgagtccatttttgtcaaaagtcaaaagatataaaaatatttaaaacgtagtgaataactgtctctactctttactggaatcaaaaatttgtccattcctgggccaatggtgttaaattaagtgaactttatttacatcatttatgtttccacaatgaattgttctgcagctatacttgatttcaattacatgttatcatccttatataaagaaccacatttcaagaggaattgtttccattagaatcttattggcctctattttttctgcccattggtcaagtatgacataatattatgattcagaaccctgaaagattccaaaagttgtgatgttgtgcccatgctctctaggtgaccgtggatggccatgacattcgctctcttaacattcagtggcttagagatcagattgggatagtggagcaagagccagttctgttctctaccaccattgcagaaaatattcgctatggcagagaagatgcaacaatggaagacatagtccaagctgccaaggaggccaatgcctacaacttcatcatggacctgccacaggtacccctagccatacattcctgggagaaactaagaggtcatagaaggaaaaaaagttgcacaattatacacatttcttctcgtatgattcccaagtcattaaattcttaagccatgttttagtttcatgcctgaaaaagtaccatgagtgtttcctttcatctgaaaacacattgtttatgtgttcaaatctatcaaaaaaggaggttttcttttgaaaagctcactttgttggtaatatattaaacatctaccaaactggggaactatcttttttaaaactcctttgacatagatccaatgtccttattccttttattaagcatttgtctaagcagatgctaaatgtcatgtggcaataacttgcacaataatctcatgacagctactcataattttcttgtgcttaggcagctaatattgtgtcaaaaacaattcattgtatatctccattctaagcaacaacaactacaaaaaccaactcctcagcattatacttcaatggattttgccaccgatggcctgctaagtcaaagaagagttattataaagggttaacacgtatacggttcttactacataccaggcactgttctaagcacttcacacctattaactcattaaaccctcacaacaaccctgttgagcaactaatattattagctccatctaaagatagaaaactgaggttctgagaggtcaaatagcttgctcaagattatacaacaagtaaatggtaaagacaaggttcatactgaggtgatctgccttcagaagagtcagtgatcttgaacacttccctttcagccttctaaattctctttatgaataggattgcagctgtggctatgatatagcctagtagttaaagagtataaagctttagaatcagattgccttgatacaaatcccagcttctctatttacaagctttacaaactttctcaagttactttgggcccagtgtttccttattcatcagttgcaaatagcagcacttgcctcataaggtatctatgagaactaaaagagatgttatgtgtaaaaagctcagaaccatgctttattcatagtaggggctcaattcatgttggttagtaataagcaagataagtgtctgaccactaacacctaattattagattccaatgttgtgctaggcctgtgagataatcagtaaccatcttttgtcaatgataatccttataaagctagtttgaccttttattcataatgtaaaaacagcctttgcattatattttgctgtgttgtctaacaggagcaaagagacacggatttgctctgtgctttaatcctctgagatagatatttaggaccgtgaccaatttttattttggttgaaaaatcttatttgaagttgagctaaagaggaatatttacacagcccagtaaaccctggaataaaagcataaatcaattcctttatttcacacataaatattgattagacaataacccgtctggggaagggatatttctttcagtggaagtcggagcagtgaaaattcgtgcttgagaagaaaactatgacagaaaggacattatagtggatcactgtcagaagccatcaaattcttttcccttcatgactggtgtcaccttccatctagcaatttgacacccttgttggagaaggaggaggccagatgagtggtggccagaaacaaagggtagctatcgccagagccctcatccgaaatcccaagattctgcttttggacatggccacctcagctctggacaatgagagtgaagccatggtgcaagaagtgctgagtaaggtttgtggaagtcttagtccattttacaggtccatgtggaaatgcttgtgctgctgcaggaaaggcagctccttgtggggtgggagggatgggagtagttgatactacatgggttcatgcatctagtctgattgtttagaaaatattagctgactacaatcttcctcacagttgaacagaagaaagttgtaatttgtttccaaaagctacacatgtaaaagtttaaatcttgttaagactagcttatgatattttttaagttacctaaaaaattgtttttagctgttgattaatggcagcaacagggccagtgtgtgttggggtttatggctgcaagaaaatgtgctggccttttctaatgtctgcacagcctatttaagaatattcccagggaccaaggatctaactttcctatggattctgaaatgatgcaaaggtcagtgtcagctctgtctcacagttttgtttaatggtgcactgtacattcttacagattcagcatgggcacacaatcatttcagttgctcatcgcttgtctacggtcagagctgcagataccatcattggttttgaacatggcactgcagtggaaagagggacccatgaagaattactggaaaggaaaggtgtttacttcactctagtgactttgcaaagccagggaaatcaagctcttaatgaagaggacataaagggcaagtgctttttccctatacttgtatgttatattaaatagttaatgtctatagtgctttacggttttctatgtatttcaatactcactgttctcccaacaactctggcaggcgttatatagatggtaaaggaaacaactgaagctcaggaagctaagctatctgatcaagttacagcactaaaaccaaggcttctaactttcaattccatccccccctttttttttttttttaaccctgcgcaaatagaagaggcttcctagagtgtgttccgcacgcagtagaagcttcatgcttattggctgagtgaattaatcaatgacaagaaagtataatacttattttcaaatgtagatagatacttcaggttctagtgcaccttcttttttatcagtctgaattttcagacttggtggttacctcaatctaaattaaccaaccactctaaactttctccaccatttcactccattaggtgtaactactatatacatttaacataggagggttattctgaatagacttttgaaaagtttagtgtttctatcattttttttttgctacttctgatggacttctcttaaactttttatgatttatgctaaaaaaaaatacctgtttctgtagaggtaacaagctattgtatggtttaaatgactcagtcttgctgagtattttgaaattttttattagaatctgcaggacaagtcccgagttttatttattgcaataaagttaacagaatgttttggcatttgacatagtaattatattctaagcaaacatagtaaagaattctacttggatatggttctgtttattgtatatactaaaaaattgctcatgctgtgttgagtagatgcaactgaagatgacatgcttgcgaggacctttagcagagggagctaccaggatagtttaaggtaagctcaagccatggggcagattacaagctttccaaatattctgaggagtcctctgtagtcctaatcctcagagaatatctcaggtacaacaaggaaactctgagtagactgccaggtcttgtcaaatatgaacatgcaagtgatccttggttgctatattgacatttctctccccaattcatgggtttttggttagcttctcatcttcttggggataagggttacaatggagatgctttatggttaaaattgttgtgtattgagcttagaaaggggacttcttttaaaaaaaatctgtgtttagtgttcctctgctccaagctaactgtggtatgaaacactgtcttacgtgaaggtcaaattcatgcctttagctccactctttaatctactgagctgcaactgaattacaaacacttctgctcccagagtaacccatctgaagtcaaatcattccataactagatgaagtaagaaatgtaattttttagcacttaaaaataattttcctaaataagagctatttatttttccctggatcaatataaagctgtttactttcaaaatatatttttggagtatgctattagtgagactacacactttagtctttcatcctggtttaagagtttcaataaaactgctcctctgatgttacaagtctgtattaagaagaattctgcccaggagtgtttgtctatatttataactgttattcaagatttttttttcttaagtcagaagatttttaaaaggcaatgagatggtagcaatatctctatgattgccatttccatttctaggacatttaatgcaaggctgtgcaaagtcgcagagataagacttgctcattcaagatggataattatttattgaaaagttgttaaagagccttaaaacattcagctaacaattccaagtagttcaaacgcagatttattcatttaaatattcaaagaatagctcacaaaaagtagtgtatttattttcagatgtagataaatacttcaggccctagtatatcttttccttatcagtttgaattttcagacttgggttttcctatctttcttcttgagaacaagtttattcaaacaaattttaagaaatgctagtttgactgaatttactgaatttggcaaataacaaagcaatagcttcacattactctgtcatgtaaaaggtataaaacaatgttataggcacctggtagtaagtttagtcatgcttttctgattcgatactaaatttaaatcattcaagtcattagaatcacaacctgaaaatatcaactaacttcttaaacccagagaatgactaggcatctcttttggtcactaggttaaaggttgcaaagtggacatgtttcttatgatcaggccaacaagaaaataaatattttcttaactcttcagacaaacaaaattctactcatgttaagtagtttatttgcagtttattattagaactagttaaccattttaatgtgaacattaatttggctataatttctcacaaatgttacattttggtgattaggatgagaaatccagaaatacgatctacacacagaaagtagctattaacctcctgcagagaaagatttgtacatttgagtatgaaagtctgttaaaatatctcattgtacatgctgacggatttttcttgttgtcgttaaaagatgactaaatgaagtgttaatatgtatcttgtttctttggtttcagtttttctgatggctaagttccttttcagcaatatattttaaattcaagaacaatttaatacataacagccacaaatttcctaaataataatgttgagaaagatagtatttagtcccccaagttagttgtttttatttgcagtgagaagtggtacacagcttcagagaaggggagagacagatgttgtcagtttctgaaaagggatggtgtttctagtggatgagagaggtaaacctgcctagcacatgcactgcccatggcctcatgacagcctaggctagacagctcgaatgatctggagaatggtgaaagagagagacttaaaaaatataaagtagatatccaaggggccaaggacataggtcttcccatactcagaactggaaggtagtcagtcatatgttgatggcctctcctgctccacaaactcctaccttggcatccattgctctgcatttgctttttaggtccttgaccttaagtctcctcctatcaagcaccttgttctcaccagctgacacaagcctattctgcacaccttctggagaagacatcctgacctctgttacctaactgggagaaatgacttcattgctgtgtagtttcaggctaggtgggagggagtctctggaggtgtcccagaagtttggtggcagggagtagcgttgaggagtggtttaatgcctggtcataatgagtcttggcaagagtctgaatgtgcaagagcaaggaagagggagggcttgaggaaactgcatggtgttgaacctgggtgactaagaggatggaagtgccattaacagaaaatgggaacaaattggagcaactcagttgatacattactgccttctctggaaggctagatgagcatatagtaggcaggcaccaccttgatatttgttttggtgaaatttcacttggatgcaaaatggtagagaaagatatgtgaatggattcatctagatggcactaaaacagttgatgcaggtctcctcatcactcacatctctctctttacaccatttacttcaggtgattctttctaaaacacagtcttcagcattgcctcttaaccattaagactgtttacaaatgactgaaaacctaacccaacttggatttacctttagagagacagaatcagctcatataactaaatattccaaagatgctttggcttcaggcaaggctagagcttcagtgatatgtccaagctagaaaatagtttctctctcttcctttctcagctctactatttcactgttggcttcatttttcagaaagcttctttttttgaaggtctcaacataattgtcaacagctcccagcactaaatactttaagattaacctagaggagaatgggggcctccttcccaggagtctgggggagggaagaggagggtggagtctgaaccaatcacttcccatgcttgtcatgtactcagtatattcagcaagcaaccctgtcctcccctgtctccatgcttatgtttatacattctctcagtcagaaatgctcttttctatagtctacaaatccccatatcctaccttagccatctcatccatgaatcttgccttggtaacacctgccatacatttctttttcctttgactttccatactctttattcaaacctgcctaatagcacttaccacattcttctttaccttagggtgtggtacaggcctcttctataaggtttaaattttttgaaggagaaatctgttattggctagtctttgtgtccccaacatcacctggcattggtttgtaagttgtagatgcccaataagcttctgttgaattaatgaataaatgaatgaacacattgagctaaattatatttcaacaagatactcattcatgcatgtctgaatgcagggtagtatatagcctggagaaaatctcatcagaggccctatttcctcatatcatttgtaaccatgctaaagtgaacacatcaggtatgagagaaagatatcaagaccacaatctaagccagaaggaaagtaaaggaaatagactgttgccaaggcagcaattagcagaaccatgtgggtttggaaagtatttgagccttaggtggttttttgatgaactggtaggacagctttgctccctttctctttctccctccctgactacactctgaatctgggtccaacacttgcaagagtttagggcccagagcaatcaacctgattagctctgccctaagattagctctgtcaaacctaacctgcaagctccctttcctggttaccatgtgacctaccaaacatttctatttatttgacatatgaaatgtaaacttggacaccagttgatcctgctccaatctggccacagtctacactgtttcatctttctgtttatttacagggcttccatccggcaacgctccaagtctcagctttcttacctggtgcacgaacctccattagctgttgtagatcataagtctacctatgaagaagatagaaaggtcaggcaccaactgcttatgggggggaatggaagaagtctctcctggggactgttgggtaccctttaagcctgagaatatgagttttctaggtatatatctagcagtgtttcaagtcagactaaaagacagagcattaagacctaatgaaaactctaagttttacacaatatttttaatgcagattagttaattgattatttttaagaatacaaggtaatgaaaactggacttcggagggttaattgtcttagacaaactattctaacaaacacagaatgtgtgaattctagatatttagcagattatttgctcatatgtagaaatccttttataaaagttgttaagaatacctgaaagcttttttctcaaattttaaaatttctttcttaaattacaataattttggcaaaaataccttgatcaacaaaagtgtttgaataggctagcccttattacaagttatcaaaatatttgaattaatggaggccaattaggtttcacagacatttgttgatttcatacaatttttataatggttttaagatacatttaaaataatactatcaattttaacataattcaaggtagcataaaattaaagagctaggaaagcaaacaacatgtatagcaatacacaatttcttcctaaggatgcaggtgtcctgctgttgtagacattgtctaattttcacataaacagaccacccattctcctccaagcctttcctcattactgcacgttacatgtcagccctgatacttttacgttcattcccctaccacccttcgttagaaaattttcatggcaattttcttattgagccttaatcaaagtcatgttgacttatcccctttctaaattataagcctctgaaagttagtgatacaccttatttgtgtttgaatcaacttggttacctaacccagtgccttgcacttagtaaggcatcaggagattttaaaaattagaatgaaaacatgaatttctacaataaaataaaaccccaactgcaagatttatcaaagcaaataagtcagagaatttttaaattacaagcacatccattatgcatgatataatttcaaattgtcttaaataaaattccaacacgtgaatccactaggcagtaattacaaacattgattcataatggacaaatttggaataaagtagagtactctttatgaccgtatgaaaatgacaagggagtgattgggttctcttttgtttttaatgtattaatactgaataaacagaggtctcaatttctaacacaggctttaaataaattccatggaagactttttctcaggagcagcaggatgaatcacagtgagagaaaacacatttagcaagcatagtttcttactgcatcctgccactaaagactcaacctctcttctagttctagaaatagctatttcattgagtccatggtgctgtcccagataactataagatgtattatataagagcaggagtttaatagagcttcaggggagaaagaaccaaacactacattgacatttctattgaaccataacaataccaatcatatttaatttttgcattttaattttttctagtttctgggtagatatttgacaataaaagtaaaagtaagaaaggatggaaagaagggagggagggaaggaaaatctgactttttcattgttgttgttcaagctggtagaggacctagcgtaggtgtaggggaccatcagattccctggacatctggagatcagattcccatagagttctcttgatgcaggaacaattcaggagggaaccatttaactaaaaggaaatctaaatctaatatacggtctagttttacagagattaaaatgtttcatattatgttctactagtcagcattatacatttagaatagaacaattaaactcagttatatgtaggccagcatacgttttaaaagatgtgactttacgttctctctagttaagggagatagaaaggaagaagagagaaaaaatgataggagagccaatgtgattatactaaagctccaaggggaaaaggtctcataataataccactggtttgtacgataattttgttagtcctttaggtttaaaaaattaatgatttttgaaaagaaaataatggaaaagggttaataaaatttgacttatgaaatttctaatctcaagtaacattatatggtaaaatgttgctctgttttggtattttaaagtattttaatacttaactaaattccacaagcccaagcattggtgaaatcctttctttttctcatgttgatggaaaaggcctaaccttactttctgtagattgggaaatactctcttacggtgctaaaggtcgattcacacaaaggagttatcgccaccttgtggtcttgtggagtattgactctaaaacttagaaccatttcctgagaagtctgtgctttcacccaaggtctcatggttagttggtgacagagatgagactatacccatttatccttgctctccaagcagtactcttagctcctgtaaacggggtcagatgttagttacaatgttgacaacattaagtttaggattagggaaacccacaggctaaaggttttagtctctaatatttaggcaatctcttttggtgaaactaaaacacaaggcagaacatgtatgagatcaagtcaggatcaaatattagacacccataactgcatcacagataacttatgtgataggatttaggcattggttaagataagacagagatgggacccataaaaatggctatcagtattagttcatttgaaaaatctctgctcctttgtcatagttaccactttttatcatcaaatcttaaagttattattagggcagggaacctctactgaatggaaggcagaaattagtgtaacaaagtatagaaagcaagacctaagatttaagtcggaggttatttttcctctggcctacacagaagatgtaagaaaggaaacagaaaagcccagtgtctagcattgaactatgaatgcatcatagtagatgagcaattttaaataaatctcttgttgcatgtatgcagcatggacataaaagtttcattcattcttttatcccataaacatcgattgtacactgtgaagtgccaggtatcacactggggatgcaaaaatgaacaagagctattgttactctccctactatggagctgctgacaggcatttctttacatatgattttttttaaaagtgctgtgcaacctgccagtgctacaatagaagtacaaggaaacacatataaattttataattttacctgtctgtgagatttgttgttaatttataatcttctctttatgtttaattttgcaaaatcagagagaaaaatatttctttacagaatgactttaattattttttgtattgttttcttttattcctctcctgttcttttagtggagatatcaaataaaatgcaataaaaagtccaatatttagggacagattttctagtttttgcatcattcaagctggacagttgcattttttcgggggggtcaaactttaaagtcaaacttttagtatagaggaaccaaagaaaattattttaattaattcgtatttcttgttagtgtctcttggaatgaaaaccactagacaagaattactttgtatcgctttgaaatgtcctaagtgttgttgtttagagttaaggataacttcaggtatcagaaggttgggaaaatttctatcatgtcaggctgtgggtggaccatcctgtggggcaatcgttccagaaaatgctggtatttaatgtcacaaggaagctggcagaatttagtgagtgctaatagtcttcacaagttccaaagcctaccctttgatggtacgtacagcacagctgacacatctaaaacatacattatagaatcctagccatttagtggtgagaggagccttggagttctcacatactgaactttggttaccagaattacctgatgagtattttttaagacagagattcacagttaggcctactaaattggaattctcgtgacaggatacaggaatctggttttttaatcatcaacccacatgaatctgagagcatccagatctggataccaaccactctctagaacagagaaggggtgaaatattttgctctattgcaagcattcagttagtctcacacaatttcatgatgctggcagaatacatgagcatcctgaatcacagtgttcatattcgggtttttttttttttttttttttttttggagatgcagtcttgctctgtcacacgagtaccctgaaccagagacaaaggactttattattcatagcaatagcagtagccagtgttcagcatttgcactggctccccaacccaacccccagttcccacaaggcaatgcaaagagggccagatgataccaacaaatgaagtgggtgttttaaacgagaggaaacctgggcttgaggagcctgactctttcataatgggcagatgggggcagtaaggtttgcacttcacttgggatgaagacatcttctttgtcctccaaaactgtttgctatacaaatacccttgaaaaaataacccgaatgaaggtaatcaatgcctctgttcacaagatgtgcataaacatgggagactcagagagattgtttccccagaattacttagtccaagtctctcgttttaaggatgaaataactgaggtccagagagctagagcacttagtaatacactttacgggtggccacgttgggcttttccaagagctccattttttctatgcctattacactcatgctttcccaggtacccttattcctttctggcataggttgcctagagctagtaagctgtcacaggtgaaataattgaacagaaggacctgctgcatgagtgagcagtaatgacaaagtacaaatggtgagagcaggccaagagagaacttgaagtggaggtagtaccaaattcatcaccagtccaagttgccttccctcattttatttgacttgcaactgtaatgaaatggacatgacacagactttcatttaaaatgaatgtggtctttgactttgtaagcaaagggaaaatttttgaagatccttgctgttgtctatccctgccatcctgctccctaaaagataaattactgtgttaatgaaagagagcactaattaagctttatagtcgatttgctgtatatatttttggtaaatgtcaatagaaaagcttttaaaaatcaatacaaatctatataagctacctaaaatcctttctcaaagtgggtaataaatttaacaaattaatgaattaattacgcttaagaccaaacttgagtagtatccatagcaaggaaaaacgatggccaaaaaagacaacggaggtccatgtataatatttgcctttgagaagataaaaaactgctagctctgacttaatggcaactaaagagaaatgctgattaatgtccactctgtgtgatgaaaatgtgcaatttagaaatccaaatgcagtactacttacctctgggtactgattaaggaaaaccttactgaaaacatctcaatgataactgttgacaccacttaatgtattttaaaaattattttgtcttatttcatatatactggcctaccttacagctttagccagttactatattatagaaccttgacatttattttaaaaaattgaaaatttcaccagtcctcaccggtataaatacaaccgtagcaaaggttttctttttttaatgggagttatttttctccaagatccaacatatttattactctctgagagttaatacacatgtaatcatgaaataagaactataagctcaccttcaaatgcgtattccctcagttcagtttttattcaagccacagcaatagttttgttcaaaacgattcctcaaaaaataacaaacaaccatatcccatagacatttgaggtcactcataactaatcaaactatgactcttaaatctgtgaatgccaaaggatctgctgcaaaatgtcttgagtacatttagatgattaatataaccctctctctgctcaaggacaaggacattcctgtgcaggaagaagttgaacctgccccagttaggaggattctgaaattcagtgctccagaatggccctacatgctggtagggtctgtgggtgcagctgtgaacgggacagtcacacccttgtatgcctttttattcagccagattcttggggtaagtacacagctggactagctttcttcttctcataccttttattttattattttgataagtccgctctttgttttcatgtatttagctcttttctgttagttcatttttctcatctctaaagaatgaaaaatttcctaagcctccatcacacagagggtaagaaggcaaagctgagaactctcatttgggctcgcagggcactcagacagtcattgtacctataaaaaagaaaatggtactgtcactgaaaattttgtgttagaagtgggcaatttttctagtaatgtatatcaaacctaatcaaaatgcaaagtggattcactgaataatacaaaaggcttttagggaaattttgatcttgctgaacagcagaggtacaaagtttgacttatatagcaggtgttagtgtttgatgtataattctccacggattgcactattgaaatagtaatgtggataggaagcagaaaaagaaagacagaagtaaaataaggcatgattgaaaactaagcttattccaatttttcacttcctagaatttcttatgttctctatctgacttgattgctgtaatcatcataataactatgaacatgtatcaggcaatatctaagcattttatgtacaatagttcatttaagtttactaacaaccgtctaaggtaggtattcttgttatttctattttacaaaggagcaaaccaaggcacagagagcttaggctagcaagtggtggagttgggattcaaatccagccagtgtaactgtagagccaggttctagtaaaatcttgtcattgcaagattagttatcaaaatttgatcatggaaacagtactgaaagacagctgactagatgcaggtagtatgtgccttctccatgaagaggaatcagaatagtaggtagatacttacatttggaacagattatctgggctagaacattaggattcatcaaacaagggatgggaagcaccagaaataagaaaggagaggatctaaggcagcttacccagttggggactgcctgagagccacaagaggcttttggatatgggcaaacagtaagagagaaacatccagggctccaaaatgggctttcacaatcttggctatggggtaaatccttgacccactagggccttttccctgacatgaagagctgcctaaagattccacggagatgttactccaaaagggaaacccacacagaatcacacaggcatccaatcctggagcagcctctgtcaggcatcattttgagggcctagataccaggaatatacaaacatgcactgcctctgcactgcttcaaggagagagaggggagactagataatcccatcacccccgggaggatccctgccatgctgttgtggtctactgttgagactgagtcatgaacagactcagagtagtatcatacaaagatcacactactgcatgaacccaaaatcaaagccaaagtattttttaaaaatctcccctacaaaagcaaattcaaaaattggaacaagcaactgatacatcagatatacagatatcaatggaagaacataggaaacatgaaaaagcatggaaatatgacaccaccaaaggaccacaacaagtgtccagcaaccaataatggtgtggctttgtgtccccacccaaatctcatgccaaattgtaatccccacatgttgaaggaagaacctggtgggaggtaattggatcatgggtgggtggatttcccccttgctattcttgtgatagtgagtgagttctcacgagatctggttgtttaaaactttgtagtcttcccctttcgctctctcttcctcctggtttggccatgtgaagacatgccttgcttccccttcaccttctgccatgattgtaagtttcctgagacctcctcagccatgtggaactgtgaaccaattaaaccttttttcttcataaattactcaatctcagcatcagtgtggcctggatgtgagacaaggtgtcaaaaaagattattttggagctttaagatttaacgactgccatgctgggttttggacctgcatgtggcctggagcacctttgttttggccaatttctcccttttagaacagaaggatttacccaatgcttgtacccccattttatctgggaagtaacaaacttatttttgattttacaggctcatagttgtaagggacttgccttgtctcatatgagactttggacttagacttttgagttaatgcttaaatgagttaagacttaggggactgttgagaaggcatgactgtgttttgaaatgtaagaaggacatgagtttttggaggggtcaggggcggaatgatatggtttggctctgtgtccccacccaaatctcgtgtcaaactgtaatccccacatgttgaagaagggaactggtggaaggtgactagatcatgggaggagatttcccccttgctgttctcataatagtgagtaagttctcacaaaatctgataaaagtgtgtagcgcttcccccttcactctttcttcctcctgctttggtcatatgaagatctgcttgcttcctctgttctttccaccgtgattgtaagttttttgagatctcctcagccatgtggaactgtgagtcaattaaacctcttttcttcataaattacccagtgtcaggaatagcagtgtgagaacagtttaatagagataccaatgaaaaagaatttcttgaaatgccgggtaaataatttaaaatattgatttttaaagatagtaaaatgcaagagaaatctgaaaaccaatacaaagaaatcagaaatcaattcaggatatgaatgagaaatttaccaaggagataaatagcattttaaaaaaataagcagaaattctggaactcaaaaattcattgaaggaaatacaacatacactttaaagcttaaatcatatactagaccaagcagagataagaatttcagaacttgaacacatgtcttttgaaataatccagtcagacaaaaataaggaaaaaagaataaaaagaatgaacaaagcctttgagatgtctaggactaagtaaagggactgaacatggactaaataaagcaactgaacttatgaattatcagtatcctgaaagggaagagagatcaaaaggtttagaaaacatattttaaaaaatcatcaataacaacctcccaagtctgtcaagactgttagacaaccagttcagaagtccagtgattccccaggcaaacacattacaaaaaggaattcaccattatatattatgttcagaatgtctaaagtcaaagtaaaagaaagaatttttaaattagcaagagtaaagcatctactcatctataaaggaaaccccatcagactaatagcagacttttcagcagaaaccttacaggccagaagagaaagagatggcattttcaaagtgctgaaaggaaaaaaaaaactgtcagccaagaattttgtgtcctgccagaataagcttcataagtgaaggagagataaagttcttcccagacaaggaaacatttagaaaaattatcaccactagattggacctacaggaaatgctcaaaggggtcttaaacatggaaacaaaaggtcattgctcaccatcacaacaacacattgaaatataaaactcacagttcatataaaataatcacacaaggaagaagagaaaaaaataaaatggcataacagaatttcatcaaactacaaagacaaaaaaaacagaaaaagagggaaacaatttataaaataacttgaaaacaatcagcaatatgacaggaacaaagcctcacatatcaatattaaccttgaatgtgtgactcccaaaaatctgagacaggtcccagttaatttagaaagtttattttgccaaggttgaggatgtgcacccatgacacagcctctggaagtcctgacaacatgtgcccaaggcagtcagagcacagtttggttgtatacattttagggagacacgagacatcaatcaacatatgtaaggtgaacattggtttggtctggaaaggcaggacaagccaaagcagagaggggtcttccaggtcataggtagataagagacaaatggttacattcttttgagcttctgattagcctctccaaaggaggcaatcaggcatccctttatctcagtgagcaaaggggtgactttgaatagaatgggacgcaggtttgccctaagcagttcccgatttgacttttctctttagcttagtgattttgggggcccatattttcctttcacaaatgtaaatggattaaatgtccactattaaatacatattggaagaatggattaaaaaaataatccaactaaatgctgactataagaaactcaccttacctataaagacacatatagactgagagtaatggggcgtaaaaagatattccatgcaaatggaaaccaaagttgagcaaaagtagccacacttatatcagataaaacactttaaatcaaaaatagtaaaaaaaaaaaaagacaagataattatgtaatgataaattcaacaaaacgttataacaattctaaatatatatgaactcaacatcagagcacccaaattcacaaaacaaatataagcaaaactaaagaaagatagggcaatgcaataatagtgggggaatttaacatgccactcacacactagccagatcatcatgtcagaaaatcagcaaacaaacattggacataaactggattttatatcaaacttaacagacatttacagaacattctacccaacaactacagaatgtacagtcttttcctcaggatatggaacattttgcaagatagatcagatattaggccacaaaacaagtcttaatgaattttttaaaaactgaagccatatcaagtatcttctcaggccacagtgaaataaaactagaaatcaatactaagaagaagtttggaaactatacaaatacatggaaattaaacagcatactcttgaataatcactgggtcaatgaagaaattaagatggaaattagaaaattttttgaaatgaatgaaaatgaaaacacaacataccaaaacctgtgagatacagcaaaagcagtgctaagagggaagttgatagcattaaatgcctacataaaaaagtagaaagatcacaaattaacaatctatcattgcacttcaagaaactagaaaaagaacaaaccaaacccaaagttagcaaaagaaaagaaataacaaagaccagagcagaactatacaaaatagaaacaaacaaaaaaaaaaaaacaaaggagcaatgaaacaaaaaattgtttctttgaaaagataaaattgataaactgctagctaatcaaaaagagagaaaatccaaataaactcaatcaaaaatgaaaaagaagatattataacagataccacagaaatacaaaagattatcacagactattatgaaaacctacactggaaaacttagaggaaatagataaattcctggaagcgtgcaacctaccaagattaaatcaggaagaaatagaaaacctgaacagactaataatgagtagcaagactgagtcagtaataaaaaatttcctaacaaaaaaaaataaaagcccaggaccagaaggattcatagctgaattctaccaaacaggcagagagctaataccaatcctcctgaaactattttagaaatcagaggagggaattctccctaactcattctacaaggccaatatcacctgataccaaaaccagactaggacatcacaaaaacagaaaactacagaccaatatctctgatgaacatagatgtaaaaatccttaacaaaataactgaatccaagagcacatcaaaaagataacacaccatgatcaggtgggatttatacaaggcatgcaaggatggttcaacatatgcaaagcaataaacatgatatatcacataaacaatattaagggaaaaaattatcatttcaatagatgcagaaaaaacattcaacaaaattcatcatcccttcttgataaatattctcaataaactaggcatagaaggaacatacttcgacataataaaagccatacaaaccaacagcaaatatcatacttaatggggaaaagttgaaagaattctaagaactgggacaagataaggatgccaattttcaccactcttatttaacatagtactggaagtccttgccagagcaatcaggcaagagaaaaaaaataaaaggcatgcaaattagaaaagaggaagccaaattatccctgtttactgatgaaatcatattatttatagaataccctaaagacttcaccaaaaactcttaaatttagtaagtgaattcagtaaactttcaggatacaaaattaatttacagaaatcaatagtgtttctatacaccaatattgatctagttgagggccaaatcatgaagttaatcccatttacaatagctacaaaaaaaatacttaggaatatatttaagcaaagaggtgaaagatctccctaaggaggaccacaaaacactgataaaagaaatcatagatgccacaaacaaaaggaaaaacatcccatgctcatggattggaagaattaataacattaaaatgaccatacttcccaaaccaatccactgattcaatgcaatcactatcaaattaccaatgtcatttttcacagaattagaaaaaaacaattttaaaattcacatggaactaaaaaaaagagccctaatagccaaagcaatcctaagcaaaaggaacaaagctaaaggtatcatattatttggctgactaaattattctaccaaggtatacaaatagacacatagatcaatggaacagaatagagaacccagaaacaaagccacatacctaaaaccaagttatctttgaaaaagtcaacaaaaatattcattgaagaagtgacaccctactcaataaaaggtgctggaaaaattggatagcagtatgcagaagaaagaaattagacccatacctctcaccacttacaaaattaacacaagatagatagaacacctaaacatagacctgaaactataaaaatactagaagaaaacctaggaaaaactcttctggacatttgcttaggcaaagaatttaattcaaagtcctcaaaagcaaacacaaccaaaacaaaaatagacaaatgggaataaattaagctaaaaagcttttgcacagcaaaagaagcagtcaacagagtaaacaaacaacttacacaattggagaaaatatttacaaacattacatccaacaaagggctaatattcagaatctatagggaactcaactcaagcaacaaccaaataatttcattaaaaggtaggtgaaggacatgagcagatatttttcaaaagaagacatacaagcagccaacaaacattaaaaaaatgctcaacatcactaatcatcatagacatgtaaattaaaaccacaaagagataccattttacaacagtcagaacagctatctttaaaaagtataaaaacaacagatgttagcaaagatgtggagaaaaaagaatgcttatatactgctggtgagaatgtaaattagtacaacctttatggaaaacagaatggagatttctcaaagaactaaatatggaactaccatttcatccagtaatcccactactgggctgtattagggacagcgttctctagagggacagaactaataggatatatatccatatatgtatacacacacacatatacacatatatatacatatttataggcgtttataggatatatatcctattttgtgtgtgtgtgtgtgtgtgtgtgtgtgtatatatatatatgggagtaataggatatatatcattttatatatatataggagtttattaagtattaacttacacatgatcacaaggtcccacaataggctgtctgcaagcttgaggggcaaggaaggccagtctgagtctaaaaactgaagaactttgagtttgatgtttgagggcaggaagaatacagcaggagagaaagatgtaggctgggaggctaggccagtcttgctcgtttacatttttttcttcttgctttatattcactgagagctgattaaattgtgcccaccagattaagggtgggtctgccttccccatactgctgattcaaatgttaatctcctttgtcgacaccctcacagactcacccaggggatcaatactttgtattcttcaatcaagttgtcactcagtattagccatcatatgggcatatacaaagggaaagaagtcattatgtcaaaaagatacctgcactcatatgtttattgtcacactattcacaatagcaaagacacagaatcaatctaaatttttatcaacagaggattggataaagaaaatacgatataccatggaatactactcagccataaaaaggatgaaatcatgtcttttgcagcaacatggacagaactggaggacattaccctaagtgaaaaaattcagaaacaaaaaatcagatgccacatgttctcacttaaaagtgagagctaaacaatgggtaaacatagacatacagggtggaataatagacactaaagactccaaaagttgggaggatgggagggagatgaaggttgaaaaattgcctattgggtacaatgttcactattcaggtgatgggtgcactaaaagcccagacttcaatatgcatgtaagaaatctgtgcttgtaccccctaaatatacaaaaattttaaaaagttaattttaaaaaagcagtttaaaaaaatgtgatcatgttttcttggctgaaattcacacacacatatatacacataaatcctttgaggtccacaaggaaggaaacctagaactgtcaacttgtacaaggtgatggggccaggactagggcccaggtttaccgaatcctagtctatagaatttgccaacatatcacattgtcagagcttattaaatgataaaagcttacattttagttccctactccatttctttctctcacatcacctctcctgaccgtaaaaatgaccccacaagcatgagttgtacagaaaaacctggataatccacaaacaaaatcaagtccatcgtgtaaggagggccccagccaccactgtagttttcgcattgcccccttgtggtaagtgaagaaatcacattaatttcagaaaggtagagaatcggaaacactcaactttgattaactgaatttctagttatatggtgccataaacttttatgctgaaaatctttgaaataatttatatttcttgatttcctagtaggtacaatatccaaatataaaatgaatcatcttttattccctcgacagatctgtattgattgtcttccccagacatggtgctgtggactggggaatgcatatcggttatgatgctttccctagtggagttttcagtctgtgaggaagataacatcaacaaaaaaaaacccactcatcattcaacagatatttaccacctatagttttccaggcattgtaactaatgttgggcatagagtggaggacaagaaaatcattgtgtgtttgtgtgttgcttgcacaaagctgacattctagtagggagaagctggggaagtgcatttcactgggcaatgatgttagtgtagaaggtgtagggaatagggttggatcagaaagaatccaagcctgtgtcctggatgtttgctttttaaaagaaatccaaaatgtcagcttctttgctgattatttctttacctcttataaaagcagagtaaagaatatcctcacccatctccacctaaactgtgcatatgagctgctgtggagagttctgactttcctgtcaggagatctttcttctgaaactggctcttctagttacttaccacatcctgtgtgccctgggatcatgtcatacctcttctcccggtctccatttcctacaaaatgcaggatttaaaagatgatctctaagatatcttccagctctagtggtccatgaaatggctaagttaaaaaaaaaaagagattcaactataattgctgtccttcttgagcacctgcttggtcattggtggtgacaatattctctgtgtttcttctggtgacaaccagaaaccttaagatggacttagagacttaagggctgcaggaccagagtaggcagcatctaggtgatgaaatccaaagtctactcgtcgttcttgttctcacagggttatatttgctaagagaatgatgccgaacaaaccactatttttcctctctggtagagtaggttgtctctttgcataattatcatgtgttcattagtaaactcatgatgctttcttctcacagggtataattgtgagtctatttatagttgctctattttccttctgacatacctaaagggcacaatatgcacatttgttgtattgagaccacactgtgggaatggacccagcaaatgattgggccttattaggagcccagttgccaatctagctaagcctcaatatacatgtaaggcgtaatttgtctgcttcactttccctgtgtccatttgacttggaaaatgtgccaatgttccaagcacagcacttgggatgtagcatgctggggaaaaaaaaaaatggatgtgagagtcgccagctctggatttgtagtaggtctctactctgtactatctgtatatatttaggtgagtgatttatccttgataaatttcctcatctgtataaggagcaagaaaatctacctcactgggttgttttgagaatcataattcctaatttaagttacagcaggttaatctacgcatttgacatgtggcacatagcaaaaggttaatgaatgttagttttctccttcaacaaacttaccattacaaaaatagcaaagatgtgtgccaaaactacaactagtaaaggaacagaggaatctatggatggatagcccttggagttgcatttcaacaataagaatatacaaagaactcgtggagcagaattttgtgaaaaaagattatggatagagagatgcccaaccttgaattggacagttgtatgaattttaacattagctaaatgctctttctttttttaacactgagaaggtaagtaatacaaaaagctaaaagagcatacccaatagaaaaccactgcaccagaagccaaaaaacaggcattttcttatctagtaataaccactagcttaatgaacttgaacaaacaacttgatgtttggggctttattttccatctataagagttaaatgggaaaatctgctgttctatagaccatcattataaaaggtgaccttaaggaggaatgggaattgtggcatcgcagtttggggtttcagggtatttgcacagtaattttaaaaatatttatctttaaatttttgaatttttagactctgtaaacttacgagttatgctatgctgggaagaattactgtgctactttctgaacccacttttaccagtattgagcaccatgaaggccctagaaacttcatcctacaaacagtaaaatctcattaatttagaacccctcctactcactttgtaatttgccataatttgaacgggttacttttgctttacaaaaaaaaggatttgttaatggagtagcacatattgtttccaaggagatttatttggcaaataatagctacttagtaaatatttttgaataaatggtctcctttgaacaactatttgttgacactgttttaatgactcaaattaattcaggaaaatgaataaagatgtattgtatagctctctaatgcatacttctgaccttcccagttccctcacctggcctaaattacaaaggttctgttatgcacaaaatccatttcaccacaaggcaatgtcattggagtatgttctttcatttttcttattgtaacaagatcctcagttacttgaacagatgtctgtaaattcagaatacgtttgagtgtagtttactaagcattatacactaaaaactcccactcacaatggccgtagttttttagggggtgggggaatgtttcagcttctggtgagttagaggcaacaacctcaatatcagatgaatgaaatttttttctctcctaaggcaattccagtcaatgctttgatagtttcttttttaatgctgtatagtctataaaactaattaaccggcaaattacctgagtgaaagtcatattttctttcatttagtaatagagaaagatatcggtcaaaatattaatacaactttgagttttgtcccagacaacatttccagatctcgattccctccctccctcccttccttccctttttccttcataactccctctctccttccctccctctttgcttcctttcttccttcttcccttccgtcctctcttccttcttctgtccctccttcctttccttccttcctttcttccttctttctcagttttattacttaaatgttttaatcattttatcatccttttcatctgtgttgatgaaaaaccaacacaattgcctaaaaaggcaaaataacaagacaaaaattctgtaagtcatcaccattggttttcattcaccaggttttccgccccacagaggactgtagtacatcgtcatcatattcttagctaactttcgtttaattactagcatgtttaaagtggaaccattatttaaaagactttattttttagagcacttttaggtttacagcaaaattagaggaaggtacagagatttcccatataccccctaccaccctacacgcataacctcccccattatcaacatctcccaccagaatgatacatttcctacaattaatgaacatacattgacacatcattatcacagatccacagcttacattagggttcactcttggtgttgtatattttatgaatttggacagatatataatgacatggtaagaaaaattcattttaaacatgtaaatagatttatttttctatttataataaagttactttcttgtttactatctttccaagactttttcaattcctgataaagaggaacaaaggtcacagatcaatggtgtgtgcctactttttgtagcaatgggctgtgtatctcttttcacccaatttctacaggtaagaaatgttatttttcagtaagtgatttagttatttttccttttttctcattaaaatttctctaacatctccctcttcatgttttagggatatgcctttgctaaatctggggagctcctaacaaaaaggctacgtaaatttggtttcagggcaatgctggggcaagatattgcctggtttgatgacctcagaaatagccctggagcattgacaacaagacttgctacagatgcttcccaagttcaaggggtgagctatgggaggggaaatagaagtatattaactgcattggcattctttcattagagcattctgacaatcacctgcatgttttctatggaatagggaccagtgggattgggatatcctaaagccacattttccactgcttctaacactgacaaacagcagctaaagcacagtgtctcccaggcagtgcccagaatcaatatatggcatgcaccaaaatctgtcagggttttggatttcctctgagtctaacttaggaacatttctgagtctgttttcaggcccagagactcagcttcaacaagattcaatactgccccccagggggtgggtgaacagggcaaggaagtctccttactcacacaggaccccagagtgtggtttagccttatgaacagagaagctgtcctgggcagcctctggaggagcccagtcaggaaactgagggaaagaaataaacgatttttatctagaatcttgaaggcgtcgaagagctgactttctgattaaggtagacagagctgtggtgtgtaaaccccaaaacctacagccttgttcaaggggcttacacatatgatgaggctagacttttacaaaaccaggtgtttggattaaagtgaagagagccaaattgcccttccaacatctctacccactttctgtgaaaattttttaaaaaaccctaatttaaaattatttttaaaaagaaataatatgttaataaattctttaaaaaacaaaaccaaaggaaaaaaattttaagtacaattttaaaactgaactatggtctgtgaggctcttagaagaaaaaactcactggactgatagtgctgtactgtagtctcaactcctagacagtttaaccaaaaataccaaaaatgatatggcagaatttcaacggatcatggaatcctttcacttagggggaaatccctataaataggccactttcaattcatctaggctttttctggaagcacatgtgtttcccatagacttagggttacactctacatatgtgttgcagtctttcttgtttcccctgaaataatctaaggtgaacatattttcataattatgtattcttctacagtagatttttaatgagtgcacaatacttcattctcatctactgtcatgtcttaaaggattctctagttacgtttttcccctaggtttttctcctccttataagcaatttatatcattttatatcgagcttgccacatccttgattattttcttagttctcaaaatgtaatcactcaatcagtgtataatcattttggaagattttgatatgcattgcataactgcttaaagaaactttgttccaatttcactctcatcattggagtactgtagtctactccctttactcttgaatttaggctaaataaataagtcataatcttatctcttctatttttgtggccttcaatctgcaaggagcttttgaaggttatttgctatcactagaattcagagagtagcatctaattatcttaaaaacacttatctttttaaaaagaggattttctcagaatttttctaatacttttgttgttttttaaaaaataagattgctagcccaggtcaaacttatcttaagattagtgtgaggtagatttggctttgttttcttgaagttggatagaaaatatttcaaaaatattttttaaatatagattacattttctactggtttgaaatgtttcctcccattgtgaatattaacttcccatatatacttagaactaactttggagattctctagtctgaattgatcaatttgacttattctatttaaaaccttattgttttagttgataattttttttaatttttgtagatagataccaagtaggtgtatatatttatggggtacatgagaggttttgatacaagcatgcaatgtgaagtaagtgcattatgaagaatgaggtatccattccctcaagcacttatcctttgtgttacaaacaatccaattacactcttagttatttttaagtgtacaattaaattatttattatagtcattctattgtgctatcaaatagtatgtcttattaattctttctatttttttttttgcaccctttgttttaattcttataacttgatacattttagtatctggtaaggcaaatccctgcacactaatttttcctcttcgaaattctcttatctatttctggatgttaattattttaatacattttacactcattttaacttcttctaaaaatttatttttattctggtgaaattcatatgcacacatacatacacagtaggattgctattgtggggatactaaattttcctgagagacatacaaacaagactctagtttttagcaagattcatagttatatgtcccactatcttgctcactttttctcatgtattttttccactattttgaatgagatctttttctcaattatatctgtaaatgagttgagatgaaagctgttagtttttgtatacttatcttaaggactttccaagctctcttataagttataattttagaaatttaatagtctactgggttttctaggtatataataaaataccagatatagttctgaaatattacaggtttggtttcagaccaccgcaataaagagaatattgcaataaagcatgtcacactaattttttcacttcctagtgcatataaaagttgtgtttacactatactgtattctactaactatgcaatagctttatgtctaaaaataaacaatgtacatatcttaatttattaatagcaactgactgaccacggtggtggttgctgaaggttagactggcaatatcttataagacaactgtgaagtttgcctcatcaattgactcttcctctcatgaaagatttatttgtagcatgtaatgctgattgatagtattttacccacagtagaatgtctttcaaaattggattgagttctcttaaaccctgctgctacttttattaacatagcattttcaccaggagtggatttcatctcaagaaaccagtttgcttatccataagaagcaactgcttatccattcaagttttatcatgagattgcagcaatttaatgcagcacatcttcagactccacttctaattctagttatcttgctattttcatgacatctgcagttactccctctgaagtcttgaactctcaaagtcatctgtgagggttggaatcaacttctttcaagcacctatttatgtggatattctgacctcctcccatgaatcacaaatgttctttcataaatatatatatacatataaagtgtatatctatatatacactgtaagttctagggtacatgttcttaatggcatctagaatggtgaatcctttccagagggttttcaatttactttgcccagttccctcagaggaataactatggcagatgtagccttgtaaaatgttacttcttaaataaaaagacttcaaagtgaaaattactccctgacccatgggcagcagaattcatgttgggttaacaagcacaacaacattcatctccttgtacatctccgtcagagcacctgggtgactaggtgcgttgtcaatgagcactaatatttttgaaagctgtattttttcctgaacagtaggtgtcaacagtggcttaaaatattcaaaaaactgtgttttcaacagatgtgctgtcatccagcctttattattctatttatagaacataggcagaggagatttagcatgcctcttaggggcctagaatttttggaatggtaagcttcaacttaaagtcatcagctgcattatcccctaacaagagagtcagcctatttttcgtaagtttgaagtcaggcattgacttctcctctctagatatgaaagtcctagatggcatcttcctccaatagaaagctgtttggtcaacacggaaaatatgttatttggtgtagccacctttatcaatgaccttagctagatcttctggagaacttgtggcagcttctacattagcactgctgcttcaccttgcacttttacattgtggagatgcttttttccttaaacctcataaagcaacttttctcccaaagcttcctcacttctctcagccttactagaattgaagagagttagggccttgttctgaattaggtttggcttaaggcaatgttgtagcaggtttgatcttgtctccagaccattcaaactttcttcatatcatcaataaagctggttcacttcactttcttattatttgtgtgttcactagaatagcacttttaatttccttcaagaactttttttttctgcattcacagcttgactatttatttagtcctatctcaggactaaatgaggctaaaatgaggcctaacttttagcctatctcagccttcaacacaccttcctcactgagcttagtcatttctagcttttgatttaaagtgagagatgtgtgactttatttcacttgaacacttagaggccaaggtagcgttattagttggcctaatttcaatattattgtgtctcaggtaatagggaggtctgaggatagaaagagagagagacagaatgaccagtcagtggagcagtcagaacaaacacatttattgaataagttttcagtcttatattggcgtggttcgtggtgctctaaaacgatggcaataataatgccaaagatcactgatcacagatcaccataacagatataataatgaaaaagtttgaatattttgagaattactaaaatgtgatgcagaaacataaaatgaacacataccattggaaaaatggcaccaatagaattgctctgcatatacagggttgccacaaaccttccattagtaaaaatcacaatatctgctaagcaaaaaatgcaaaaaagatcattttgtcttttcttttctttttttatatttatactcattttattttcttattatattagctagagctcattgagaaataagagtggtagtagaggtgattctctcaagcaagacaaaaactcaaaactacaaagtagacatgttggacttcataaattcaaaacttttatataaacaaatgataaactagaaaagcatttataataaatattaatatccctaatataaccatattatgtgtagtgttcctaaaaccatcatgaacgatattcatgaggatggggaataactgacactttcatacaatgtacaaagtttttcaatgttttttggagagtaatagtaaataatagtaagcaaatgttttggagagtaatagtaaataatgatatccccccaaaaactttagagttgcttttcaagtattgtgtaatgcctgacagtccttgccaaccagaaattctttttcttttttaattatatactctttgaacagaattctgatgagtgaattccctcctattgtgtaagaatgtgtgttcaaggatatttatcattttttatattaaccaaaaaattaataaaattccctggaaactacccaaatatccatcaacagaaaaagagttgaatcaattatgatacatttatactaaggaatattgcacagctattttttaaagtgttcctatatattgatctggaaggatagttatgtaccattgataagtgaaaaaaagtcaaagtacaaagtaatatgtagagtatgagccctttttgtaaagaaaaaaattaaaatatatgtatatattgttaaatatgtatctatgttttgtttgtgtcttaggttgtattattttcaatttttaaaaaaataccaattgaataaaatgtaaaaggaaacaaaataacgacatcccaaagagctgcaaagttgcttttcaagtcctctgtaatgcctgacagtccttgccaaccaaaaattcttttttaaaaaaaattgtggtaaaatatttgtaacacaaaatttactactttaaccatctttaagtgtacagctgaatggcattaagtacatttacattgttatgtaaccatcaccactattcatctctagaaatgttttaccgttccaaagagaaattctgtacccttgaaacggcaactccccatcctgctctccctcccctcagccccagcaaccaccattttactttctgtgtctatgaacctgactactctatgtacctcatctaagtggaatcatatgaatttatccttttatgtctggcttatttcacataacatgatgtttttgaagtttctctatgctatagtatgtgtcagagctacatttttatggatgtttattttatggatatatcatgttttctttattcattcatctgtctgtggacattcaggttgtttggctgttgtgattaattctgctctgaacgtgggtgtacaaatgagaaattcttgatttagcctgttagtctccaaggaagtcagcactaacacatgggaatgctttgggacacaattttatattccatttgtgtcttcaattcagtataaagatgcaaattattcctgaataacagtgccttagcatcgaatggttactaacaggttaccttttgtcgttttacatttttttgtcttaaataaaaatgtgtttctacaattttaaaaagaagtgatgtaattgtcctcacccaagtattttctacagagtgtgccaagctttggtcgtacctgcctagctgcaactgaaacgacgatttggaaccattggatactctgattagtatagatataattaccacagtggtccattctccatctatattgggactgaatccattttgtccatctgcattgactaaatagctgtgtattacagcagcatgtaactttgtaccaacgagcaggctaacttcaatgagaatcaaagtggtatcttataatagtcttgtatcaacttcaaaaatataattatagagcaagcattaatcttcattgaataagtaatattacctcaagcccaatggctggatatcttcaaacaagccaaatgcatcagtacttgacacatgtgtagcccatgtttagggctgcattaatctcagacagactgctctagcactgacactcttaaaatgagattagtcaataaatgaacttcggataagctatgaataaagaaccttttaattaattcagccttcagatacgttatgtgagctcatcatttaaaagaacttaatcatttaaaagaacttaactttttgaacaggggactaccatatgacccagcaattccactcctaggtctatatccaaaagaattgaaagcagggacttgaaaggtgcttatacaccagtgttcatagcagcattattcacaatagccaaaagttggaaataaccccagtgtccatcaatggatgaatggatatacaaaatgtgatatacacatacaatggaatattcagttttaaaagggaatgaagctaggtgtgatggctcgtgcctgcaatcccagcactatgggaggccaaggtgggaggatcacttgagcttaggagtttaagaccagcctgggcaacatagtgagacctcatttctactaagattaaaaaattagcaggtgtagtggcatgcatctgtggtcccagctacttagcatgctggggcaggagggctgcttgagtccaggaggtcaaggctacagtgagccataattatgccactgccctccagcctgggtgacagagtgagaccttgtctcaaaataaaataaaataaacaaaaaataaaaataaaaaggaatgaaatttgtatacctgctacaacatgcctgaagcttgaaaacattatgcttagcaaaataagccagacacagaaggaaaaatattgtatgattctacttctagagatacctagggtaggcaaatttatacagacagagagttagaatagaagtcaccaagagcttgggggagagagaagaaagggaggttattgtttaatggatacagagtttttgttggacatgattttaaaagctttaggtatagatgtgtgatggttacaaaacattgtgaaatgccactgaattgtacacttaagaatggttaaaatgatatatattgttatgtatattttatcacaactttataaaaggtctgacctttttgtgtaatggtaattggtaaaagcgactgtgtgtctgagacgggttgattgctttttggtttgcaggctgccggctctcagatcgggatgatagtcaattccttcactaacgtcactgtggccatgatcattgccttctcctttagctggaagctgagcctggtcatcttgtgcttcttccccttcttggctttatcaggagccacacagaccaggatgttgacaggatttgcctctcgagataagcaggccctggagatggtgggacaggtaatcttgcagatctaattttcccattcctcatggctgagtggctatcagacaaactgttaaaaacgagtagtacgaagagactgaaggaagctgtcagcccacaagacaggcacacttaagaaccttccaccaccctttctatgcgtgcttggcgcaaaggctgaggcaataaagctccgagactctgagtatgagccagtgtggagaaatagcggagtgaacacaggattgcctgttcaatttcctctcgcatagtgattcattccacattccaatttggtgtactctcatttgcaggggtggatagttcagttttctggccgtgaagcttttgcaatttaatggttcccctgagccatgctttccacacacacaggagctatgatggttttaatggcacatgcctttgctcttcatactttagagtcccccaggcttggggcaagtgtctttcccaaccagaattatgaactacagtttaggttttggatacacttaggttttagctacacattttaaagtgtgttctaattaatatcttgtccttggggggtaaatgagggatggtagcataaacacttctcaagtataagaattaagggaaacttgaatttaactgaaaaattgtctcgtggtccagttgggttgatctccagccacgtctttgtattcccagatgatgcattctctgatttgtaccacattctgccatttgcaccatctaatccaggcagccactgaaatgtcacgaaaggagttatttctgcccttgtattcctaagactctttttcaatcttcagattacaaatgaagccctcagtaacatccgcactgttgctggaattggaaaggagaggcggttcattgaagcacttgagactgagctggagaagcccttcaagacagccattcagaaagccaatatttacggattctgctttgcctttgcccagtgcatcatgtttattgcgaattctgcttcctacagatatggaggttacttaatctccaatgaggggctccatttcagctatgtgttcaggtgaggaatatctagccaaggtgagaaaagatcaacacacaaggaaggaatagcctggttctgtcagttagctttttgctgcttagcaaaccatcccaagcttggtgtcttacaatagctgggattaattatttctcaagattctgtgggtcatcagggcggttcttctgacctgggctgactcagtcaggcttctgtgtattcttctgtctccacatggcctgtctagcagatgagcttcttttcttcatattatggcctcagagttccaagtgccacaaaagagggcaagccccactgtgcaagtacttttcaagtctctccacgcaaagaaactttctaattttctgtttggccaaagaaagtcataccatcaagcccaggtttaaggaatagaaaaaaatagaatccactttttgatgagaggagtaaaaaagccatgttgcaaagggatgcatgaaagtgtgaattaatatgatcgttgtttataaacaatctgccacacatgttaatgctgagaaaatctagaggtcttggctaagatggttcatagagaactgttttgtttgaactcctctcttgcaaagagggctgactcctcccaactgactcctcctaggcagagacagcatgggccatacaggtgaaggatgttccattcgtatagccaaagcctgcttttctaataagattagcttttagtccaatttctcacatttccagaggtgaaagcctaagggtgtcagggtactggggaacgaggtacacatgtatatgggcgagtcggggggtaagggtggagatggtctgagaaaggtttggagggcattaggaaaagtggtcctataggaatcggttcttgggtttccttctctagccatgagtcccgccttctcacctggtatctctttcagcacttctctcccactccactacacccacccagctaggaaagtgtctcttttctaaatctttgcatatttaaagctactagtctaaattagaaaacacaaaccattggcttatttttatttagtttatattaaggttttagaataattttagaataatttagaataattttagaataatttagaatatttttttgccaacatgtaaaaatctggggctacaggctgggtgcggtggctcatgcctgtaatctcagcacctcaggccgaggcgggtggatcacttgaggtcaggagttcaagaccagcctggccaacatggcgaaacctcatctctacaaaaaaatacaaaaattagccaggtatggtgatgtgtgcctgtaatcccagctacttgggaggctgaggcaggagaaaggagaatcgcttgaacccaggaggcagaggctacagtgagctgagatcatgccactacactccagcctgggtgacagagtgagactccatctcaaaacaaaacaaaaagtggaactacagaaaacttccaatttctggcttcactttaaaaattggaacgtcatcttccaccattttccatttcatttcaagtgcttttcattcccttaggctttaaactgggctcccggggatgttcagatttgcaattctggcctaaaacaattcctgcttatgaactgagcagtgtgacacacaaagacacatcccttatccctatccccatcccaggcagaccctctgtgcatgacagtgcaggtgagcagctttgggggctactactcacatcataatctctacagcaacaaagttatctctcattatatttatcattcatttattcattcactctttcgttaattaagtacatgttgactatagttagaggctaagacaagtagaaggagacaggcaattgcatctgtcttgctctctgaagcataaattatatacatgcctggtgcaaaaatgatgcttatatcatcaatcattatcttttatatacctattatagattcaataactgttagaattctagaaaaatcaactcaatctggtgatctttcaagcctgctttttcttttaaaaaaattttttcagaagtctttttccccctcaaacaattttcttttctttttttttttttttgagacggagtcttgctctgtcacccaggctggagtgcagtggcgcgatcttggctcactgcaagctctgcctcccaggttcataccattctcctgcctcagcctcccgagtagctgggaccacaggcgaccaccaccacgcccagctaattttttgtatttttagtagagacggggtttcaccgtgttagccaggatggtctcgatcttctgacctcgtgatccgcccgcctcggcctcccaaggtgctgggattacaggagtgagccaccgcgcctggccaacaattttcttaaaggaagctattgtggtcaaataaaggtttggaggtctgagctctccccccttcatgcttgttcagtcctcttcttactcctttttcatagaacacagtttgaaaactgccagtcccttaaacaccaccctctccatttccagacaagtctgaagtgacttgctcaaggatatttggtcctttcctggcagaaccagggctagatccccaaacttctgccttcaggtcatcacaccaaccacgccaccctgctctcttcctgtgtgtctgtctggttacagggtgatctctgcagttgtactgagtgcaacagctcttggaagagccttctcttacaccccaagttatgcaaaagctaaaatatcagctgcacgcttttttcaactgctggaccgacaacccccaatcagtgtatacaatactgcaggtgaaaaatgggtaagtgttggaatactatgcagccataaaaaaggatgagttcatgtcctttgcagggacagggatgaagctggaaaccatcattctcagcaaactaacacaagaacagaaaaccaaacaccacatgttctcactcataagtgggagttgaacaaacagaacacatggacacagggtggggaacatcacacaccggggcctgtcaggggatggtgtggggtaggggagggatagcattaggagaaatacctaatgtagatgacaggttgatgggtgcagcaaaccaccatgacacgtgtatacctatataacaagcctgcacattctacacatctaccccagaacttaaagtctaataaaataaataaataaataaaatgtgtaagtattgatgaggggtaaggttgtgcgtatgtgtgtgcaggacagccattagggatggccatacaataccacttggcttctaaattcctgctgtatatgggttcattcatacatacttggagaagacaaacagtagatttataaatacaaaggaataaagtaaattagcatcaaaaattattcctaaagctggcatttgaacaaggtgatgacattcagtgaatgctaaattctgtgtaatataaaatacacttagttcccaaatgaatgaagccagttgtcctctgagatctacctaaccactgtgttttctattgatgttctgatacagaatgtagaaaaatcacttcttcctgtccaataacattgatttaattcatgttcatcttgattcaagttttagcttatgtggatgtcctgaaaattaattcaatctcaacaaaatatctgttcttctaattgatagataggtatttgtaaatcttctctacctatttttgaaaattttagtatgttccagaaagcaaagcaaacctaaacactagtaaagctaagctaaattctgtaatctttctaaattggtaaaatttctccttcagttcagtaaatgtaaagtttctgtgtggtctattaaatgtctatccatttctagattttataagttagagttttaagcacaccaaagtacaatagaaagtattcacctttgcagtacagacctcaggtaactttctttctaggtcgttttaagtgtaacattatttttagtctttaggagaacaaagctatagggtttggacagttactggcttctgtgatgtcatatcttccagctattctcttctattcagaatgtcaggaatagatggcaagaaaatccccttatgttagactgggaatagggggagtcaaatgtctttaatttcgttgcccaagccttcctttatactacatctttcagaacacaaaatggaatgtccttttattaagttgctgtctttatactttgcactttggcagcatggtttgaaggtatctcaagcagggattttaaactcaagatttaggtgtgttttcaatattctaggcttcagtaagagcatctctaattttgatcctcccatccacaggacaacttccaggggaagattgattttgttgattgtaaatttacatatccttctcgacctgactcgcaagttctgaatggtctctcagtgtcgattagtccagggcagacactggcgtttgttgggagcagtggatgtggcaaaagcactagcattcagctgttggaacgtttctatgatcctgatcaagggaaggtggtaagccacgcaacctttttgagaattttgccttctgcagagtatttccaacccctaaaagtgggcttcaagtttttgctttgccagactcactttaaaatgcttgcctaaggcacttaccccatgcatattttccagtcccagtcatttgctgcttcacctgattctacctcacaatttctaatgtcagattttccccagttccagatggcctgctgaccagttaggcaaagaaaactgggcacactgcaaagctggagatgagtgtatttaatagaagcactcacttacccgtaaatggagcagaaagtgcagactaatcaggaaactaatgaccaggaatggaaaaagtagagtgataagggaaataatgataaatgagcaagaaaggagagttagcatgaaaagatctaagacaatccttgttcaagaagctgaaatctaaataacgcaaggaactcagattgagagccatgtaccataaatctttagcaaggatatttgaaattttggtgaatagctttggtatttatttttcataacatttctttctcttttctgtcctttttttctttctttaaaagtaatatatgcagaaggtcacaaaatcaaataataaatatttataataaaaagccacccccctgctttatgcttacactcccactccacatttctctgctcaaaggcaactatttttgaccacttgatgttttttgatctcccaatggtgacttttatgtctttaaataatatgctcatgctatttcatgatttaacaaatttagactctctgtgatttattctcaagagataaaaatctacttactctcaccactccctccttttgcctacctcctcccaatatagttatatcattttttaggccttctatttataaatttgtaaacttctgatctgcttccgttgctcttccaccacctgtagatagttcctcttgaattctcactttctaaaagaaaaatgttagcaatcctacctttattttcacctcttactcttttcacctcttacttcttttacctcttaagttctaactgcacttttatcaagaattcagagcacattctgtttataacattatctttcctgccttcactctaagttgattctaaaagttgaaaatcaattgacagcttttttaatgattatgtaaatattgttcatccttcagtcaaatagtgagttacatttacattatatttttttgattgtttttctgaaaggtttctttttttcttgcattctttgtcttcatgaaaacctttgtgttcttccaatgtctctgtcaggccatctcttccctcatttctgtcactcgcaacgtttgcctgttgaacagtcatcatcctgtgagttccctgtgatatttccttggattagatccattatttcgtagttcccatacattcctttttctagtttttacccccttttgttggagctcatccaaaagcaaatttctaagaaatagttcatagatatgggtctgaaaatgttttgttttgcttcatacttgattaattgtttaatccctatattttgaaagtggcctttctgacttccctgaatagtataatctttaatgtaatatactattatgaagagtataacattatgaagagaaatgctaagaaaattttgaaaaaggcaactaaagatttccttgtataaagcaaagcaaggaaacaagcaaacagaaattgacagaatccaggaagttataaaaataaggactaagtattgattgcctataatttataatcccttctgttattaagttgaggtataaagattgtaaatttgtttgaaagtatttggtaaccaataaacctagaaagcccattgtaaccagaggtataattctgataagtcagagggttcaattttccaaaatgtcacttctggcatgcctgcagccaacatagattgtgaactatgcaaggtacaggaaactgaatccctcatatttacttttccaacattaacatgtacattaagtatatttctctgaatatgcccagtgaatgttctggtcacaggtcgaaagcaaggccaataaggaaatcattatgacttcttgcatttcataggcacagtatattttgttacaacatcgtaaaacatttctacaaacattttaagcagaaaacctaccactttttatgtttttttttcaaagtcctctttgctcttaatctaccaaatgtaggcgttcaatattttcaacatttatttggatacctatgatgtgcctgttactgcatgagtccctgtgggagagtctaaggaccatgaagcatgtcttctgccttctaggagcttacaatgtagcacatttagaagaatgagcaaacagcctgagtgtttaattattaaattgtgttttgcagacttaagtgctatggaaaatgagtagagcaagataagccagggctaattgttattgagaaatgctttatattttttctaatagtgtttgctttttccattacttagaaattatcttaaatataatctgttcataccatttatcacaatttttttctgaaataatagggccaaatactttatagtagcacgttaggcatctgtgcctttaatattctaggactctttagtgaatcagctcatgtggtagatattcaagtacctggacttaactgcctaactagactgtgagttcctaggaaacagagattatattttctttacgtagcagacatagatggcttaggatggtgctttgtggcaggtgattcaaatatatgtttgttgattgactaagtgaataaatgtattccttttttacttggttttattatctcagttatgcagagaatggtgttagtaaaatcaagaaaacaggtttgacccttatattgcccaaaagcttcacagagaaaaatcctttccataactcatgagtctcaaaatagagcaaccctgtatatttgtagagagtgtgctgcaccaaagtaaggggacgttgtttcttacctgaatacctgagcgtctttctcgtttgccccacctgtagagccagagttcaggaaataaataggaccatagtctgattagtgttaacatggatgccactcctgatagacattacatccagaggtcaaaggcaacataatttattccataattttagccttgggattgttagtctgttaagcaaaccaaatgtcctgcataacacctaatgctagaatatgaactttcctcactgctggaattctaaaaacctaatgacctgtcatctcctctattggcagatgatagatggtcatgacagcaaaaaagtaaatgtccagttcctccgctcaaacattggaattgtttcccaggaaccagtgttgtttgcctgtagcataatggacaatatcaagtatggagacaacaccaaagaaattcccatggaaagagtcatagcagctgcaaaacaggctcagctgcatgattttgtcatgtcactcccagaggtgagtacgaagtcagagccattccctatgagagacaaggatggggagaagtagaatgaccagagtgtacaggttgagcatccctaatctgaaaatcccaaatccaaaatgttccaaaattcaaaaatttttgaatgccaacatgattccacaggtggaaaatttcacacttgacctcatgtgatgggtcacagtcaaaatgcagtcaaaactttgtttcatgtacaaaattattaaaaatattataggaatttacttctgggctatgtgtataaagtagataagaaacaggaattttgtggttagacttgagtcctatccccagggtatctcattatatgcagatattccaaaatctgaaaaaatccagaatctgaaacgtttctggtcccaagcatttctgataagaaatattcaatctgtattatgattgtggctctagaaggtcaaaggatatgcaatttatttcacagtgcccctggactgtcttagttttttaagcaaaagaaatatccttcatcaacatactctttaattttggaaagtattgtattgcccaatgcaatggatgctatttttgttgaatttttttgtacattgagctttagtttagcatagtggggaaacacctgagatttggagctgacctgggcttgcatccaagctttgccacttagtagcttcatagctttgggacaattatcctttctgagattgtctatttcatctgcaaaatgcaagaaaataacgttaaaatgaagaaaacacacttaatagccacacaatgaaagcggccactggtattactgccatcatcattatttcattacttggcaatgtgtaccgtgggtggtgggtaagttacacctgccttactgtctcttactttgccaaacccaagtccagatttcgcgcaatattgactctgcatttttccatccaccaaaagtccctcttagttttgatcacaagaaaaattacaacatggaaaccaaattgtagggccaaattttacctttaaccttctctacttactttttaaaaatatccctgggaaaattgtttttctttataagtgattatgtttataaattttgtgggtttgtggaaggctttttgtttgctcttttcacaaagtctcctaagttttaggctcttggcccagttcttacctgttagcccaatctataagcacatggaaattactatttgctgaatccagagatcaaaagcaaagattgtgtgtctcctggaagattcatttatcccacaaacccttattgaatagctactcatgttgggcaaggcactgtcatggagctggtttactgcattgtcctcatacagacttgcccgtggcacccttctctgagcactttgtctccacaaagacaaagcaggttttcatgggtctcacctggcttaaaggagcattcctcaggaggcaagggaagcagggaaaggaaacagctcgtgttgtggaaggcaaggaagagaagtagtcaaggcaaggacttagaggagagcaagattcactttcatctggattcagatttcactttcactgcttgttacttgtcctcgcaccattttcttacctccctgtgcctaagttttgtaatctaaaaaatagtgtgggtatggtttctgtgaatattaaatgataccctagctagaatagttagcacaatacctctatggtaaacactctatgaatgttaactaatttttatgtagccatgccaggcatgagtgattttttcttcctaattttctctaaaactcacaataaatatgtgaagtaagtgttaatactgcacctcagatgcctagccagctcaaaaaaatttaaataatttgttcatgaacacaagctagtaagcagcagagtggagcttctaaccaaagcctgtgttccagaatgctgcctccctaatacagcaatggaccagaagatctcgcaaaagacatttccattcttgggattagtccatattggaaggatttttccagataagaatctagaatcagagagtctcaaatcaaggaggatctcatatatgggctcttatgtggacacagggagaaggagattgaaaatataaacctaaaagaaatgcagaaatgaggaataatgtccccttgcttcccacatcaaatgtcacaaattccatatttttcttatattcctaagtggatttgacatcctccatcctataggaggactcactcactgttccctagttcaacaaacaaataatttaaattacagaggagaccttgacatgagttcagtacagcacaggagcaataactgtttctatttctcaaacttatcatactttttttcagaaatatgaaactaacgttgggtcccaggggtctcaactctctagaggggagaaacaacgcattgctattgctcgggccattgtacgagatcctaaaatcttgctactagatgaagccacttctgccttagacacagaaagtgaaaaggtaagtgttgaatttctaaagtcttagatcattacaaataagtcttttgctgtaaaatttgtccttaataaaatggcactattttcaattttctgattcgttaacagtagaaattggcaatactttgtggaaccaaaagacaattatctagagcaagtgatttaatataagattgcttcaaaaaaaatattttacctttaaaataagaattgtttttaagattctttaggctaagtgacatttttttccaaaggcaaataatcacctttcttgaataaagtaaaataatctagattatctgttatattttatagttctaaagttatgtgacagagaaggtaggccacatgcaacacaaagaaagaggtgatatctgatgtgtggtttgcatgaaagaagatgcaattgagcaaaacacaattatgaaatttaaaatgtataattaatgccataacaatcgggattccattttggagagagctaaaatgtcttcaatgaagagcagtatcaggaatggccacttaactgctaccctccgttgttttcttcatttcatttcaggaaactagaccatcaaatattgtaaaattatgtagggacttcatagtttgcttccttcttgctccactgaaatttctcagccagtgcactgccattgaaatcactgatgcattgcattcagggaatacttgcttaatcctctcttatgttgagcctttgggtttgccgtcaagtataggattgttattcaggtcgtgttaactgaactctcatgatggtgggctggggagcaatcatgcatctttgcatcaactttccatcttctctttgcagacggtgcaggttgctctagacaaagccagagagggtcggacctgcattgtcattgcccatcgcttgtccaccatccagaacgcggatatcattgctgtcatggcacagggggtggtgattgaaaaggggacccatgaagaactgatggcccaaaaaggagcctactacaaactagtcaccactggatcccccatcagttgacccaatgcaagaatctcagacacacatgacgcaccagttacaggggttgtttttaaagaaaaaaacaatcccagcaggagggattgctgggattgttttttctttaaagaagaatgttaatattttacttttacagtcattttcctacatcggaatccaagctaatttctaatggccttccataataattctgctttagatgtgtatacagaaaatgaaagaaactagggtccatatgagggaaaacccaatgtcaagtggcagctcagccaccactcagtgcttctctgtgcaggagccagtcctgattaatatgtgggaattagtgagacatcagggagtaagtgacactttgaactcctcaagggcagagaactgtctttcatttttgaaccctcggtgtacacagaggcgggtctataacaggcaatcaacaaacgtttcttgagctagaccaaggtcagatttgaaaagaacagaaggactgaagaccagctgtgtttcttaactaaatttgtctttcaagtgaaaccagcttccttcatctctaaggctaaggatagggaaagggtggatgctctcaggctgagggaggcagaaagggaaagtattagcatgagctttccagttagggctgttgatttatgctttaacttcagagtgagtgtaggggtggtgatgctaccattactgtgaggacctaccagtgtggctggagcagggactctctcccaggccttttactcctcagcacctccctgcatactgattgttgtttttagtttctgtgaaattatattcatgaaatgaaaatagcgcattttactttgctgtagtttcataaggttttatacaaaaaagcaagtaaatatggcagaaaagcactcatttgcccctgctccctcaaaacaccacagaatgacatagaactaaaggcggcaggaatctacaagaatgaagaaaacacagtgatgccacctgcaaaatcttgggagccagaaagcaaatggacaattgataatagagttacaagatgagagaaaacaaaaatgtaacctgttagttgggggagcctagaaacatcctgttttgtaccacagacccctagaaagtttcaagatgtaaaaacactggatccttctggaaggaggagacaaggggacagagggactgaagacagaagaatggaccaaaagcctgtatggaaacagaattgcagagccccgcctgcagcaggatggctgcctttccccagttccagcgagaaactgcatactccctctctgaggaggctcacagggaggtttgcacttagagacacaagatgaagttgaaggggcagctaacatacaagagacagggggattgaatgtaaagctgtgtatgaacagaagaactcccagcccctctcttctggcaggagattgaagaatgattttctggggaaattggccaatcttagaaaagaggtcgggccaggcgctgtggctcactcctgtaatcccagcactttgggaggccaaggcgggcggatcatgaggtcgagagattgagaccatcctggctaacatggtgaaaccccgtctctactaaaaatacaaaaaaattagccgggcgtggtggcgggcgcctgtagtcccagctactcaggaggctgaggcaggagaatggcgtgaacccgggaggtggagcttgcagtgagccgagatcgcgccactgcactccagcctgggcgacagagcgaaaaaaaaaaaaaaagaaaaagaaaaagaaaagaggtcaaggactccgtccttggaatcctaagaaaattttccagccgtattacccttctatgaagcccacctgtcaaccaacaagcacccactcgatcagagcttccccaggctttttggtgtctcctccttgcatgggaattgacttccaaggaccaccagacactgaggaagtattttaacatataaagcaaaagcaacaatagggcagctggagaaaggaaattagaagtaacagagccaatgcagtgattagaaaaacactcaaaaaatggtaataaatgtgttcaatgggtcaagagaacatatttccatctatttaaataaaaacaggaatcaataaaagtgaacatacaaaaaagagctcttgtcacagaaatgaaaaccttgggagcaggactgcacccacggttcccaccaacctatcctgccatcatgttttctccctactccagcttcctcccaagctcactctacgtagatggtttttcttcccttagccaacaaacgaaattctgcctataaattaagccaggacactaggatatggaggtatattatttatgtctcttttccagtgtttcctggtatataacagcaaagatggtttagcaagttaactggtcaggccagaattcttgatggttgccaagtcaggaggcagacggtgaaggaatgcattctggttatgaaaaatggcaatgacgagtaagttgcagagtaaagatgccttttagaggaaattaaggtttgcaataaatgcatgctaatcctctaattttgatgaaagactaaagctcttgttttggtttgcatttcaaagagcaagagcataggctcttgtgctgggaggtggccagtttcctggaaaggaatttatggagtctgaaagaggaattagtacaaattatattttcaaataagatacttgaaagttattgatgacagggaaaagattgtctaaagagggcttgaaattggggaaataattgaggctcagtgacaaaggagaagattacaacttcaaaaatgaataaataaataacattgcatgtttattttacaacaccagggggcgatgatgtctacgtttttattctgtatcctttatcgctgacaaagatttggtctctgcaattttaccttattgtttctcagatgaccaaggggttggcttaatttgttctgtttaaacttattgcaagtccttctgtaatttcctaatgttttcataatgtgtgttgtgaccagactctccttataaccccagttaataaaagttaacaggaaaaaaaaaaaatagaaggattggaagataaagttggggaaatttctctgaaagtaaaacaaaaagatagagatgaaaagtaggaaaaaataagaaaagaaaaaattgagggtaacaattcaggtggtgcaataattagtcaatagtctagttcaagagagtttatttaaaaaaataaatttagactattttaaaaaatagtctaagatcatttcctacaattgaagaatatgaatttccaagctgaaagagttcacccaatactgaatataataaataaaaatcctatttgggcacagtatgaaattttagaaaatgagggaaaaggagaatattttccaggagagaaggaggaatgtgtgacatataatcgataaagaattataatcatgtgactgggcacagtggctcatgcctgtaatcccagcactttaggaggccgaggcaagaggattgcttgagcccaggagtacaagaccagcctgggcaacctggcgaaaccccatttctaacaaaaaaagaaaagcaaaaattagccaggcatggtggcatgagccactcgggaagctgaagtggggtgattgcttgagttcaggtggttgaggctgcagtgacccaacatcgcgccactgccctccagcctgggcaacagagcaagaccttgtctcaaaaaaaaacaaaaccaaaaaaccaaaaaacaaaacaaaacacacacacacacaaaagaactataatgacataggacctcttgacaatgaaactaaaattcataaagatttgccttcaaaattctaaggggaatcattctatatgtagcaaagctattctcaagaatgagagaggtctaaagacattctcagtcatgcaggtctcaacacctctactccccatcttttctcagaaagccacaaaagggggctttttttttaaaaaataaggtcacagataaaaaaaataggaagatatgggatgtaagaacagatgacctaactcaagaatgaggtgctgggaatctccaggatgattaggaaggagatcccaggattacaggtgtgctgtacccagaggaagtagtcagctagattgaggcagggaaatgggttctgagaggaatgtcccccagaaaaacatggtgctgctagaatgcctggtgggtttgaatgctgagagaagacagaaccccctgctagagtttgagggtaagttagcaatgcgtaatagaagacaaagagagtgagattggagatttttagctattagctctaggtggaaagaaaagttacacaaaaagaaaatatatttttattttaccttatgactcatctgagaatgttatttacaaagtcacatcaatgtaaaagcttaatactgatctaaagcagaattatagatagattatgaaaggaacaagaaaatatgtggggtaggttgggatgggataggacatgggtaaaaaaagaactggatccttgtggtcctcatatttcataatggaaactaaacagttaaacatttaaacaaataagatgttttacaataaaaacatcttattgtaaaagatgaaggtgaatactgaaagaaactgctaaaagatttatgtacatatatatctttcattgaaaaaaataaagtttaagatgaaaaggggatagaaatgcagtacagttacaaaaattaaaacaatagatactgaaactattatagatttgaaagatacatcaccagaacagaagggagtccagaaatagattcaccagagatcccatttatcagaatatattttaaacttctaatcacaaaaagtgagcacacttttctcttcctgcattgttcacaatcatttggaaaaaatctcaaatctataaataagacgatggggtaaaggtcaaataagtttcggtacatatatgcaatgatgtttttcatgaagccaaaataatgatgttgacttacatttattgttttttgtggagcaatgcccatgttatattgtgcagaaaaaaaccatttctgatcatcaaagatggtatgatgctatctatctgtctaatcatctatgcacacacactcatacatgcatgcatctgttatgtgtgtatctgtgtttggtgtgtgcttgtacatacttgtatgcataaaaagatatctggaagaatttctgccaaattttggtaacttttatttccagccatttgtcctctgtgtgaccagaactccctgcatatactaaaatgtctattgatggtctttgagggcagagactgcctagttcatcttaatgtccccagtgctttactcggtacttggcataaagttctacctcaatacatcttgttgaatagtcttctcaaagtcacacaggtagtttataacttgtcagcccccacgtaaggaataaaagtggaaaacgcccattctttccgtgggtcagagcagtgcctttcaacagaaatataatatgggccactaatgtgagccacataggtaattttaaattttctagtcacataaaaaagtggaaaaaaaacaggtgaaatttatgctaattgtatattttattcaacccaacatatccaaaatattgccatcacaacatgtaatcaaaaatatcctgagatttttacattatctactaaatattcagaatctgaggtgcatttacatttacagcacatgttagctcaaatcagccttatgtcaacgtctgttctcaagagccactagtggctactatgttggacaacacagaattagaatatcaggttcatgaattctctagtctgaatctcagttgtctctacaattctagtcttataaaaacatgagcccagcttctccattggaatgtgtccttacactgtactcagaaactttgcaaaacttcagttttgcaggatgtcagtttggatgcaagaaagacctttggggaatcaaacaaatcattttgatgtcagaagtcatagagctacactggcctgtatcagaagtggttaaaatgctttacatcatacattttatttgattcaccagtgtgagttgacaaaagtgaaataactaagattgtttagtgtaacaaaatacagtatgatattaaaaatggtcatattagctaagcttcctgaggacctcttcccaaaacaagttttcttccagttgatctgtaagaaccatttatgatttttttctgtgaacaattcttaggaaaagttgaagcagcacatcttccaacttattttgaaaacaggctctcagttaattttggtccatttcaaaattgcatgaaagagatgcccatatattagaaatgctactgtttgagaaaaaaaaaggtagaaaaattggcctctagtttttttgtccaaaaactcttttttatatagttactctaaatgtactctacatgtgcccttaggaaattatttcaatgaaaagattctttgaatttggtgctgcccccgtgcctataatttttggcaattatacactcattttaaaatgtaggtcctggaatattttaatactatattctgaaagtgtaaaatacataggatcataattaggtatagtttgccatatatttattcaataattaaatatcagtttcttatcgtaagaaaatatcagaacagtttcatcatgttggtttaggatcccacctcatatttccaactaagggtttgatttattaaatatttcttatgcatgcaaaatctctccataatcaaggcacaaaaggatgttagaggaaatacaaaattaagaatttggttgttttcaaacacacttggagagaaatttacatatacatgtgtaccatcataaaatgagcactgtgtccacttggatttgctctaaatttacagatcaagtaaatgatctcacctgcatgtgagacggcaggtgaaagtaactcagtgaacctctaaacccatttccaatttctttcacactgggttcaattaaatgcccaattaatttaaatagcagactgtaaataaagcaatgcacatgattatcatctaattagcactggccagcattataatgtgctcattagcgagttgtatggtatcctgaggctcataatgagtaatcagggtactcgtgattggcatgtggctatccgaatgcaactactcaacccaataaattggagttaggacagaatgtgttatgtaaaaagaaaaaatacagagccagctggtgaattggcaatttcctccttcctgtaattcaggtacagctcctgctctcaaatacaaaataaatgtgagaacaggagagctggagatagcagaagagctggagatagaaatggaaatgttcgctaagggtgacagagaacaagtgcctatgattattatacaagattaccaaaaaagataaaacctttgtggtatttggtttctttttcatatctcaagtatagaatcaaagtaagaaatgagcagagtttcaataacatttcttggaaggtgaaaatttaatcattgaaatatacttcctgataatgttcataaagcattttgccttcatggttttagcatgttactgcaaaatagtttggcaggctgcagggagagatgcagctgagtgttgcattcattgttatgtaggtgataagtcactatggcaggtgttgtctctcttgacacccaatccgacacgcttttcttttgctttcctctattacagaggctggaaagcaaaatatttaccttcctagactcccttgcagctagatgaaggccaggtgacattgtcttgtcaatgaaatataggcacaaggccctatgcaggctgtccctttctgaataaagcctgggtaaaagaaaacctgagtctcttccccctttcttctttcctgaatgcacagcagccatgctgtgatcacttggacaaaagccacacaccacagatggcagagcaggaagatattcagcctgattcctgaacatcctttgtgcagctacttcagcctgggttgcctgccttcacccatcttgttacagaagaaaaagacacctctcacttgtttaagccactgaagtagtttttttgtaattgtgtttgttgttgttgttgttgctgttaactaaaaattaatacaatcttactcaatagatctttattaataaaaatcctgaaatgtaagtataaagaaaataacacaatattgaagtattaatgcattcttaaatgatcttcaaatatgatcattatatctagagatattccaaaaatattcagtgaaaggaggaatcggtcttttttacctagtatcactgccatggaaagacgatatcactggatgggtgtcctggcagctctttctttcctggaacattgcacatgccctgctttaaatgaaggaagcttttactttaggcacttagtgttttttgaatatgctttctcatcctttcacgtgataaaattgatgttagactgggaacaatctagatccctttgacaggatatgccagaggtgggaagaaaaagtggttcaagaaaggatgaatttgaaaaaggatgggttagaagaaatggggagtaaagttcccagttaatttatagctggaaatagtcacaaaccaattcttcaagtccacaggccagaggtatccctggagtccacccagatctgttgcaagtgagcccagaatcaatggaggcctccccccagggaagagcctatattgaactcacccttgcatctccagcagctgaaggcatttaatacattctggtctggtgggtgggtgagttaaaagacaagcatggacagaaagggccctagttaagtccgtggagattttagaagctttttggatctggatttctaattttgttcatcctcaaaaagcctggcatcatgtaacttggtgtcagagttgtgtttcattcaggaagcacatttcaacagccataaaaaattaaaaagtaaattttatctttatgtctttgagaaatccgtaattactccacaataaacttactaaaatgctgtgtcaaaactctagtcactttcctcattcagctccgtcatgtaagctctccaaccttacctcccacaaagccaagtttccctctccttcctttcttctcattcagcctattattatgtgatctgcttagtatctcttccagcaagaatttcttctttaggatgttgagaaaggggaactggagttggaatttaattataggatttctgttgcaagatagcatagcaggaagtctatggctattctcacgttaataattttgccccataacatcagttaaattatctctccatgtacttttttattgctataaaattcagattctaattagaatcgaatgttttaaagactggtccaaaattgtttaataaagtagcacatttcaaaacagagtgctttgtagaagttatagccttgttcattgcatgtaactaaaattaaaacagtatcaaaacacattagccagggtcttatcaccttcttgctccacttcacaaaaaaattaacaatacatctgaaagccttctgtgaagatagtgcttcacaaagagcaaacaaaatagaggagctggttggagagacaaagcacaatatgttggactgaatgagaccctcagagttgaagaatatcacaccgtgaatgaaccttccattttaaccccatactaaactcctcagttgagaactgggtaaactgaggccaccaacactaaatggccttctggagttttagtggttagatgcagggccaggctagaatgtagttctgatgactccagtccaggatgctggttgctaaactccacgaaggcctttgtacatcgatctgcctttgaatttcctggcacctgcctacctgcattctgacttcctctgggatccacatgtggacctgtggcgcaacctcttgcttggccagggtgagcagggcatcagcattccaaagctaagagaataagatacacacacacacgcacacacacacacacacacacacatctccaaaactcagacaggaacatttatttttattttgttaagtcaatgcagttttcatctagaaatatagcaagagctctaccatttttttatttgaacaattgcttaaaaaaaaaaagaaaggaatgattatgtagaaatgtttttgatgcagaattactgagcctggaggcaagggggcggggcggggcggggcgggtggaagatagtgcccatcttctattagcagcaggatgtatgagcacagatgacaatccggtccatgctgttcatcagacaaagcctgaatcctggaaaaagccaactctttgaacaggaattagagtgtgatcggctcagttgacgtacaggggtaggtgagtgcgagagtaaagaagctcttctttgtcttcggtagtgctgggtttcttttccaggcacacagatggcctgctccccctgcagcgcacccagatcctcccagggaggccgcttcagtttccacttggccagcgccagaaacgggctgctgtgctgccagcgcctacgttcctccccgcgctgcgccaggagtcccgttcggcgggaccgcagctgctgccttcactcattacctgcccctgtcctggcagctccttcagaacatattgttctttggggaaatatcatggtttttgaactgaggacagattctcttcagaaatcacatggcaaaacattagaaaaaaagaaaaactaagaaatttaaaaattcagaacagaagacaatcggttttatgctaacttttataaccttaatcgttgaagcttttcccctcctttagagcaattacttctatgctgccaaaagaaatgagaagtgatttcatctgagtcattactgtgctctccctcaaaggatagcagacagtaattagtactccacaccagacctgcctcaaatttggcataaactgcattcgtcctttacagagccgaaaatgaagcacttctaagtcttagaatcttctcgtgaatttctgtcatttggcagaaatttctggagtcgttgcttcttatagatcttttctactgttaactttaaaaaaatagacttttaacaattggcaaatggcaccacattaccttcagagtgaaatcaccatctgaaagcattcgaagtaaggggaggggaaaagttagacccccattttagtttcctggcaatattgagatctagaaattcatcctagaagctgtttgccatttccaaagtgcctaggacagcccatcaatgagggcaaaatcctcaggggcaactggacacgagcggtcctttttggaagactttatgaatagccacagaagtacaggtgttgggcattgatgtgtgctagacccagagaagcagggaggcttcgtcagaaagccaaccagccatccagaatgtggtcatggactgggtaaagctccccgctagtattgtgtaccttagagggtttccagaacatggtgcagggagggtgaacccagactctctgattccaggcaacagagctgagagtccagggacaccaaggcggctattgctcacaggacagaatgagagagaagggagctgcagagagagaatccaggtctgcagagggtccctttggaaaatgcagcaatatctgttaacttcttagagccgttaacgctgattcatgttgtctcacaggaacatggcaaaagtgacaatatacaaaatacttgggttttattttcaaggaaaatcactgtgagacttgatttgtgctgtccaattcagtagccactagacacacatggctattgaaatgtaaattaaaagtaaatgaaggttaaaaatgcatttccggcagggcttggtggctcacgcctgtaatcccagcactttgggaggctgaggcgggcgggtcacgaggtcaggagatcgagaccatcctggctaacacggagaaaccctgtctctattaaaaatacaaaaaaattagccaggtgtggtggcaggtgcctatagtcccagctactccggaggctgaggcaggagaatggcatgaacccaggaggcagagcttgcagtgaaccgagatcgcgccactgcactccagcctgggcaacagagcgagactccgtctcaaaaaaaaaaaaaatgcacttcctcagttgcatcagctacatttcaagagctcaataaacatctgtggccagtggctactatattggacagcacagatagagaacatctccatcactgtaaaagttcaattgaagagtgctggaatatacagttttaaaatacttaagaaaagaatctcatttttagaaccaagtcacttgactttttcttaaaccaagatttttgtatgtatgtaccaatttgatcttgaatttatttaaaaattttgaaaaaatgtaaagcatttcaacatttgacttttagtttcaaggacatcttataacaattcttttaatcaccatctgttttataatgaaatatgtctaaagaaggcaccaacttaaccttcttaggcagatgtccaatcaataggttgtcaaaggaaaggaactaatattcttcctgatagctagtttcagcaataataaattattttgtattttttttccaaatgt

SEQ ID NO: 6 - DNA, 132385 bp, Homo sapiens
acatttggaaaaaaaatacaaaataatttattattgctgaaactagctatcaggaagaatattagttcctttcctttgacaacctattgattggacatctgcctaagaaggttaagttggtgccttctttagacatatttcattataaaacagatggtgattaaaagaattgttataagatgtccttgaaactaaaagtcaaatgttgaaatgctttacattttttcaaaatttttaaataaattcaagatcaaattggtacatacatacaaaaatcttggtttaagaaaaagtcaagtgacttggttctaaaaatgagattcttttcttaagtattttaaaactgtatattccagcactcttcaattgaacttttacagtgatggagatgttctctatctgtgctgtccaatatagtagccactggccacagatgtttattgagctcttgaaatgtagctgatgcaactgaggaagtgcattttttttttttttgagacggagtctcgctctgttgcccaggctggagtgcagtggcgcgatctcggttcactgcaagctctgcctcctgggttcatgccattctcctgcctcagcctccggagtagctgggactataggcacctgccaccacacctggctaatttttttgtatttttaatagagacagggtttctccgtgttagccaggatggtctcgatctcctgacctcgtgacccgcccgcctcagcctcccaaagtgctgggattacaggcgtgagccaccaagccctgccggaaatgcatttttaaccttcatttacttttaatttacatttcaatagccatgtgtgtctagtggctactgaattggacagcacaaatcaagtctcacagtgattttccttgaaaataaaacccaagtattttgtatattgtcacttttgccatgttcctgtgagacaacatgaatcagcgttaacggctctaagaagttaacagatattgctgcattttccaaagggaccctctgcagacctggattctctctctgcagctcccttctctctcattctgtcctgtgagcaatagccgccttggtgtccctggactctcagctctgttgcctggaatcagagagtctgggttcaccctccctgcaccatgttctggaaaccctctaaggtacacaatactagcggggagctttacccagtccatgaccacattctggatggctggttggctttctgacgaagcctccctgcttctctgggtctagcacacatcaatgcccaacacctgtacttctgtggctattcataaagtcttccaaaaaggaccgctcgtgtccagttgcccctgaggattttgccctcattgatgggctgtcctaggcactttggaaatggcaaacagcttctaggatgaatttctagatctcaatattgccaggaaactaaaatgggggtctaacttttcccctccccttacttcgaatgctttcagatggtgatttcactctgaaggtaatgtggtgccatttgccaattgttaaaagtctatttttttaaagttaacagtagaaaagatctataagaagcaacgactccagaaatttctgccaaatgacagaaattcacgagaagattctaagacttagaagtgcttcattttcggctctgtaaaggacgaatgcagtttatgccaaatttgaggcaggtctggtgtggagtactaattactgtctgctatcctttgagggagagcacagtaatgactcagatgaaatcacttctcatttcttttggcagcatagaagtaattgctctaaaggaggggaaaagcttcaacgattaaggttataaaagttagcataaaaccgattgtcttctgttctgaatttttaaatttcttagtttttctttttttctaatgttttgccatgtgatttctgaagagaatctgtcctcagttcaaaaaccatgatatttccccaaagaacaatatgttctgaaggagctgccaggacaggggcaggtaatgagtgaaggcagcagctgcggtcccgccgaacgggactcctggcgcagcgcggggaggaacgtaggcgctggcagcacagcagcccgtttctggcgctggccaagtggaaactgaagcggcctccctgggaggatctgggtgcgctgcagggggagcaggccatctgtgtgcctggaaaagaaacccagcactaccgaagacaaagaagagcttctttactctcgcactcacctacccctgtacgtcaactgagccgatcacactctaattcctgttcaaagagttggctttttccaggattcaggctttgtctgatgaacagcatggaccggattgtcatctgtgctcatacatcctgctgctaatagaagatgggcactatcttccacccgccccgccccgccccgcccccttgcctccaggctcagtaattctgcatcaaaaacatttctacataatcattcctttctttttttttttaagcaattgttcaaataaaaaaatggtagagctcttgctatatttctagatgaaaactgcattgacttaacaaaataaaaataaatgttcctgtctgagttttggagatgtgtgtgtgtgtgtgtgtgtgtgcgtgtgtgtgtgtatcttattctcttagctttggaatgctgatgccctgctcaccctggccaagcaagaggttgcgccacaggtccacatgtggatcccagaggaagtcagaatgcaggtaggcaggtgccaggaaattcaaaggcagatcgatgtacaaaggccttcgtggagtttagcaaccagcatcctggactggagtcatcagaactacattctagcctggccctgcatctaaccactaaaactccagaaggccatttagtgttggtggcctcagtttacccagttctcaactgaggagtttagtatggggttaaaatggaaggttcattcacggtgtgatattcttcaactctgagggtctcattcagtccaacatattgtgctttgtctctccaaccagctcctctattttgtttgctctttgtgaagcactatcttcacagaaggctttcagatgtattgttaatttttttgtgaagtggagcaagaaggtgataagaccctggctaatgtgttttgatactgttttaattttagttacatgcaatgaacaaggctataacttctacaaagcactctgttttgaaatgtgctactttattaaacaattttggaccagtctttaaaacattcgattctaattagaatctgaattttatagcaataaaaaagtacatggagagataatttaactgatgttatggggcaaaattattaacgtgagaatagccatagacttcctgctatgctatcttgcaacagaaatcctataattaaattccaactccagttcccctttctcaacatcctaaagaagaaattcttgctggaagagatactaagcagatcacataataataggctgaatgagaagaaaggaaggagagggaaacttggctttgtgggaggtaaggttggagagcttacatgacggagctgaatgaggaaagtgactagagttttgacacagcattttagtaagtttattgtggagtaattacggatttctcaaagacataaagataaaatttactttttaattttttatggctgttgaaatgtgcttcctgaatgaaacacaactctgacaccaagttacatgatgccaggctttttgaggatgaacaaaattagaaatccagatccaaaaagcttctaaaatctccacggacttaactagggccctttctgtccatgcttgtcttttaactcacccacccaccagaccagaatgtattaaatgccttcagctgctggagatgcaagggtgagttcaatataggctcttccctggggggaggcctccattgattctgggctcacttgcaacagatctgggtggactccagggatacctctggcctgtggacttgaagaattggtttgtgactatttccagctataaattaactgggaactttactccccatttcttctaacccatcctttttcaaattcatcctttcttgaaccactttttcttcccacctctggcatatcctgtcaaagggatctagattgttcccagtctaacatcaattttatcacgtgaaaggatgagaaagcatattcaaaaaacactaagtgcctaaagtaaaagcttccttcatttaaagcagggcatgtgcaatgttccaggaaagaaagagctgccaggacacccatccagtgatatcgtctttccatggcagtgatactaggtaaaaaagaccgattcctcctttcactgaatatttttggaatatctctagatataatgatcatatttgaagatcatttaagaatgcattaatacttcaatattgtgttattttctttatacttacatttcaggatttttattaataaagatctattgagtaagattgtattaatttttagttaacagcaacaacaacaacaacaaacacaattacaaaaaaactacttcagtggcttaaacaagtgagaggtgtctttttcttctgtaacaagatgggtgaaggcaggcaacccaggctgaagtagctgcacaaaggatgttcaggaatcaggctgaatatcttcctgctctgccatctgtggtgtgtggcttttgtccaagtgatcacagcatggctgctgtgcattcaggaaagaagaaagggggaagagactcaggttttcttttacccaggctttattcagaaagggacagcctgcatagggccttgtgcctatatttcattgacaagacaatgtcacctggccttcatctagctgcaagggagtctaggaaggtaaatattttgctttccagcctctgtaatagaggaaagcaaaagaaaagcgtgtcggattgggtgtcaagagagacaacacctgccatagtgacttatcacctacataacaatgaatgcaacactcagctgcatctctccctgcagcctgccaaactattttgcagtaacatgctaaaaccatgaaggcaaaatgctttatgaacattatcaggaagtatatttcaatgattaaattttcaccttccaagaaatgttattgaaactctgctcatttcttactttgattctatacttgagatatgaaaaagaaaccaaataccacaaaggttttatcttttttggtaatcttgtataataatcataggcacttgttctctgtcacccttagcgaacatttccatttctatctccagctcttctgctatctccagctctcctgttctcacatttattttgtatttgagagcaggagctgtacctgaattacaggaaggaggaaattgccaattcaccagctggctctgtattttttctttttacataacacattctgtcctaactccaatttattgggttgagtagttgcattcggatagccacatgccaatcacgagtaccctgattactcattatgagcctcaggataccatacaactcgctaatgagcacattataatgctggccagtgctaattagatgataatcatgtgcattgctttatttacagtctgctatttaaattaattgggcatttaattgaacccagtgtgaaagaaattggaaatgggtttagaggttcactgagttactttcacctgccgtctcacatgcaggtgagatcatttacttgatctgtaaatttagagcaaatccaagtggacacagtgctcattttatgatggtacacatgtatatgtaaatttctctccaagtgtgtttgaaaacaaccaaattcttaattttgtatttcctctaacatccttttgtgccttgattatggagagattttgcatgcataagaaatatttaataaatcaaacccttagttggaaatatgaggtgggatcctaaaccaacatgatgaaactgttctgatattttcttacgataagaaactgatatttaattattgaataaatatatggcaaactatacctaattatgatcctatgtattttacactttcagaatatagtattaaaatattccaggacctacattttaaaatgagtgtataattgccaaaaattataggcacgggggcagcaccaaattcaaagaatcttttcattgaaataatttcctaagggcacatgtagagtacatttagagtaactatataaaaaagagtttttggacaaaaaaactagaggccaatttttctacctttttttttctcaaacagtagcatttctaatatatgggcatctctttcatgcaattttgaaatggaccaaaattaactgagagcctgttttcaaaataagttggaagatgtgctgcttcaacttttcctaagaattgttcacagaaaaaaatcataaatggttcttacagatcaactggaagaaaacttgttttgggaagaggtcctcaggaagcttagctaatatgaccatttttaatatcatactgtattttgttacactaaacaatcttagttatttcacttttgtcaactcacactggtgaatcaaataaaatgtatgatgtaaagcattttaaccacttctgatacaggccagtgtagctctatgacttctgacatcaaaatgatttgtttgattccccaaaggtctttcttgcatccaaactgacatcctgcaaaactgaagttttgcaaagtttctgagtacagtgtaaggacacattccaatggagaagctgggctcatgtttttataagactagaattgtagagacaactgagattcagactagagaattcatgaacctgatattctaattctgtgttgtccaacatagtagccactagtggctcttgagaacagacgttgacataaggctgatttgagctaacatgtgctgtaaatgtaaatgcacctcagattctgaatatttagtagataatgtaaaaatctcaggatatttttgattacatgttgtgatggcaatattttggatatgttgggttgaataaaatatacaattagcataaatttcacctgttttttttccacttttttatgtgactagaaaatttaaaattacctatgtggctcacattagtggcccatattatatttctgttgaaaggcactgctctgacccacggaaagaatgggcgttttccacttttattccttacgtgggggctgacaagttataaactacctgtgtgactttgagaagactattcaacaagatgtattgaggtagaactttatgccaagtaccgagtaaagcactggggacattaagatgaactaggcagtctctgccctcaaagaccatcaatagacattttagtatatgcagggagttctggtcacacagaggacaaatggctggaaataaaagttaccaaaatttggcagaaattcttccagatatctttttatgcatacaagtatgtacaagcacacaccaaacacagatacacacataacagatgcatgcatgtatgagtgtgtgtgcatagatgattagacagatagatagcatcataccatctttgatgatcagaaatggtttttttctgcacaatataacatgggcattgctccacaaaaaacaataaatgtaagtcaacatcattattttggcttcatgaaaaacatcattgcatatatgtaccgaaacttatttgacctttaccccatcgtcttatttatagatttgagattttttccaaatgattgtgaacaatgcaggaagagaaaagtgtgctcactttttgtgattagaagtttaaaatatattctgataaatgggatctctggtgaatctatttctggactcccttctgttctggtgatgtatctttcaaatctataatagtttcagtatctattgttttaatttttgtaactgtactgcatttctatccccttttcatcttaaactttatttttttcaatgaaagatatatatgtacataaatcttttagcagtttctttcagtattcaccttcatcttttacaataagatgtttttattgtaaaacatcttatttgtttaaatgtttaactgtttagtttccattatgaaatatgaggaccacaaggatccagttctttttttacccatgtcctatcccatcccaacctaccccacatattttcttgttcctttcataatctatctataattctgctttagatcagtattaagcttttacattgatgtgactttgtaaataacattctcagatgagtcataaggtaaaataaaaatatattttctttttgtgtaacttttctttccacctagagctaatagctaaaaatctccaatctcactctctttgtcttctattacgcattgctaacttaccctcaaactctagcagggggttctgtcttctctcagcattcaaacccaccaggcattctagcagcaccatgtttttctgggggacattcctctcagaacccatttccctgcctcaatctagctgactacttcctctgggtacagcacacctgtaatcctgggatctccttcctaatcatcctggagattcccagcacctcattcttgagttaggtcatctgttcttacatcccatatcttcctattttttttatctgtgaccttattttttaaaaaaaaagcccccttttgtggctttctgagaaaagatggggagtagaggtgttgagacctgcatgactgagaatgtctttagacctctctcattcttgagaatagctttgctacatatagaatgattccccttagaattttgaaggcaaatctttatgaattttagtttcattgtcaagaggtcctatgtcattatagttcttttgtgtgtgtgtgtgttttgttttgttttttggttttttggttttgtttttttttgagacaaggtcttgctctgttgcccaggctggagggcagtggcgcgatgttgggtcactgcagcctcaaccacctgaactcaagcaatcaccccacttcagcttcccgagtggctcatgccaccatgcctggctaatttttgcttttctttttttgttagaaatggggtttcgccaggttgcccaggctggtcttgtactcctgggctcaagcaatcctcttgcctcggcctcctaaagtgctgggattacaggcatgagccactgtgcccagtcacatgattataattctttatcgattatatgtcacacattcctccttctctcctggaaaatattctccttttccctcattttctaaaatttcatactgtgcccaaataggatttttatttattatattcagtattgggtgaactctttcagcttggaaattcatattcttcaattgtaggaaatgatcttagactattttttaaaatagtctaaatttatttttttaaataaactctcttgaactagactattgactaattattgcaccacctgaattgttaccctcaattttttcttttcttattttttcctacttttcatctctatctttttgttttactttcagagaaatttccccaactttatcttccaatccttctattttttttttttcctgttaacttttattaactggggttataaggagagtctggtcacaacacacattatgaaaacattaggaaattacagaaggacttgcaataagtttaaacagaacaaattaagccaaccccttggtcatctgagaaacaataaggtaaaattgcagagaccaaatctttgtcagcgataaaggatacagaataaaaacgtagacatcatcgccccctggtgttgtaaaataaacatgcaatgttatttatttattcatttttgaagttgtaatcttctcctttgtcactgagcctcaattatttccccaatttcaagccctctttagacaatcttttccctgtcatcaataactttcaagtatcttatttgaaaatataatttgtactaattcctctttcagactccataaattcctttccaggaaactggccacctcccagcacaagagcctatgctcttgctctttgaaatgcaaaccaaaacaagagctttagtctttcatcaaaattagaggattagcatgcatttattgcaaaccttaatttcctctaaaaggcatctttactctgcaacttactcgtcattgccatttttcataaccagaatgcattccttcaccgtctgcctcctgacttggcaaccatcaagaattctggcctgaccagttaacttgctaaaccatctttgctgttatataccaggaaacactggaaaagagacataaataatatacctccatatcctagtgtcctggcttaatttataggcagaatttcgtttgttggctaagggaagaaaaaccatctacgtagagtgagcttgggaggaagctggagtagggagaaaacatgatggcaggataggttggtgggaaccgtgggtgcagtcctgctcccaaggttttcatttctgtgacaagagctcttttttgtatgttcacttttattgattcctgtttttatttaaatagatggaaatatgttctcttgacccattgaacacatttattaccattttttgagtgtttttctaatcactgcattggctctgttacttctaatttcctttctccagctgccctattgttgcttttgctttatatgttaaaatacttcctcagtgtctggtggtccttggaagtcaattcccatgcaaggaggagacaccaaaaagcctggggaagctctgatcgagtgggtgcttgttggttgacaggtgggcttcatagaagggtaatacggctggaaaattttcttaggattccaaggacggagtccttgacctcttttctttttctttttctttttttttttttttcgctctgtcgcccaggctggagtgcagtggcgcgatctcggctcactgcaagctccacctcccgggttcacgccattctcctgcctcagcctcctgagtagctgggactacaggcgcccgccaccacgcccggctaatttttttgtatttttagtagagacggggtttcaccatgttagccaggatggtctcaatctctcgacctcatgatccgcccgccttggcctcccaaagtgctgggattacaggagtgagccacagcgcctggcccgacctcttttctaagattggccaatttccccagaaaatcattcttcaatctcctgccagaagagaggggctgggagttcttctgttcatacacagctttacattcaatccccctgtctcttgtatgttagctgccccttcaacttcatcttgtgtctctaagtgcaaacctccctgtgagcctcctcagagagggagtatgcagtttctcgctggaactggggaaaggcagccatcctgctgcaggcggggctctgcaattctgtttccatacaggcttttggtccattcttctgtcttcagtccctctgtccccttgtctcctccttccagaaggatccagtgtttttacatcttgaaactttctaggggtctgtggtacaaaacaggatgtttctaggctcccccaactaacaggttacatttttgttttctctcatcttgtaactctattatcaattgtccatttgctttctggctcccaagattttgcaggtggcatcactgtgttttcttcattcttgtagattcctgccgcctttagttctatgtcattctgtggtgttttgagggagcaggggcaaatgagtgcttttctgccatatttacttgcttttttgtataaaaccttatgaaactacagcaaagtaaaatgcgctattttcatttcatgaatataatttcacagaaactaaaaacaacaatcagtatgcagggaggtgctgaggagtaaaaggcctgggagagagtccctgctccagccacactggtaggtcctcacagtaatggtagcatcaccacccctacactcactctgaagttaaagcataaatcaacagccctaactggaaagctcatgctaatactttccctttctgcctccctcagcctgagagcatccaccctttccctatccttagccttagagatgaaggaagctggtttcacttgaaagacaaatttagttaagaaacacagctggtcttcagtccttctgttcttttcaaatctgaccttggtctagctcaagaaacgtttgttgattgcctgttatagacccgcctctgtgtacaccgagggttcaaaaatgaaagacagttctctgcccttgaggagttcaaagtgtcacttactccctgatgtctcactaattcccacatattaatcaggactggctcctgcacagagaagcactgagtggtggctgagctgccacttgacattgggttttccctcatatggaccctagtttctttcattttctgtatacacatctaaagcagaattattatggaaggccattagaaattagcttggattccgatgtaggaaaatgactgtaaaagtaaaatattaacattcttctttaaagaaaaaacaatcccagcaatccctcctgctgggattgtttttttctttaaaaacaacccctgtaactggtgcgtcatgtgtgtctgagattcttgcattgggtcaactgatgggggatccagtggtgactagtttgtagtaggctcctttttgggccatcagttcttcatgggtccccttttcaatcaccaccccctgtgccatgacagcaatgatatccgcgttctggatggtggacaagcgatgggcaatgacaatgcaggtccgaccctctctggctttgtctagagcaacctgcaccgtctgcaaagagaagatggaaagttgatgcaaagatgcatgattgctccccagcccaccatcatgagagttcagttaacacgacctgaataacaatcctatacttgacggcaaacccaaaggctcaacataagagaggattaagcaagtattccctgaatgcaatgcatcagtgatttcaatggcagtgcactggctgagaaatttcagtggagcaagaaggaagcaaactatgaagtccctacataattttacaatatttgatggtctagtttcctgaaatgaaatgaagaaaacaacggagggtagcagttaagtggccattcctgatactgctcttcattgaagacattttagctctctccaaaatggaatcccgattgttatggcattaattatacattttaaatttcataattgtgttttgctcaattgcatcttctttcatgcaaaccacacatcagatatcacctctttctttgtgttgcatgtggcctaccttctctgtcacataactttagaactataaaatataacagataatctagattattttactttattcaagaaaggtgattatttgcctttggaaaaaaatgtcacttagcctaaagaatcttaaaaacaattcttattttaaaggtaaaatattttttttgaagcaatcttatattaaatcacttgctctagataattgtcttttggttccacaaagtattgccaatttctactgttaacgaatcagaaaattgaaaatagtgccattttattaaggacaaattttacagcaaaagacttatttgtaatgatctaagactttagaaattcaacacttaccttttcactttctgtgtctaaggcagaagtggcttcatctagtagcaagattttaggatctcgtacaatggcccgagcaatagcaatgcgttgtttctcccctctagagagttgagacccctgggacccaacgttagtttcatatttctgaaaaaaagtatgataagtttgagaaatagaaacagttattgctcctgtgctgtactgaactcatgtcaaggtctcctctgtaatttaaattatttgtttgttgaactagggaacagtgagtgagtcctcctataggatggaggatgtcaaatccacttaggaatataagaaaaatatggaatttgtgacatttgatgtgggaagcaaggggacattattcctcatttctgcatttcttttaggtttatattttcaatctccttctccctgtgtccacataagagcccatatatgagatcctccttgatttgagactctctgattctagattcttatctggaaaaatccttccaatatggactaatcccaagaatggaaatgtcttttgcgagatcttctggtccattgctgtattagggaggcagcattctggaacacaggctttggttagaagctccactctgctgcttactagcttgtgttcatgaacaaattatttaaatttttttgagctggctaggcatctgaggtgcagtattaacacttacttcacatatttattgtgagttttagagaaaattaggaagaaaaaatcactcatgcctggcatggctacataaaaattagttaacattcatagagtgtttaccatagaggtattgtgctaactattctagctagggtatcatttaatattcacagaaaccatacccacactattttttagattacaaaacttaggcacagggaggtaagaaaatggtgcgaggacaagtaacaagcagtgaaagtgaaatctgaatccagatgaaagtgaatcttgctctcctctaagtccttgccttgactacttctcttccttgccttccacaacacgagctgtttcctttccctgcttcccttgcctcctgaggaatgctcctttaagccaggtgagacccatgaaaacctgctttgtctttgtggagacaaagtgctcagagaagggtgccacgggcaagtctgtatgaggacaatgcagtaaaccagctccatgacagtgccttgcccaacatgagtagctattcaataagggtttgtgggataaatgaatcttccaggagacacacaatctttgcttttgatctctggattcagcaaatagtaatttccatgtgcttatagattgggctaacaggtaagaactgggccaagagcctaaaacttaggagactttgtgaaaagagcaaacaaaaagccttccacaaacccacaaaatttataaacataatcacttataaagaaaaacaattttcccagggatatttttaaaaagtaagtagagaaggttaaaggtaaaatttggccctacaatttggtttccatgttgtaatttttcttgtgatcaaaactaagagggacttttggtggatggaaaaatgcagagtcaatattgcgcgaaatctggacttgggtttggcaaagtaagagacagtaaggcaggtgtaacttacccaccacccacggtacacattgccaagtaatgaaataatgatgatggcagtaataccagtggccgctttcattgtgtggctattaagtgtgttttcttcattttaacgttattttcttgcattttgcagatgaaatagacaatctcagaaaggataattgtcccaaagctatgaagctactaagtggcaaagcttggatgcaagcccaggtcagctccaaatctcaggtgtttccccactatgctaaactaaagctcaatgtacaaaaaaattcaacaaaaatagcatccattgcattgggcaatacaatactttccaaaattaaagagtatgttgatgaaggatatttcttttgcttaaaaaactaagacagtccaggggcactgtgaaataaattgcatatcctttgaccttctagagccacaatcataatacagattgaatatttcttatcagaaatgcttgggaccagaaacgtttcagattctggattttttcagattttggaatatctgcatataatgagataccctggggataggactcaagtctaaccacaaaattcctgtttcttatctactttatacacatagcccagaagtaaattcctataatatttttaataattttgtacatgaaacaaagttttgactgcattttgactgtgacccatcacatgaggtcaagtgtgaaattttccacctgtggaatcatgttggcattcaaaaatttttgaattttggaacattttggatttgggattttcagattagggatgctcaacctgtacactctggtcattctacttctccccatccttgtctctcatagggaatggctctgacttcgtactcacctctgggagtgacatgacaaaatcatgcagctgagcctgttttgcagctgctatgactctttccatgggaatttctttggtgttgtctccatacttgatattgtccattatgctacaggcaaacaacactggttcctgggaaacaattccaatgtttgagcggaggaactggacatttacttttttgctgtcatgaccatctatcatctgccaatagaggagatgacaggtcattaggtttttagaattccagcagtgaggaaagttcatattctagcattaggtgttatgcaggacatttggtttgcttaacagactaacaatcccaaggctaaaattatggaataaattatgttgcctttgacctctggatgtaatgtctatcaggagtggcatccatgttaacactaatcagactatggtcctatttatttcctgaactctggctctacaggtggggcaaacgagaaagacgctcaggtattcaggtaagaaacaacgtccccttactttggtgcagcacactctctacaaatatacagggttgctctattttgagactcatgagttatggaaaggatttttctctgtgaagcttttgggcaatataagggtcaaacctgttttcttgattttactaacaccattctctgcataactgagataataaaaccaagtaaaaaaggaatacatttattcacttagtcaatcaacaaacatatatttgaatcacctgccacaaagcaccatcctaagccatctatgtctgctacgtaaagaaaatataatctctgtttcctaggaactcacagtctagttaggcagttaagtccaggtacttgaatatctaccacatgagctgattcactaaagagtcctagaatattaaaggcacagatgcctaacgtgctactataaagtatttggccctattatttcagaaaaaaattgtgataaatggtatgaacagattatatttaagataatttctaagtaatggaaaaagcaaacactattagaaaaaatataaagcatttctcaataacaattagccctggcttatcttgctctactcattttccatagcacttaagtctgcaaaacacaatttaataattaaacactcaggctgtttgctcattcttctaaatgtgctacattgtaagctcctagaaggcagaagacatgcttcatggtccttagactctcccacagggactcatgcagtaacaggcacatcataggtatccaaataaatgttgaaaatattgaacgcctacatttggtagattaagagcaaagaggactttgaaaaaaaaacataaaaagtggtaggttttctgcttaaaatgtttgtagaaatgttttacgatgttgtaacaaaatatactgtgcctatgaaatgcaagaagtcataatgatttccttattggccttgctttcgacctgtgaccagaacattcactgggcatattcagagaaatatacttaatgtacatgttaatgttggaaaagtaaatatgagggattcagtttcctgtaccttgcatagttcacaatctatgttggctgcaggcatgccagaagtgacattttggaaaattgaaccctctgacttatcagaattatacctctggttacaatgggctttctaggtttattggttaccaaatactttcaaacaaatttacaatctttatacctcaacttaataacagaagggattataaattataggcaatcaatacttagtccttatttttataacttcctggattctgtcaatttctgtttgcttgtttccttgctttgctttatacaaggaaatctttagttgcctttttcaaaattttcttagcatttctcttcataatgttatactcttcataatagtatattacattaaagattatactattcagggaagtcagaaaggccactttcaaaatatagggattaaacaattaatcaagtatgaagcaaaacaaaacattttcagacccatatctatgaactatttcttagaaatttgcttttggatgagctccaacaaaagggggtaaaaactagaaaaaggaatgtatgggaactacgaaataatggatctaatccaaggaaatatcacagggaactcacaggatgatgactgttcaacaggcaaacgttgcgagtgacagaaatgagggaagagatggcctgacagagacattggaagaacacaaaggttttcatgaagacaaagaatgcaagaaaaaaagaaacctttcagaaaaacaatcaaaaaaatataatgtaaatgtaactcactatttgactgaaggatgaacaatatttacataatcattaaaaaagctgtcaattgattttcaacttttagaatcaacttagagtgaaggcaggaaagataatgttataaacagaatgtgctctgaattcttgataaaagtgcagttagaacttaagaggtaaaagaagtaagaggtgaaaagagtaagaggtgaaaataaaggtaggattgctaacatttttcttttagaaagtgagaattcaagaggaactatctacaggtggtggaagagcaacggaagcagatcagaagtttacaaatttataaatagaaggcctaaaaaatgatataactatattgggaggaggtaggcaaaaggagggagtggtgagagtaagtagatttttatctcttgagaataaatcacagagagtctaaatttgttaaatcatgaaatagcatgagcatattatttaaagacataaaagtcaccattgggagatcaaaaaacatcaagtggtcaaaaatagttgcctttgagcagagaaatgtggagtgggagtgtaagcataaagcaggggggtggctttttattataaatatttattatttgattttgtgaccttctgcatatattacttttaaagaaagaaaaaaaggacagaaaagagaaagaaatgttatgaaaaataaataccaaagctattcaccaaaatttcaaatatccttgctaaagatttatggtacatggctctcaatctgagttccttgcgttatttagatttcagcttcttgaacaaggattgtcttagatcttttcatgctaactctcctttcttgctcatttatcattatttcccttatcactctactttttccattcctggtcattagtttcctgattagtctgcactttctgctccatttacgggtaagtgagtgcttctattaaatacactcatctccagctttgcagtgtgcccagttttctttgcctaactggtcagcaggccatctggaactggggaaaatctgacattagaaattgtgaggtagaatcaggtgaagcagcaaatgactgggactggaaaatatgcatggggtaagtgccttaggcaagcattttaaagtgagtctggcaaagcaaaaacttgaagcccacttttaggggttggaaatactctgcagaaggcaaaattctcaaaaaggttgcgtggcttaccaccttcccttgatcaggatcatagaaacgttccaacagctgaatgctagtgcttttgccacatccactgctcccaacaaacgccagtgtctgccctggactaatcgacactgagagaccattcagaacttgcgagtcaggtcgagaaggatatgtaaatttacaatcaacaaaatcaatcttcccctggaagttgtcctgtggatgggaggatcaaaattagagatgctcttactgaagcctagaatattgaaaacacacctaaatcttgagtttaaaatccctgcttgagataccttcaaaccatgctgccaaagtgcaaagtataaagacagcaacttaataaaaggacattccattttgtgttctgaaagatgtagtataaaggaaggcttgggcaacgaaattaaagacatttgactccccctattcccagtctaacataaggggattttcttgccatctattcctgacattctgaatagaagagaatagctggaagatatgacatcacagaagccagtaactgtccaaaccctatagctttgttctcctaaagactaaaaataatgttacacttaaaacgacctagaaagaaagttacctgaggtctgtactgcaaaggtgaatactttctattgtactttggtgtgcttaaaactctaacttataaaatctagaaatggatagacatttaatagaccacacagaaactttacatttactgaactgaaggagaaattttaccaatttagaaagattacagaatttagcttagctttactagtgtttaggtttgctttgctttctggaacatactaaaattttcaaaaataggtagagaagatttacaaatacctatctatcaattagaagaacagatattttgttgagattgaattaattttcaggacatccacataagctaaaacttgaatcaagatgaacatgaattaaatcaatgttattggacaggaagaagtgatttttctacattctgtatcagaacatcaatagaaaacacagtggttaggtagatctcagaggacaactggcttcattcatttgggaactaagtgtattttatattacacagaatttagcattcactgaatgtcatcaccttgttcaaatgccagctttaggaataatttttgatgctaatttactttattcctttgtatttataaatctactgtttgtcttctccaagtatgtatgaatgaacccatatacagcaggaatttagaagccaagtggtattgtatggccatccctaatggctgtcctgcacacacatacgcacaaccttacccctcatcaatacttacacattttatttatttatttattttattagactttaagttctggggtagatgtgtagaatgtgcaggcttgttatataggtatacacgtgtcatggtggtttgctgcacccatcaacctgtcatctacattaggtatttctcctaatgctatccctcccctaccccacaccatcccctgacaggccccggtgtgtgatgttccccaccctgtgtccatgtgttctgtttgttcaactcccacttatgagtgagaacatgtggtgtttggttttctgttcttgtgttagtttgctgagaatgatggtttccagcttcatccctgtccctgcaaaggacatgaactcatccttttttatggctgcatagtattccaacacttacccatttttcacctgcagtattgtatacactgattgggggttgtcggtccagcagttgaaaaaagcgtgcagctgatattttagcttttgcataacttggggtgtaagagaaggctcttccaagagctgttgcactcagtacaactgcagagatcaccctgtaaccagacagacacacaggaagagagcagggtggcgtggttggtgtgatgacctgaaggcagaagtttggggatctagccctggttctgccaggaaaggaccaaatatccttgagcaagtcacttcagacttgtctggaaatggagagggtggtgtttaagggactggcagttttcaaactgtgttctatgaaaaaggagtaagaagaggactgaacaagcatgaaggggggagagctcagacctccaaacctttatttgaccacaatagcttcctttaagaaaattgttggccaggcgcggtggctcactcctgtaatcccagcaccttgggaggccgaggcgggcggatcacgaggtcagaagatcgagaccatcctggctaacacggtgaaaccccgtctctactaaaaatacaaaaaattagctgggcgtggtggtggtcgcctgtggtcccagctactcgggaggctgaggcaggagaatggtatgaacctgggaggcagagcttgcagtgagccaagatcgcgccactgcactccagcctgggtgacagagcaagactccgtctcaaaaaaaaaaaaaaagaaaagaaaattgtttgagggggaaaaagacttctgaaaaaatttttttaaaagaaaaagcaggcttgaaagatcaccagattgagttgatttttctagaattctaacagttattgaatctataataggtatataaaagataatgattgatgatataagcatcatttttgcaccaggcatgtatataatttatgcttcagagagcaagacagatgcaattgcctgtctccttctacttgtcttagcctctaactatagtcaacatgtacttaattaacgaaagagtgaatgaataaatgaatgataaatataatgagagataactttgttgctgtagagattatgatgtgagtagtagcccccaaagctgctcacctgcactgtcatgcacagagggtctgcctgggatggggatagggataagggatgtgtctttgtgtgtcacactgctcagttcataagcaggaattgttttaggccagaattgcaaatctgaacatccccgggagcccagtttaaagcctaagggaatgaaaagcacttgaaatgaaatggaaaatggtggaagatgacgttccaatttttaaagtgaagccagaaattggaagttttctgtagttccactttttgttttgttttgagatggagtctcactctgtcacccaggctggagtgtagtggcatgatctcagctcactgtagcctctgcctcctgggttcaagcgattctcctttctcctgcctcagcctcccaagtagctgggattacaggcacacatcaccatacctggctaatttttgtatttttttgtagagatgaggtttcgccatgttggccaggctggtcttgaactcctgacctcaagtgatccacccgcctcggcctgaggtgctgagattacaggcatgagccaccgcacccagcctgtagccccagatttttacatgttggcaaaaaaatattctaaattattctaaaattattctaaattattctaaaattattctaaaaccttaatataaactaaataaaaataagccaatggtttgtgttttctaatttagactagtagctttaaatatgcaaagatttagaaaagagacactttcctagctgggtgggtgtagtggagtgggagagaagtgctgaaagagataccaggtgagaaggcgggactcatggctagagaaggaaacccaagaaccgattcctataggaccacttttcctaatgccctccaaacctttctcagaccatctccacccttaccccccgactcgcccatatacatgtgtacctcgttccccagtaccctgacacccttaggctttcacctctggaaatgtgagaaattggactaaaagctaatcttattagaaaagcaggctttggctatacgaatggaacatccttcacctgtatggcccatgctgtctctgcctaggaggagtcagttgggaggagtcagccctctttgcaagagaggagttcaaacaaaacagttctctatgaaccatcttagccaagacctctagattttctcagcattaacatgtgtggcagattgtttataaacaacgatcatattaattcacactttcatgcatccctttgcaacatggcttttttactcctctcatcaaaaagtggattctatttttttctattccttaaacctgggcttgatggtatgactttctttggccaaacagaaaattagaaagtttctttgcgtggagagacttgaaaagtacttgcacagtggggcttgccctcttttgtggcacttggaactctgaggccataatatgaagaaaagaagctcatctgctagacaggccatgtggagacagaagaatacacagaagcctgactgagtcagcccaggtcagaagaaccgccctgatgacccacagaatcttgagaaataattaatcccagctattgtaagacaccaagcttgggatggtttgctaagcagcaaaaagctaactgacagaaccaggctattccttccttgtgtgttgatcttttctcaccttggctagatattcctcacctgaacacatagctgaaatggagcccctcattggagattaagtaacctccatatctgtaggaagcagaattcgcaataaacatgatgcactgggcaaaggcaaagcagaatccgtaaatattggctttctgaatggctgtcttgaagggcttctccagctcagtctcaagtgcttcaatgaaccgcctctcctttccaattccagcaacagtgcggatgttactgagggcttcatttgtaatctgaagattgaaaaagagtcttaggaatacaagggcagaaataactcctttcgtgacatttcagtggctgcctggattagatggtgcaaatggcagaatgtggtacaaatcagagaatgcatcatctgggaatacaaagacgtggctggagatcaacccaactggaccacgagacaatttttcagttaaattcaagtttcccttaattcttatacttgagaagtgtttatgctaccatccctcatttaccccccaaggacaagatattaattagaacacactttaaaatgtgtagctaaaacctaagtgtatccaaaacctaaactgtagttcataattctggttgggaaagacacttgccccaagcctgggggactctaaagtatgaagagcaaaggcatgtgccattaaaaccatcatagctcctgtgtgtgtggaaagcatggctcaggggaaccattaaattgcaaaagcttcacggccagaaaactgaactatccacccctgcaaatgagagtacaccaaattggaatgtggaatgaatcactatgcgagaggaaattgaacaggcaatcctgtgttcactccgctatttctccacactggctcatactcagagtctcggagctttattgcctcagcctttgcgccaagcacgcatagaaagggtggtggaaggttcttaagtgtgcctgtcttgtgggctgacagcttccttcagtctcttcgtactactcgtttttaacagtttgtctgatagccactcagccatgaggaatgggaaaattagatctgcaagattacctgtcccaccatctccagggcctgcttatctcgagaggcaaatcctgtcaacatcctggtctgtgtggctcctgataaagccaagaaggggaagaagcacaagatgaccaggctcagcttccagctaaaggagaaggcaatgatcatggccacagtgacgttagtgaaggaattgactatcatcccgatctgagagccggcagcctgcaaaccaaaaagcaatcaacccgtctcagacacacagtcgcttttaccaattaccattacacaaaaaggtcagaccttttataaagttgtgataaaatatacataacaatatatatcattttaaccattcttaagtgtacaattcagtggcatttcacaatgttttgtaaccatcacacatctatacctaaagcttttaaaatcatgtccaacaaaaactctgtatccattaaacaataacctccctttcttctctctcccccaagctcttggtgacttctattctaactctctgtctgtataaatttgcctaccctaggtatctctagaagtagaatcatacaatatttttccttctgtgtctggcttattttgctaagcataatgttttcaagcttcaggcatgttgtagcaggtatacaaatttcattcctttttatttttattttttgtttattttattttattttgagacaaggtctcactctgtcacccaggctggagggcagtggcataattatggctcactgtagccttgacctcctggactcaagcagccctcctgccccagcatgctaagtagctgggaccacagatgcatgccactacacctgctaattttttaatcttagtagaaatgaggtctcactatgttgcccaggctggtcttaaactcctaagctcaagtgatcctcccaccttggcctcccatagtgctgggattgcaggcacgagccatcacacctagcttcattcccttttaaaactgaatattccattgtatgtgtatatcacattttgtatatccattcatccattgatggacactggggttatttccaacttttggctattgtgaataatgctgctatgaacactggtgtataagcacctttcaagtccctgctttcaattcttttggatatagacctaggagtggaattgctgggtcatatggtagtcccctgttcaaaaagttaagttcttttaaatgattaagttcttttaaatgatgagctcacataacgtatctgaaggctgaattaattaaaaggttctttattcatagcttatccgaagttcatttattgactaatctcattttaagagtgtcagtgctagagcagtctgtctgagattaatgcagccctaaacatgggctacacatgtgtcaagtactgatgcatttggcttgtttgaagatatccagccattgggcttgaggtaatattacttattcaatgaagattaatgcttgctctataattatatttttgaagttgatacaagactattataagataccactttgattctcattgaagttagcctgctcgttggtacaaagttacatgctgctgtaatacacagctatttagtcaatgcagatggacaaaatggattcagtcccaatatagatggagaatggaccactgtggtaattatatctatactaatcagagtatccaatggttccaaatcgtcgtttcagttgcagctaggcaggtacgaccaaagcttggcacactctgtagaaaatacttgggtgaggacaattacatcacttctttttaaaattgtagaaacacatttttatttaagacaaaaaaatgtaaaacgacaaaaggtaacctgttagtaaccattcgatgctaaggcactgttattcaggaataatttgcatctttatactgaattgaagacacaaatggaatataaaattgtgtcccaaagcattcccatgtgttagtgctgacttccttggagactaacaggctaaatcaagaatttctcatttgtacacccacgttcagagcagaattaatcacaacagccaaacaacctgaatgtccacagacagatgaatgaataaagaaaacatgatatatccataaaataaacatccataaaaatgtagctctgacacatactatagcatagagaaacttcaaaaacatcatgttatgtgaaataagccagacataaaaggataaattcatatgattccacttagatgaggtacatagagtagtcaggttcatagacacagaaagtaaaatggtggttgctggggctgaggggagggagagcaggatggggagttgccgtttcaagggtacagaatttctctttggaacggtaaaacatttctagagatgaatagtggtgatggttacataacaatgtaaatgtacttaatgccattcagctgtacacttaaagatggttaaagtagtaaattttgtgttacaaatattttaccacaattttttttaaaaaagaatttttggttggcaaggactgtcaggcattacagaggacttgaaaagcaactttgcagctctttgggatgtcgttattttgtttccttttacattttattcaattggtatttttttaaaaattgaaaataatacaacctaagacacaaacaaaacatagatacatatttaacaatatatacatatattttaatttttttctttacaaaaagggctcatactctacatattactttgtactttgactttttttcacttatcaatggtacataactatccttccagatcaatatataggaacactttaaaaaatagctgtgcaatattccttagtataaatgtatcataattgattcaactctttttctgttgatggatatttgggtagtttccagggaattttattaattttttggttaatataaaaaatgataaatatccttgaacacacattcttacacaataggagggaattcactcatcagaattctgttcaaagagtatataattaaaaaagaaaaagaatttctggttggcaaggactgtcaggcattacacaatacttgaaaagcaactctaaagtttttggggggatatcattatttactattactctccaaaacatttgcttactattatttactattactctccaaaaaacattgaaaaactttgtacattgtatgaaagtgtcagttattccccatcctcatgaatatcgttcatgatggttttaggaacactacacataatatggttatattagggatattaatatttattataaatgcttttctagtttatcatttgtttatataaaagttttgaatttatgaagtccaacatgtctactttgtagttttgagtttttgtcttgcttgagagaatcacctctactaccactcttatttctcaatgagctctagctaatataataagaaaataaaatgagtataaatataaaaaaagaaaagaaaagacaaaatgatcttttttgcattttttgcttagcagatattgtgatttttactaatggaaggtttgtggcaaccctgtatatgcagagcaattctattggtgccatttttccaatggtatgtgttcattttatgtttctgcatcacattttagtaattctcaaaatattcaaactttttcattattatatctgttatggtgatctgtgatcagtgatctttggcattattattgccatcgttttagagcaccacgaaccacgccaatataagactgaaaacttattcaataaatgtgtttgttctgactgctccactgactggtcattctgtctctctctctttctatcctcagacctccctattacctgagacacaataatattgaaattaggccaactaataacgctaccttggcctctaagtgttcaagtgaaataaagtcacacatctctcactttaaatcaaaagctagaaatgactaagctcagtgaggaaggtgtgttgaaggctgagataggctaaaagttaggcctcattttagcctcatttagtcctgagataggactaaataaatagtcaagctgtgaatgcagaaaaaaaaagttcttgaaggaaattaaaagtgctattctagtgaacacacaaataataagaaagtgaagtgaaccagctttattgatgatatgaagaaagtttgaatggtctggagacaagatcaaacctgctacaacattgccttaagccaaacctaattcagaacaaggccctaactctcttcaattctagtaaggctgagagaagtgaggaagctttgggagaaaagttgctttatgaggtttaaggaaaaaagcatctccacaatgtaaaagtgcaaggtgaagcagcagtgctaatgtagaagctgccacaagttctccagaagatctagctaaggtcattgataaaggtggctacaccaaataacatattttccgtgttgaccaaacagctttctattggaggaagatgccatctaggactttcatatctagagaggagaagtcaatgcctgacttcaaacttacgaaaaataggctgactctcttgttaggggataatgcagctgatgactttaagttgaagcttaccattccaaaaattctaggcccctaagaggcatgctaaatctcctctgcctatgttctataaatagaataataaaggctggatgacagcacatctgttgaaaacacagttttttgaatattttaagccactgttgacacctactgttcaggaaaaaatacagctttcaaaaatattagtgctcattgacaacgcacctagtcacccaggtgctctgacggagatgtacaaggagatgaatgttgttgtgcttgttaacccaacatgaattctgctgcccatgggtcagggagtaattttcactttgaagtctttttatttaagaagtaacattttacaaggctacatctgccatagttattcctctgagggaactgggcaaagtaaattgaaaaccctctggaaaggattcaccattctagatgccattaagaacatgtaccctagaacttacagtgtatatatagatatacactttatatgtatatatatatttatgaaagaacatttgtgattcatgggaggaggtcagaatatccacataaataggtgcttgaaagaagttgattccaaccctcacagatgactttgagagttcaagacttcagagggagtaactgcagatgtcatgaaaatagcaagataactagaattagaagtggagtctgaagatgtgctgcattaaattgctgcaatctcatgataaaacttgaatggataagcagttgcttcttatggataagcaaactggtttcttgagatgaaatccactcctggtgaaaatgctatgttaataaaagtagcagcagggtttaagagaactcaatccaattttgaaagacattctactgtgggtaaaatactatcaatcagcattacatgctacaaataaatctttcatgagaggaagagtcaattgatgaggcaaacttcacagttgtcttataagatattgccagtctaaccttcagcaaccaccaccgtggtcagtcagttgctattaataaattaagatatgtacattgtttatttttagacataaagctattgcatagttagtagaatacagtatagtgtaaacacaacttttatatgcactaggaagtgaaaaaattagtgtgacatgctttattgcaatattctctttattgcggtggtctgaaaccaaacctgtaatatttcagaactatatctggtattttattatatacctagaaaacccagtagactattaaatttctaaaattataacttataagagagcttggaaagtccttaagataagtatacaaaaactaacagctttcatctcaactcatttacagatataattgagaaaaagatctcattcaaaatagtggaaaaaatacatgagaaaaagtgagcaagatagtgggacatataactatgaatcttgctaaaaactagagtcttgtttgtatgtctctcaggaaaatttagtatccccacaatagcaatcctactgtgtatgtatgtgtgcatatgaatttcaccagaataaaaataaatttttagaagaagttaaaatgagtgtaaaatgtattaaaataattaacatccagaaatagataagagaatttcgaagaggaaaaattagtgtgcagggatttgccttaccagatactaaaatgtatcaagttataagaattaaaacaaagggtgcaaaaaaaaaaatagaaagaattaataagacatactatttgatagcacaatagaatgactataataaataatttaattgtacacttaaaaataactaagagtgtaattggattgtttgtaacacaaaggataagtgcttgagggaatggatacctcattcttcataatgcacttacttcacattgcatgcttgtatcaaaacctctcatgtaccccataaatatatacacctacttggtatctatctacaaaaattaaaaaaaattatcaactaaaacaataaggttttaaatagaataagtcaaattgatcaattcagactagagaatctccaaagttagttctaagtatatatgggaagttaatattcacaatgggaggaaacatttcaaaccagtagaaaatgtaatctatatttaaaaaatatttttgaaatattttctatccaacttcaagaaaacaaagccaaatctacctcacactaatcttaagataagtttgacctgggctagcaatcttattttttaaaaaacaacaaaagtattagaaaaattctgagaaaatcctctttttaaaaagataagtgtttttaagataattagatgctactctctgaattctagtgatagcaaataaccttcaaaagctccttgcagattgaaggccacaaaaatagaagagataagattatgacttatttatttagcctaaattcaagagtaaagggagtagactacagtactccaatgatgagagtgaaattggaacaaagtttctttaagcagttatgcaatgcatatcaaaatcttccaaaatgattatacactgattgagtgattacattttgagaactaagaaaataatcaaggatgtggcaagctcgatataaaatgatataaattgcttataaggaggagaaaaacctaggggaaaaacgtaactagagaatcctttaagacatgacagtagatgagaatgaagtattgtgcactcattaaaaatctactgtagaagaatacataattatgaaaatatgttcaccttagattatttcaggggaaacaagaaagactgcaacacatatgtagagtgtaaccctaagtctatgggaaacacatgtgcttccagaaaaagcctagatgaattgaaagtggcctatttatagggatttccccctaagtgaaaggattccatgatccgttgaaattctgccatatcatttttggtatttttggttaaactgtctaggagttgagactacagtacagcactatcagtccagtgagttttttcttctaagagcctcacagaccatagttcagttttaaaattgtacttaaaatttttttcctttggttttgttttttaaagaatttattaacatattatttctttttaaaaataattttaaattagggttttttaaaaaattttcacagaaagtgggtagagatgttggaagggcaatttggctctcttcactttaatccaaacacctggttttgtaaaagtctagcctcatcatatgtgtaagccccttgaacaaggctgtaggttttggggtttacacaccacagctctgtctaccttaatcagaaagtcagctcttcgacgccttcaagattctagataaaaatcgtttatttctttccctcagtttcctgactgggctcctccagaggctgcccaggacagcttctctgttcataaggctaaaccacactctggggtcctgtgtgagtaaggagacttccttgccctgttcacccaccccctggggggcagtattgaatcttgttgaagctgagtctctgggcctgaaaacagactcagaaatgttcctaagttagactcagaggaaatccaaaaccctgacagattttggtgcatgccatatattgattctgggcactgcctgggagacactgtgctttagctgctgtttgtcagtgttagaagcagtggaaaatgtggctttaggatatcccaatcccactggtccctattccatagaaaacatgcaggtgattgtcagaatgctctaatgaaagaatgccaatgcagttaatatacttctatttcccctcccatagctcaccccttgaacttgggaagcatctgtagcaagtcttgttgtcaatgctccagggctatttctgaggtcatcaaaccaggcaatatcttgccccagcattgccctgaaaccaaatttacgtagcctttttgttaggagctccccagatttagcaaaggcatatccctaaaacatgaagagggagatgttagagaaattttaatgagaaaaaaggaaaaataactaaatcacttactgaaaaataacatttcttacctgtagaaattgggtgaaaagagatacacagcccattgctacaaaaagtaggcacacaccattgatctgtgacctttgttcctctttatcaggaattgaaaaagtcttggaaagatagtaaacaagaaagtaactttattataaatagaaaaataaatctatttacatgtttaaaatgaatttttcttaccatgtcattatatatctgtccaaattcataaaatatacaacaccaagagtgaaccctaatgtaagctgtggatctgtgataatgatgtgtcaatgtatgttcattaattgtaggaaatgtatcattctggtgggagatgttgataatgggggaggttatgcgtgtagggtggtagggggtatatgggaaatctctgtaccttcctctaattttgctgtaaacctaaaagtgctctaaaaaataaagtcttttaaataatggttccactttaaacatgctagtaattaaacgaaagttagctaagaatatgatgacgatgtactacagtcctctgtggggcggaaaacctggtgaatgaaaaccaatggtgatgacttacagaatttttgtcttgttattttgcctttttaggcaattgtgttggtttttcatcaacacagatgaaaaggatgataaaatgattaaaacatttaagtaataaaactgagaaagaaggaagaaaggaaggaaggaaaggaaggagggacagaagaaggaagagaggacggaagggaagaaggaagaaaggaagcaaagagggagggaaggagagagggagttatgaaggaaaaagggaaggaagggagggagggagggaatcgagatctggaaatgttgtctgggacaaaactcaaagttgtattaatattttgaccgatatctttctctattactaaatgaaagaaaatatgactttcactcaggtaatttgccggttaattagttttatagactatacagcattaaaaaagaaactatcaaagcattgactggaattgccttaggagagaaaaaaatttcattcatctgatattgaggttgttgcctctaactcaccagaagctgaaacattcccccaccccctaaaaaactacggccattgtgagtgggagtttttagtgtataatgcttagtaaactacactcaaacgtattctgaatttacagacatctgttcaagtaactgaggatcttgttacaataagaaaaatgaaagaacatactccaatgacattgccttgtggtgaaatggattttgtgcataacagaacctttgtaatttaggccaggtgagggaactgggaaggtcagaagtatgcattagagagctatacaatacatctttattcattttcctgaattaatttgagtcattaaaacagtgtcaacaaatagttgttcaaaggagaccatttattcaaaaatatttactaagtagctattatttgccaaataaatctccttggaaacaatatgtgctactccattaacaaatccttttttttgtaaagcaaaagtaacccgttcaaattatggcaaattacaaagtgagtaggaggggttctaaattaatgagattttactgtttgtaggatgaagtttctagggccttcatggtgctcaatactggtaaaagtgggttcagaaagtagcacagtaattcttcccagcatagcataactcgtaagtttacagagtctaaaaattcaaaaatttaaagataaatatttttaaaattactgtgcaaataccctgaaaccccaaactgcgatgccacaattcccattcctccttaaggtcaccttttataatgatggtctatagaacagcagattttcccatttaactcttatagatggaaaataaagccccaaacatcaagttgtttgttcaagttcattaagctagtggttattactagataagaaaatgcctgttttttggcttctggtgcagtggttttctattgggtatgctcttttagctttttgtattacttaccttctcagtgttaaaaaaagaaagagcatttagctaatgttaaaattcatacaactgtccaattcaaggttgggcatctctctatccataatcttttttcacaaaattctgctccacgagttctttgtatattcttattgttgaaatgcaactccaagggctatccatccatagattcctctgttcctttactagttgtagttttggcacacatctttgctatttttgtaatggtaagtttgttgaaggagaaaactaacattcattaaccttttgctatgtgccacatgtcaaatgcgtagattaacctgctgtaacttaaattaggaattatgattctcaaaacaacccagtgaggtagattttcttgctccttatacagatgaggaaatttatcaaggataaatcactcacctaaatatatacagatagtacagagtagagacctactacaaatccagagctggcgactctcacatccatttttttttttccccagcatgctacatcccaagtgctgtgcttggaacattggcacattttccaagtcaaatggacacagggaaagtgaagcagacaaattacgccttacatgtatattgaggcttagctagattggcaactgggctcctaataaggcccaatcatttgctgggtccattcccacagtgtggtctcaatacaacaaatgtgcatattgtgccctttaggtatgtcagaaggaaaatagagcaactataaatagactcacaattataccctgtgagaagaaagcatcatgagtttactaatgaacacatgataattatgcaaagagacaacctactctaccagagaggaaaaatagtggtttgttcggcatcattctcttagcaaatataaccctgtgagaacaagaacgacgagtagactttggatttcatcacctagatgctgcctactctggtcctgcagcccttaagtctctaagtccatcttaaggtttctggttgtcaccagaagaaacacagagaatattgtcaccaccaatgaccaagcaggtgctcaagaaggacagcaattatagttgaatctctttttttttttaacttagccatttcatggaccactagagctggaagatatcttagagatcatcttttaaatcctgcattttgtaggaaatggagaccgggagaagaggtatgacatgatcccagggcacacaggatgtggtaagtaactagaagagccagtttcagaagaaagatctcctgacaggaaagtcagaactctccacagcagctcatatgcacagtttaggtggagatgggtgaggatattctttactctgcttttataagaggtaaagaaataatcagcaaagaagctgacattttggatttcttttaaaaagcaaacatccaggacacaggcttggattctttctgatccaaccctattccctacaccttctacactaacatcattgcccagtgaaatgcacttccccagcttctccctactagaatgtcagctttgtgcaagcaacacacaaacacacaatgattttcttgtcctccactctatgcccaacattagttacaatgcctggaaaactataggtggtaaatatctgttgaatgatgagtgggtttttttttgttgatgttatcttcctcacagactgaaaactccactagggaaagcatcataaccgatatgcattccccagtccacagcaccatgtctggggaagacaatcaatacagatctgtcgagggaataaaagatgattcattttatatttggatattgtacctactaggaaatcaagaaatataaattatttcaaagattttcagcataaaagtttatggcaccatataactagaaattcagttaatcaaagttgagtgtttccgattctctacctttctgaaattaatgtgatttcttcacttaccacaagggggcaatgcgaaaactacagtggtggctggggccctccttacacgatggacttgattttgtttgtggattatccaggtttttctgtacaactcatgcttgtggggtcatttttacggtcaggagaggtgatgtgagagaaagaaatggagtagggaactaaaatgtaagcttttatcatttaataagctctgacaatgtgatatgttggcaaattctatagactaggattcggtaaacctgggccctagtcctggccccatcaccttgtacaagttgacagttctaggtttccttccttgtggacctcaaaggatttatgtgtatatatgtgtgtgtgaatttcagccaagaaaacatgatcacatttttttaaactgcttttttaaaattaactttttaaaatttttgtatatttagggggtacaagcacagatttcttacatgcatattgaagtctgggcttttagtgcacccatcacctgaatagtgaacattgtacccaataggcaatttttcaaccttcatctccctcccatcctcccaacttttggagtctttagtgtctattattccaccctgtatgtctatgtttacccattgtttagctctcacttttaagtgagaacatgtggcatctgattttttgtttctgaattttttcacttagggtaatgtcctccagttctgtccatgttgctgcaaaagacatgatttcatcctttttatggctgagtagtattccatggtatatcgtattttctttatccaatcctctgttgataaaaatttagattgattctgtgtctttgctattgtgaatagtgtgacaataaacatatgagtgcaggtatctttttgacataatgacttctttccctttgtatatgcccatatgatggctaatactgagtgacaacttgattgaagaatacaaagtattgatcccctgggtgagtctgtgagggtgtcgacaaaggagattaacatttgaatcagcagtatggggaaggcagacccacccttaatctggtgggcacaatttaatcagctctcagtgaatataaagcaagaagaaaaaaatgtaaacgagcaagactggcctagcctcccagcctacatctttctctcctgctgtattcttcctgccctcaaacatcaaactcaaagttcttcagtttttagactcagactggccttccttgcccctcaagcttgcagacagcctattgtgggaccttgtgatcatgtgtaagttaatacttaataaactcctatatatatataaaatgatatatatcctattactcccatatatatatatacacacacacacacacacacacacacacaaaataggatatatatcctataaacgcctataaatatgtatatatatgtgtatatgtgtgtgtgtatacatatatggatatatatcctattagttctgtccctctagagaacgctgtccctaatacagcccagtagtgggattactggatgaaatggtagttccatatttagttctttgagaaatctccattctgttttccataaaggttgtactaatttacattctcaccagcagtatataagcattcttttttctccacatctttgctaacatctgttgtttttatactttttaaagatagctgttctgactgttgtaaaatggtatctctttgtggttttaatttacatgtctatgatgattagtgatgttgagcatttttttaatgtttgttggctgcttgtatgtcttcttttgaaaaatatctgctcatgtccttcacctaccttttaatgaaattatttggttgttgcttgagttgagttccctatagattctgaatattagccctttgttggatgtaatgtttgtaaatattttctccaattgtgtaagttgtttgtttactctgttgactgcttcttttgctgtgcaaaagctttttagcttaatttattcccatttgtctatttttgttttggttgtgtttgcttttgaggactttgaattaaattctttgcctaagcaaatgtccagaagagtttttcctaggttttcttctagtatttttatagtttcaggtctatgtttaggtgttctatctatcttgtgttaattttgtaagtggtgagaggtatgggtctaatttctttcttctgcatactgctatccaatttttccagcaccttttattgagtagggtgtcacttcttcaatgaatatttttgttgactttttcaaagataacttggttttaggtatgtggctttgtttctgggttctctattctgttccattgatctatgtgtctatttgtataccttggtagaataatttagtcagccaaataatatgatacctttagctttgttccttttgcttaggattgctttggctattagggctcttttttttagttccatgtgaattttaaaattgtttttttctaattctgtgaaaaatgacattggtaatttgatagtgattgcattgaatcagtggattggtttgggaagtatggtcattttaatgttattaattcttccaatccatgagcatgggatgtttttccttttgtttgtggcatctatgatttcttttatcagtgttttgtggtcctccttagggagatctttcacctctttgcttaaatatattcctaagtattttttttgtagctattgtaaatgggattaacttcatgatttggccctcaactagatcaatattggtgtatagaaacactattgatttctgtaaattaattttgtatcctgaaagtttactgaattcacttactaaatttaagagtttttggtgaagtctttagggtattctataaataatatgatttcatcagtaaacagggataatttggcttcctcttttctaatttgcatgccttttattttttttctcttgcctgattgctctggcaaggacttccagtactatgttaaataagagtggtgaaaattggcatccttatcttgtcccagttcttagaattctttcaacttttccccattaagtatgatatttgctgttggtttgtatggcttttattatgtcgaagtatgttccttctatgcctagtttattgagaatatttatcaagaagggatgatgaattttgttgaatgttttttctgcatctattgaaatgataattttttcccttaatattgtttatgtgatatatcatgtttattgctttgcatatgttgaaccatccttgcatgccttgtataaatcccacctgatcatggtgtgttatctttttgatgtgctcttggattcagttattttgttaaggatttttacatctatgttcatcagagatattggtctgtagttttctgtttttgtgatgtcctagtctggttttggtatcaggtgatattggccttgtagaatgagttagggagaattccctcctctgatttctaaaatagtttcaggaggattggtattagctctctgcctgtttggtagaattcagctatgaatccttctggtcctgggcttttatttttttttgttaggaaattttttattactgactcagtcttgctactcattattagtctgttcaggttttctatttcttcctgatttaatcttggtaggttgcacgcttccaggaatttatctatttcctctaagttttccagtgtaggttttcataatagtctgtgataatcttttgtatttctgtggtatctgttataatatcttctttttcatttttgattgagtttatttggattttctctctttttgattagctagcagtttatcaattttatcttttcaaagaaacaattttttgtttcattgctcctttgtttttttttttttgtttgtttctattttgtatagttctgctctggtctttgttatttcttttcttttgctaactttgggtttggtttgttctttttctagtttcttgaagtgcaatgatagattgttaatttgtgatctttctacttttttatgtaggcatttaatgctatcaacttccctcttagcactgcttttgctgtatctcacaggttttggtatgttgtgttttcattttcattcatttcaaaaaattttctaatttccatcttaatttcttcattgacccagtgattattcaagagtatgctgtttaatttccatgtatttgtatagtttccaaacttcttcttagtattgatttctagttttatttcactgtggcctgagaagatacttgatatggcttcagtttttaaaaaattcattaagacttgttttgtggcctaatatctgatctatcttgcaaaatgttccatatcctgaggaaaagactgtacattctgtagttgttgggtagaatgttctgtaaatgtctgttaagtttgatataaaatccagtttatgtccaatgtttgtttgctgattttctgacatgatgatctggctagtgtgtgagtggcatgttaaattcccccactattattgcattgccctatctttctttagttttgcttatatttgttttgtgaatttgggtgctctgatgttgagttcatatatatttagaattgttataacgttttgttgaatttatcattacataattatcttgtctttttttttttttactatttttgatttaaagtgttttatctgatataagtgtggctacttttgctcaactttggtttccatttgcatggaatatctttttacgccccattactctcagtctatatgtgtctttataggtaaggtgagtttcttatagtcagcatttagttggattatttttttaatccattcttccaatatgtatttaatagtggacatttaatccatttacatttgtgaaaggaaaatatgggcccccaaaatcactaagctaaagagaaaagtcaaatcgggaactgcttagggcaaacctgcgtcccattctattcaaagtcacccctttgctcactgagataaagggatgcctgattgcctcctttggagaggctaatcagaagctcaaaagaatgtaaccatttgtctcttatctacctatgacctggaagacccctctctgctttggcttgtcctgcctttccagaccaaaccaatgttcaccttacatatgttgattgatgtctcgtgtctccctaaaatgtatacaaccaaactgtgctctgactgccttgggcacatgttgtcaggacttccagaggctgtgtcatgggtgcacatcctcaaccttggcaaaataaactttctaaattaactgggacctgtctcagatttttgggagtcacacattcaaggttaatattgatatgtgaggctttgttcctgtcatattgctgattgttttcaagttattttataaattgtttccctctttttctgttttttttgtctttgtagtttgatgaaattctgttatgccattttatttttttctcttcttccttgtgtgattattttatatgaactgtgagttttatatttcaatgtgttgttgtgatggtgagcaatgaccttttgtttccatgtttaagacccctttgagcatttcctgtaggtccaatctagtggtgataatttttctaaatgtttccttgtctgggaagaactttatctctccttcacttatgaagcttattctggcaggacacaaaattcttggctgacagttttttttttcctttcagcactttgaaaatgccatctctttctcttctggcctgtaaggtttctgctgaaaagtctgctattagtctgatggggtttcctttatagatgagtagatgctttactcttgctaatttaaaaattctttcttttactttgactttagacattctgaacataatatataatggtgaattcctttttgtaatgtgtttgcctggggaatcactggacttctgaactggttgtctaacagtcttgacagacttgggaggttgttattgatgattttttaaaatatgttttctaaaccttttgatctctcttccctttcaggatactgataattcataagttcagttgctttatttagtccatgttcagtccctttacttagtcctagacatctcaaaggctttgttcattctttttattcttttttccttatttttgtctgactggattatttcaaaagacatgtgttcaagttctgaaattcttatctctgcttggtctagtatatgatttaagctttaaagtgtatgttgtatttccttcaatgaatttttgagttccagaatttctgcttatttttttaaaatgctatttatctccttggtaaatttctcattcatatcctgaattgatttctgatttctttgtattggttttcagatttctcttgcattttactatctttaaaaatcaatattttaaattatttacccggcatttcaagaaattctttttcattggtatctctattaaactgttctcacactgctattcctgacactgggtaatttatgaagaaaagaggtttaattgactcacagttccacatggctgaggagatctcaaaaaacttacaatcacggtggaaagaacagaggaagcaagcagatcttcatatgaccaaagcaggaggaagaaagagtgaagggggaagcgctacacacttttatcagattttgtgagaacttactcactattatgagaacagcaagggggaaatctcctcccatgatctagtcaccttccaccagttcccttcttcaacatgtggggattacagtttgacacgagatttgggtggggacacagagccaaaccatatcattccgcccctgacccctccaaaaactcatgtccttcttacatttcaaaacacagtcatgccttctcaacagtcccctaagtcttaactcatttaagcattaactcaaaagtctaagtccaaagtctcatatgagacaaggcaagtcccttacaactatgagcctgtaaaatcaaaaataagtttgttacttcccagataaaatgggggtacaagcattgggtaaatccttctgttctaaaagggagaaattggccaaaacaaaggtgctccaggccacatgcaggtccaaaacccagcatggcagtcgttaaatcttaaagctccaaaataatcttttttgacaccttgtctcacatccaggccacactgatgctgagattgagtaatttatgaagaaaaaaggtttaattggttcacagttccacatggctgaggaggtctcaggaaacttacaatcatggcagaaggtgaaggggaagcaaggcatgtcttcacatggccaaaccaggaggaagagagagcgaaaggggaagactacaaagttttaaacaaccagatctcgtgagaactcactcactatcacaagaatagcaagggggaaatccacccacccatgatccaattacctcccaccaggttcttccttcaacatgtggggattacaatttggcatgagatttgggtggggacacaaagccacaccattattggttgctggacacttgttgtggtcctttggtggtgtcatatttccatgctttttcatgtttcctatgttcttccattgatatctgtatatctgatgtatcagttgcttgttccaatttttgaatttgcttttgtaggggagatttttaaaaaatactttggctttgattttgggttcatgcagtagtgtgatctttgtatgatactactctgagtctgttcatgactcagtctcaacagtagaccacaacagcatggcagggatcctcccgggggtgatgggattatctagtctcccctctctctccttgaagcagtgcagaggcagtgcatgtttgtatattcctggtatctaggccctcaaaatgatgcctgacagaggctgctccaggattggatgcctgtgtgattctgtgtgggtttcccttttggagtaacatctccgtggaatctttaggcagctcttcatgtcagggaaaaggccctagtgggtcaaggatttaccccatagccaagattgtgaaagcccattttggagccctggatgtttctctcttactgtttgcccatatccaaaagcctcttgtggctctcaggcagtccccaactgggtaagctgccttagatcctctcctttcttatttctggtgcttcccatcccttgtttgatgaatcctaatgttctagcccagataatctgttccaaatgtaagtatctacctactattctgattcctcttcatggagaaggcacatactacctgcatctagtcagctgtctttcagtactgtttccatgatcaaattttgataactaatcttgcaatgacaagattttactagaacctggctctacagttacactggctggatttgaatcccaactccaccacttgctagcctaagctctctgtgccttggtttgctcctttgtaaaatagaaataacaagaatacctaccttagacggttgttagtaaacttaaatgaactattgtacataaaatgcttagatattgcctgatacatgttcatagttattatgatgattacagcaatcaagtcagatagagaacataagaaattctaggaagtgaaaaattggaataagcttagttttcaatcatgccttattttacttctgtctttctttttctgcttcctatccacattactatttcaatagtgcaatccgtggagaattatacatcaaacactaacacctgctatataagtcaaactttgtacctctgctgttcagcaagatcaaaatttccctaaaagccttttgtattattcagtgaatccactttgcattttgattaggtttgatatacattactagaaaaattgcccacttctaacacaaaattttcagtgacagtaccattttcttttttataggtacaatgactgtctgagtgccctgcgagcccaaatgagagttctcagctttgccttcttaccctctgtgtgatggaggcttaggaaatttttcattctttagagatgagaaaaatgaactaacagaaaagagctaaatacatgaaaacaaagagcggacttatcaaaataataaaataaaaggtatgagaagaagaaagctagtccagctgtgtacttaccccaagaatctggctgaataaaaaggcatacaagggtgtgactgtcccgttcacagctgcacccacagaccctaccagcatgtagggccattctggagcactgaatttcagaatcctcctaactggggcaggttcaacttcttcctgcacaggaatgtccttgtccttgagcagagagagggttatattaatcatctaaatgtactcaagacattttgcagcagatcctttggcattcacagatttaagagtcatagtttgattagttatgagtgacctcaaatgtctatgggatatggttgtttgttattttttgaggaatcgttttgaacaaaactattgctgtggcttgaataaaaactgaactgagggaatacgcatttgaaggtgagcttatagttcttatttcatgattacatgtgtattaactctcagagagtaataaatatgttggatcttggagaaaaataactcccattaaaaaaagaaaacctttgctacggttgtatttataccggtgaggactggtgaaattttcaattttttaaaataaatgtcaaggttctataatatagtaactggctaaagctgtaaggtaggccagtatatatgaaataagacaaaataatttttaaaatacattaagtggtgtcaacagttatcattgagatgttttcagtaaggttttccttaatcagtacccagaggtaagtagtactgcatttggatttctaaattgcacattttcatcacacagagtggacattaatcagcatttctctttagttgccattaagtcagagctagcagttttttatcttctcaaaggcaaatattatacatggacctccgttgtcttttttggccatcgtttttccttgctatggatactactcaagtttggtcttaagcgtaattaattcattaatttgttaaatttattacccactttgagaaaggattttaggtagcttatatagatttgtattgatttttaaaagcttttctattgacatttaccaaaaatatatacagcaaatcgactataaagcttaattagtgctctctttcattaacacagtaatttatcttttagggagcaggatggcagggatagacaacagcaaggatcttcaaaaattttccctttgcttacaaagtcaaagaccacattcattttaaatgaaagtctgtgtcatgtccatttcattacagttgcaagtcaaataaaatgagggaaggcaacttggactggtgatgaatttggtactacctccacttcaagttctctcttggcctgctctcaccatttgtactttgtcattactgctcactcatgcagcaggtccttctgttcaattatttcacctgtgacagcttactagctctaggcaacctatgccagaaaggaataagggtacctgggaaagcatgagtgtaataggcatagaaaaaatggagctcttggaaaagcccaacgtggccacccgtaaagtgtattactaagtgctctagctctctggacctcagttatttcatccttaaaacgagagacttggactaagtaattctggggaaacaatctctctgagtctcccatgtttatgcacatcttgtgaacagaggcattgattaccttcattcgggttattttttcaagggtatttgtatagcaaacagttttggaggacaaagaagatgtcttcatcccaagtgaagtgcaaaccttactgcccccatctgcccattatgaaagagtcaggctcctcaagcccaggtttcctctcgtttaaaacacccacttcatttgttggtatcatctggccctctttgcattgccttgtgggaactgggggttgggttggggagccagtgcaaatgctgaacactggctactgctattgctatgaataataaagtcctttgtctctggttcagggtactcgtgtgacagagcaagactgcatctccaaaaaaaaaaaaaaaaaaaaaaaaacccgaatatgaacactgtgattcaggatgctcatgtattctgccagcatcatgaaattgtgtgagactaactgaatgcttgcaatagagcaaaatatttcaccccttctctgttctagagagtggttggtatccagatctggatgctctcagattcatgtgggttgatgattaaaaaaccagattcctgtatcctgtcacgagaattccaatttagtaggcctaactgtgaatctctgtcttaaaaaatactcatcaggtaattctggtaaccaaagttcagtatgtgagaactccaaggctcctctcaccactaaatggctaggattctataatgtatgttttagatgtgtcagctgtgctgtacgtaccatcaaagggtaggctttggaacttgtgaagactattagcactcactaaattctgccagcttccttgtgacattaaataccagcattttctggaacgattgccccacaggatggtccacccacagcctgacatgatagaaattttcccaaccttctgatacctgaagttatccttaactctaaacaacaacacttaggacatttcaaagcgatacaaagtaattcttgtctagtggttttcattccaagagacactaacaagaaatacgaattaattaaaataattttctttggttcctctatactaaaagtttgactttaaagtttgacccccccgaaaaaatgcaactgtccagcttgaatgatgcaaaaactagaaaatctgtccctaaatattggactttttattgcattttatttgatatctccactaaaagaacaggagaggaataaaagaaaacaatacaaaaaataattaaagtcattctgtaaagaaatatttttctctctgattttgcaaaattaaacataaagagaagattataaattaacaacaaatctcacagacaggtaaaattataaaatttatatgtgtttccttgtacttctattgtagcactggcaggttgcacagcacttttaaaaaaaatcatatgtaaagaaatgcctgtcagcagctccatagtagggagagtaacaatagctcttgttcatttttgcatccccagtgtgatacctggcacttcacagtgtacaatcgatgtttatgggataaaagaatgaatgaaacttttatgtccatgctgcatacatgcaacaagagatttatttaaaattgctcatctactatgatgcattcatagttcaatgctagacactgggcttttctgtttcctttcttacatcttctgtgtaggccagaggaaaaataacctccgacttaaatcttaggtcttgctttctatactttgttacactaatttctgccttccattcagtagaggttccctgccctaataataactttaagatttgatgataaaaagtggtaactatgacaaaggagcagagatttttcaaatgaactaatactgatagccatttttatgggtcccatctctgtcttatcttaaccaatgcctaaatcctatcacataagttatctgtgatgcagttatgggtgtctaatatttgatcctgacttgatctcatacatgttctgccttgtgttttagtttcaccaaaagagattgcctaaatattagagactaaaacctttagcctgtgggtttccctaatcctaaacttaatgttgtcaacattgtaactaacatctgaccccgtttacaggagctaagagtactgcttggagagcaaggataaatgggtatagtctcatctctgtcaccaactaaccatgagaccttgggtgaaagcacagacttctcaggaaatggttctaagttttagagtcaatactccacaagaccacaaggtggcgataactcctttgtgtgaatcgacctttagcaccgtaagagagtatttcccaatctacagaaagtaaggttaggccttttccatcaacatgagaaaaagaaaggatttcaccaatgcttgggcttgtggaatttagttaagtattaaaatactttaaaataccaaaacagagcaacattttaccatataatgttacttgagattagaaatttcataagtcaaattttattaacccttttccattattttcttttcaaaaatcattaattttttaaacctaaaggactaacaaaattatcgtacaaaccagtggtattattatgagaccttttccccttggagctttagtataatcacattggctctcctatcattttttctctcttcttcctttctatctcccttaactagagagaacgtaaagtcacatcttttaaaacgtatgctggcctacatataactgagtttaattgttctattctaaatgtataatgctgactagtagaacataatatgaaacattttaatctctgtaaaactagaccgtatattagatttagatttccttttagttaaatggttccctcctgaattgttcctgcatcaagagaactctatgggaatctgatctccagatgtccagggaatctgatggtcccctacacctacgctaggtcctctaccagcttgaacaacaacaatgaaaaagtcagattttccttccctccctcccttctttccatcctttcttacttttacttttattgtcaaatatctacccagaaactagaaaaaattaaaatgcaaaaattaaatatgattggtattgttatggttcaatagaaatgtcaatgtagtgtttggttctttctcccctgaagctctattaaactcctgctcttatataatacatcttatagttatctgggacagcaccatggactcaatgaaatagctatttctagaactagaagagaggttgagtctttagtggcaggatgcagtaagaaactatgcttgctaaatgtgttttctctcactgtgattcatcctgctgctcctgagaaaaagtcttccatggaatttatttaaagcctgtgttagaaattgagacctctgtttattcagtattaatacattaaaaacaaaagagaacccaatcactcccttgtcattttcatacggtcataaagagtactctactttattccaaatttgtccattatgaatcaatgtttgtaattactgcctagtggattcacgtgttggaattttatttaagacaatttgaaattatatcatgcataatggatgtgcttgtaatttaaaaattctctgacttatttgctttgataaatcttgcagttggggttttattttattgtagaaattcatgttttcattctaatttttaaaatctcctgatgccttactaagtgcaaggcactgggttaggtaaccaagttgattcaaacacaaataaggtgtatcactaactttcagaggcttataatttagaaaggggataagtcaacatgactttgattaaggctcaataagaaaattgccatgaaaattttctaacgaagggtggtaggggaatgaacgtaaaagtatcagggctgacatgtaacgtgcagtaatgaggaaaggcttggaggagaatgggtggtctgtttatgtgaaaattagacaatgtctacaacagcaggacacctgcatccttaggaagaaattgtgtattgctatacatgttgtttgctttcctagctctttaattttatgctaccttgaattatgttaaaattgatagtattattttaaatgtatcttaaaaccattataaaaattgtatgaaatcaacaaatgtctgtgaaacctaattggcctccattaattcaaatattttgataacttgtaataagggctagcctattcaaacacttttgttgatcaaggtatttttgccaaaattattgtaatttaagaaagaaattttaaaatttgagaaaaaagctttcaggtattcttaacaacttttataaaaggatttctacatatgagcaaataatctgctaaatatctagaattcacacattctgtgtttgttagaatagtttgtctaagacaattaaccctccgaagtccagttttcattaccttgtattcttaaaaataatcaattaactaatctgcattaaaaatattgtgtaaaacttagagttttcattaggtcttaatgctctgtcttttagtctgacttgaaacactgctagatatatacctagaaaactcatattctcaggcttaaagggtacccaacagtccccaggagagacttcttccattcccccccataagcagttggtgcctgacctttctatcttcttcataggtagacttatgatctacaacagctaatggaggttcgtgcaccaggtaagaaagctgagacttggagcgttgccggatggaagccctgtaaataaacagaaagatgaaacagtgtagactgtggccagattggagcaggatcaactggtgtccaagtttacatttcatatgtcaaataaatagaaatgtttggtaggtcacatggtaaccaggaaagggagcttgcaggttaggtttgacagagctaatcttagggcagagctaatcaggttgattgctctgggccctaaactcttgcaagtgttggacccagattcagagtgtagtcagggagggagaaagagaaagggagcaaagctgtcctaccagttcatcaaaaaaccacctaaggctcaaatactttccaaacccacatggttctgctaattgctgccttggcaacagtctatttcctttactttccttctggcttagattgtggtcttgatatctttctctcatacctgatgtgttcactttagcatggttacaaatgatatgaggaaatagggcctctgatgagattttctccaggctatatactaccctgcattcagacatgcatgaatgagtatcttgttgaaatataatttagctcaatgtgttcattcatttattcattaattcaacagaagcttattgggcatctacaacttacaaaccaatgccaggtgatgttggggacacaaagactagccaataacagatttctccttcaaaaaatttaaaccttatagaagaggcctgtaccacaccctaaggtaaagaagaatgtggtaagtgctattaggcaggtttgaataaagagtatggaaagtcaaaggaaaaagaaatgtatggcaggtgttaccaaggcaagattcatggatgagatggctaaggtaggatatggggatttgtagactatagaaaagagcatttctgactgagagaatgtataaacataagcatggagacaggggaggacagggttgcttgctgaatatactgagtacatgacaagcatgggaagtgattggttcagactccaccctcctcttccctcccccagactcctgggaaggaggcccccattctcctctaggttaatcttaaagtatttagtgctgggagctgttgacaattatgttgagaccttcaaaaaaagaagctttctgaaaaatgaagccaacagtgaaatagtagagctgagaaaggaagagagagaaactattttctagcttggacatatcactgaagctctagccttgcctgaagccaaagcatctttggaatatttagttatatgagctgattctgtctctctaaaggtaaatccaagttgggttaggttttcagtcatttgtaaacagtcttaatggttaagaggcaatgctgaagactgtgttttagaaagaatcacctgaagtaaatggtgtaaagagagagatgtgagtgatgaggagacctgcatcaactgttttagtgccatctagatgaatccattcacatatctttctctaccattttgcatccaagtgaaatttcaccaaaacaaatatcaaggtggtgcctgcctactatatgctcatctagccttccagagaaggcagtaatgtatcaactgagttgctccaatttgttcccattttctgttaatggcacttccatcctcttagtcacccaggttcaacaccatgcagtttcctcaagccctccctcttccttgctcttgcacattcagactcttgccaagactcattatgaccaggcattaaaccactcctcaacgctactccctgccaccaaacttctgggacacctccagagactccctcccacctagcctgaaactacacagcaatgaagtcatttctcccagttaggtaacagaggtcaggatgtcttctccagaaggtgtgcagaataggcttgtgtcagctggtgagaacaaggtgcttgataggaggagacttaaggtcaaggacctaaaaagcaaatgcagagcaatggatgccaaggtaggagtttgtggagcaggagaggccatcaacatatgactgactaccttccagttctgagtatgggaagacctatgtccttggccccttggatatctactttatattttttaagtctctctctttcaccattctccagatcattcgagctgtctagcctaggctgtcatgaggccatgggcagtgcatgtgctaggcaggtttacctctctcatccactagaaacaccatcccttttcagaaactgacaacatctgtctctccccttctctgaagctgtgtaccacttctcactgcaaataaaaacaactaacttgggggactaaatactatctttctcaacattattatttaggaaatttgtggctgttatgtattaaattgttcttgaatttaaaatatattgctgaaaaggaacttagccatcagaaaaactgaaaccaaagaaacaagatacatattaacacttcatttagtcatcttttaacgacaacaagaaaaatccgtcagcatgtacaatgagatattttaacagactttcatactcaaatgtacaaatctttctctgcaggaggttaatagctactttctgtgtgtagatcgtatttctggatttctcatcctaatcaccaaaatgtaacatttgtgagaaattatagccaaattaatgttcacattaaaatggttaactagttctaataataaactgcaaataaactacttaacatgagtagaattttgtttgtctgaagagttaagaaaatatttattttcttgttggcctgatcataagaaacatgtccactttgcaacctttaacctagtgaccaaaagagatgcctagtcattctctgggtttaagaagttagttgatattttcaggttgtgattctaatgacttgaatgatttaaatttagtatcgaatcagaaaagcatgactaaacttactaccaggtgcctataacattgttttataccttttacatgacagagtaatgtgaagctattgctttgttatttgccaaattcagtaaattcagtcaaactagcatttcttaaaatttgtttgaataaacttgttctcaagaagaaagataggaaaacccaagtctgaaaattcaaactgataaggaaaagatatactagggcctgaagtatttatctacatctgaaaataaatacactactttttgtgagctattctttgaatatttaaatgaataaatctgcgtttgaactacttggaattgttagctgaatgttttaaggctctttaacaacttttcaataaataattatccatcttgaatgagcaagtcttatctctgcgactttgcacagccttgcattaaatgtcctagaaatggaaatggcaatcatagagatattgctaccatctcattgccttttaaaaatcttctgacttaagaaaaaaaaatcttgaataacagttataaatatagacaaacactcctgggcagaattcttcttaatacagacttgtaacatcagaggagcagttttattgaaactcttaaaccaggatgaaagactaaagtgtgtagtctcactaatagcatactccaaaaatatattttgaaagtaaacagctttatattgatccagggaaaaataaatagctcttatttaggaaaattatttttaagtgctaaaaaattacatttcttacttcatctagttatggaatgatttgacttcagatgggttactctgggagcagaagtgtttgtaattcagttgcagctcagtagattaaagagtggagctaaaggcatgaatttgaccttcacgtaagacagtgtttcataccacagttagcttggagcagaggaacactaaacacagattttttttaaaagaagtcccctttctaagctcaatacacaacaattttaaccataaagcatctccattgtaacccttatccccaagaagatgagaagctaaccaaaaacccatgaattggggagagaaatgtcaatatagcaaccaaggatcacttgcatgttcatatttgacaagacctggcagtctactcagagtttccttgttgtacctgagatattctctgaggattaggactacagaggactcctcagaatatttggaaagcttgtaatctgccccatggcttgagcttaccttaaactatcctggtagctccctctgctaaaggtcctcgcaagcatgtcatcttcagttgcatctactcaacacagcatgagcaattttttagtatatacaataaacagaaccatatccaagtagaattctttactatgtttgcttagaatataattactatgtcaaatgccaaaacattctgttaactttattgcaataaataaaactcgggacttgtcctgcagattctaataaaaaatttcaaaatactcagcaagactgagtcatttaaaccatacaatagcttgttacctctacagaaacaggtatttttttttagcataaatcataaaaagtttaagagaagtccatcagaagtagcaaaaaaaaaatgatagaaacactaaacttttcaaaagtctattcagaataaccctcctatgttaaatgtatatagtagttacacctaatggagtgaaatggtggagaaagtttagagtggttggttaatttagattgaggtaaccaccaagtctgaaaattcagactgataaaaaagaaggtgcactagaacctgaagtatctatctacatttgaaaataagtattatactttcttgtcattgattaattcactcagccaataagcatgaagcttctactgcgtgcggaacacactctaggaagcctcttctatttgcgcagggttaaaaaaaaaaaaaaagggggggatggaattgaaagttagaagccttggttttagtgctgtaacttgatcagatagcttagcttcctgagcttcagttgtttcctttaccatctatataacgcctgccagagttgttgggagaacagtgagtattgaaatacatagaaaaccgtaaagcactatagacattaactatttaatataacatacaagtatagggaaaaagcacttgccctttatgtcctcttcattaagagcttgatttccctggctttgcaaagtcactagagtgaagtaaacacctttcctttccagtaattcttcatgggtccctctttccactgcagtgccatgttcaaaaccaatgatggtatctgcagctctgaccgtagacaagcgatgagcaactgaaatgattgtgtgcccatgctgaatctgtaagaatgtacagtgcaccattaaacaaaactgtgagacagagctgacactgacctttgcatcatttcagaatccataggaaagttagatccttggtccctgggaatattcttaaataggctgtgcagacattagaaaaggccagcacattttcttgcagccataaaccccaacacacactggccctgttgctgccattaatcaacagctaaaaacaattttttaggtaacttaaaaaatatcataagctagtcttaacaagatttaaacttttacatgtgtagcttttggaaacaaattacaactttcttctgttcaactgtgaggaagattgtagtcagctaatattttctaaacaatcagactagatgcatgaacccatgtagtatcaactactcccatccctcccaccccacaaggagctgcctttcctgcagcagcacaagcatttccacatggacctgtaaaatggactaagacttccacaaaccttactcagcacttcttgcaccatggcttcactctcattgtccagagctgaggtggccatgtccaaaagcagaatcttgggatttcggatgagggctctggcgatagctaccctttgtttctggccaccactcatctggcctcctccttctccaacaagggtgtcaaattgctagatggaaggtgacaccagtcatgaagggaaaagaatttgatggcttctgacagtgatccactataatgtcctttctgtcatagttttcttctcaagcacgaattttcactgctccgacttccactgaaagaaatatcccttccccagacgggttattgtctaatcaatatttatgtgtgaaataaaggaattgatttatgcttttattccagggtttactgggctgtgtaaatattcctctttagctcaacttcaaataagatttttcaaccaaaataaaaattggtcacggtcctaaatatctatctcagaggattaaagcacagagcaaatccgtgtctctttgctcctgttagacaacacagcaaaatataatgcaaaggctgtttttacattatgaataaaaggtcaaactagctttataaggattatcattgacaaaagatggttactgattatctcacaggcctagcacaacattggaatctaataattaggtgttagtggtcagacacttatcttgcttattactaaccaacatgaattgagcccctactatgaataaagcatggttctgagctttttacacataacatctcttttagttctcatagataccttatgaggcaagtgctgctatttgcaactgatgaataaggaaacactgggcccaaagtaacttgagaaagtttgtaaagcttgtaaatagagaagctgggatttgtatcaaggcaatctgattctaaagctttatactctttaactactaggctatatcatagccacagctgcaatcctattcataaagagaatttagaaggctgaaagggaagtgttcaagatcactgactcttctgaaggcagatcacctcagtatgaaccttgtctttaccatttacttgttgtataatcttgagcaagctatttgacctctcagaacctcagttttctatctttagatggagctaataatattagttgctcaacagggttgttgtgagggtttaatgagttaataggtgtgaagtgcttagaacagtgcctggtatgtagtaagaaccgtatacgtgttaaccctttataataactcttctttgacttagcaggccatcggtggcaaaatccattgaagtataatgctgaggagttggtttttgtagttgttgttgcttagaatggagatatacaatgaattgtttttgacacaatattagctgcctaagcacaagaaaattatgagtagctgtcatgagattattgtgcaagttattgccacatgacatttagcatctgcttagacaaatgcttaataaaaggaataaggacattggatctatgtcaaaggagttttaaaaaagatagttccccagtttggtagatgtttaatatattaccaacaaagtgagcttttcaaaagaaaacctccttttttgatagatttgaacacataaacaatgtgttttcagatgaaaggaaacactcatggtactttttcaggcatgaaactaaaacatggcttaagaatttaatgacttgggaatcatacgagaagaaatgtgtataattgtgcaactttttttccttctatgacctcttagtttctcccaggaatgtatggctaggggtacctgtggcaggtccatgatgaagttgtaggcattggcctccttggcagcttggactatgtcttccattgttgcatcttctctgccatagcgaatattttctgcaatggtggtagagaacagaactggctcttgctccactatcccaatctgatctctaagccactgaatgttaagagagcgaatgtcatggccatccacggtcacctagagagcatgggcacaacatcacaacttttggaatctttcagggttctgaatcataatattatgtcatacttgaccaatgggcagaaaaaatagaggccaataagattctaatggaaacaattcctcttgaaatgtggttctttatataaggatgataacatgtaattgaaatcaagtatagctgcagaacaattcattgtggaaacataaatgatgtaaataaagttcacttaatttaacaccattggcccaggaatggacaaatttttgattccagtaaagagtagagacagttattcactacgttttaaatatttttatatcttttgacttttgacaaaaatggactcaaaagatataataaaaataaacaatgatccctatcttgtatatatgatttatagtaagtcttactttctggccagattcatcaaataacactttgctgttaaaaagcaagtgaaactatcagtgggagcaaataaaaatcactattagtaaaaatgtaaaaatcttacatcaagaaactatgatttctatatattcagagtgcagttatggtggtaggtagtaaagaatacccaatcagagatgagatgtctgtgaaaaaggaaaactctgttatgtttgccatgcctgtgtaatactatatgcatgatagagaactcattttgttgaagccattaaatagttaaacgattccatctcaaggcatcaaggagatgctgacaagaataattttgagacagagtgaaaagagcatgggctttggaacccaacacacctggattcaatcctgacttggtcatttacctgatgaatgaccctagacaagtttccatctctctgactctctgcttccttgtttgtcaaatgggcctatgtacctttgggggtcattgtgacaataagtaatcattttaataaagtatctgacacataatatgtgataaataaatggcaattactaatactcatttttcttagtttcttaggactgctctctcttaatttcaagccctgttattattcctatatttagtgtctggagaacttaaggacacaataatattttcgttataatacaaagaaaaaagtggaatagacagttcactgaagaggcagcaatagcattttaaatgtacagttatgcatagctaagcgacggggatacgttctgagaaatgtgtccttaggtggtttcatcactggcaaacatcacagtgtagttacacaaatttagatggtatatatatatttccaaatgtcctagcaccattactaaatatcaatcatttctcttaacttgatctgcaatgccaacatcaagtgacatatatcagatttctatacatgttccattataatcttatggaaccaccatcatatatgaaatcaatcactgactgaaatgttgctatgccacatctgactgtatctgcacattcagttacattatacagtgaatggaattgactggttattcactgaacactgttaccatgtaggaagcgtgtcccatcaattcagtaacaaatcattaagttaactatgcatgccaggacagtctcaatgtatgctacacctttctgtttgatcaatatactgccatttgcactttactgtccccatgtattgaggagtttctggaagacacccaccattccttcacaggggtcatagaatcgctgaatgagttgcagtgctgtactttttccagctccactgggtcctaccagagctgtcatttcccctggtttaatgaccatgttgaggtcatttagaatctggagaagaaagaaaacagcaaagttcagattgtcactgtttaccaaatcaaacaattaggctacaggtgcagatgctttgtgttgatactcggtgtctgtgtgtgcgtttatgtatgcccccaaagcaacgtccactgaaatccatcaaaaaccagtaaaaggaaacattggcaaggatgaggttttggcatttagcacattacttaattatttaactgagagccatgaccaagaagtaaaatgatgcacattaacacaggtgaagtaaataagacatgttaacttttaaaattatgtcccaaaatctgatttaaaatactcctgacatactaggataaggagactatgccaattagttaaagaaaaaaaatccattaagttagaaatatagtactaatttactgatcatggattaacagtaaggaaatttgcggattttaagccgtccgtcatgtgtatggtgtatgaacataccatttgaataaacttacttaataaatatacacggtgtgtttgctacgtagaggctgaatgctggctagtaggtcttgcgaggaaagaatgagaagctaattcataactatctgtcaatattttcaccaattaagaggtgatttttgtactgattatggaaaatgtggtttggggtcctctgtgtcacaaaacctcacgcctttcatttcacactaggagtcaaacttgcaaatacattttcacttactggcctgtattggactgtaagctcccagagcaagcaggcatcaaatgtgcttttttatcattatagcaccagtacaatgtggcacacagagggttaaaaacatactcgtactatgaataaatacatataggtttaagtaagaagattttatttcactattaaaagtaatggcaaaaacctcaattactctccaccattgtaatataagttttagctatccattcaaaaatatttactgagtgtgtattactttgtaattcatagcttacaaagcacctttacatatgttataacatttgatgtttaggtacatatgtaatagataataaaaatatactttatgtaatcagaatatatatttacttatgttttatatatttatgtatataatgaaggtaaatagagatatacacttatatttgtacatttgttatatatatttatagatatatttacctacatactgataatgtaggtatgtatatatagatataaaatatagataaatatataaatatttttatatttaaatatttatagataaatgtataaacaaatatttttatatttaaatatttatagataaatatataataaatatttttatatttatttatagataaatatataataaatatttttatatttaaatatttatagataaatatataaatatttaaatatttttatatttaaatatttatagataaatatatgaatatttaaatatttttatatttaaatatttatagataaatatataaatatataaatatttttatatttatagataaatatataaatatataaatatttttatatttatagataaatatataaatatataaatatttttatatttatagataaatatataaatatataaatatttttatatttatagataaatatataaatatataaatatttttatatttatagataaatatataaatatttttatatttatagataaatatataaatacataaatatttttatatttatagataaatatataaatacataaatatttttatatttaaatatttatagataaatatatatttacatatatatgtattatatattacaaatattatattatataaatatttacctgcattttatatatatgtttaccttctctctgtatatattcatatattcaaagagagaatgatatatatatcatatatatatcacagatatatgatatatatatcacatatatatcatatatatcacatatatatatgataggtatgtggtgtcagaattaagttaggctaacaaaatgggatttagttctgtgcagataacagaaatattaagagagagtggctagagatactctgttgaaaatgaggaataagtctaatttcaaagccaatttattcaggggtagtagatcctaattttcttgtagagtaaattgcctgtaaagataatttaaaggcaggaaataatttttttcaccatgtgccctgaacaagacacgtgagcataatatcacaaggataccttcctataagggctgatgcagtgacctagtgaatttacagatgggaagtaaaaacctacataatggcagctttcctttgccacttcataccctatactcagtgtcttccactttctgcagtctctgcgaaggttgggaagaacctgtgcttcctgattgttgtaattgccttgtcatttatctagcacttgcatggaaagacaggacctgccactcatttcaacagagcgtcatacagttcatttagcctgaatgtactgccagactgtgtcccaaccaggggatttgcacattatggttatcacaaaggaatgtggtctgttgcctgagataagccaacacccgaggatactttcagagaaagacacctccattccctattactggaaacagagtcaggcttcagaaaatgagcaatttgtggttatgcaaataaatcatcgaagaagaaaacatttactattctggggaacagaccagcactcaccttcacctctggtctggaaggataatggaaggtcacattatggaattcaatttcacccttgattcgatccaacttgtaaccatcttctgacatgcagtcaatgatgggtttctggagtgaaatacaaaagggacacagtgtaaactcaaactaagatgcacaactcaattcaaattgtaaattcaaataaacatctttggcgtatctctgcaatgttttatctggttgttgctctgttttatgagtaaattcaaatgaagatgtatacatttattgtgcctcttagtttgcatgtatcttaatttgaatttacttagaacaacaaccagataaaacattgcagagatacgccaaagatgtgtactcattaaacgtttattaataatagtgagaataatcactacttcttgagctattactgagatattatatattaacataatacatatttaattaatttatttaattgttattatttatcatgttgttactgagatattatataatatgtgccattatataataatacatatataatacatatgttgtattaatattataaatgtataacatatgttaacaatattattatatattatatattactaagataatataggagacaatgtactaggtgtttttatacttttatttacataattgtcaccgtcaccaaactagactggtgatatgcccattttcagttgaagaagtggaggaattgcagaaagattaagtttctaagaccaggcaactagtcaaccaatcgggggtccgagggtattcttttgagtatccatggtagatgatgattaaaactgagtgttcctaaatgatgtgttcaaatgctaccaactttcaattgttgtcctgaatttcacctcttctgctagcaacaagcccaatctagaatttaaccactctggttaatcagagaaaagtgagggcctcttcctgctaccagaacactccagcatcatcttcttcccttgtccataactagtgatggaaattcatcactgtattagtccattttcacaccgctataaagaatacctgagactgggtaatttagaaagaaaagagttttaattgattcatagttccaaatggctggggaggcctcaggaaacttacaaccatggttgaaggcaaaggggaagcaaagcatgtcttacatggtggcaggagagagcgcataggggaaactgccactttaaaaccgtcagatctcatgagaactccctcactatcacaagaacagcatgggggaaaatgctcctgtgatccaatgacttcccaccaggtctgtccctcgacacatggggattacagttcaagataagatttgggtggggacataaagccaaaccatatcaatcactttagctctattgaggagtataatgtaatctacctccttactgggttgctaataaaggtaagaaataatttttaaatgccttaattttttagtttcagggcacttttagagtcatcatcttatttgagcatataacaatcttaagaaagaggtagaatttgaataaattgactttttttttttttttttttttttttttttcagagacagggtttcactctgtcacccaggccagagtgcagtagtgtgatcatagctcactgcatcttcaaactcctgggcttaggccatcctcccatatcagcctcctgactagctgggactataggcatgtgccaccacacccggctactttttaaattttttgtagagacagggttgcccaggcttgtctcaaactcctgggctcaagctatcctcccgacttggcctcccaaagtgctgggattacaggtgtgagccaccatgcctggccatcaatgaacatttttatgtggtttttaacaatctctctgtactccaatatatgaaaccccaaattataaaacagataaagcaatgagtcacttccttaataggttacaacttcactgtttggcgaaagagtatcaaacagcggacagtgaaccaaacaggttcagggagcccgcaaatcacctctggatttccagggcttgctttggactcagctcagggcattttttttttttaaagagaaagaacaacagattgccaacttccccttctgttcttggttttctgtttgtttgttttttgagacacgttctcactctgttgcccaggctggagagcagtggcgcaatcatggctcactgcagcctcggccaccctgggctcaggtgatcctcccacctcagcctcttgaatagctgggactacaggcacatgccatcttgactggctaatttttgtgttcttagtagagacaggttttcaccatgtttcccaggctggtcttgaactcctgggctcaggtgacgcgcccaccttggcctcccaaagtattgggattacaggcaagagccaccatgcctggcctgttcttggattttgactccctagcttggcctccagtgtgcttccatagactaaccagtaaaatccctttttgccatatttagaagataagcgaattttatggacatggtcttgaagtcctgcatggtaggcccttcccatgcctccagcctctgccccttgttcactctattcagttgcactgggcttgtttcagcttctttaaatcagcagccttttccaacttgggggcctctcttccatgaatgccctccctgctcttacttcccacgccccacctcctccaatcctcatttgtatggctgacttttcttcagttctccactcaaatgctacctcctcagagatactgccaccaccacccaatttaaagactctttctcccaccccagtcgctgtcacattgccctattttatttcctttatttacttaccactctctgctattgtcttatctttgaatgtgcatacttctttactgcctgtcctctcccagcatgagtaaagaacaggggtcttacttgttctagttccctgttgcattcactcccttgaggcaggagaatcgcttgaacctgggaggagggggttgcagtgagccgagattgtgccactgcactccagcctgggcaacaagagcgaaactccatctcaaaaaaaaaaaaaaaaaaaaaaaaaaagaattggcaccagcacatgatagcatttaataagtgttgctgaattaagggccttgcgatagcttcttatatttttaactttaaggtaaattcttcaggagttcattctgtgccccaccccccagcccccacctgttaatggcctttacttttggcttatacataccctgtctattgtctcaaaaatgctggtggctgctgcacgtccagttgcaaaggcttccaaacaaggagaggcattgccaagatttaaagctcctactatgacactgaggaaaatctgaaatgaaaagagagagatttttcatgtgtttttgttaatgtgtaaatagtaattactatcatttgggtcttccatgttaacgcagagagttatcagaaattctcttctgtgggttcaaaagctagctctttggctgtttggaaatacccaaaataatttttgttctgtaaagcatctccaagttttccactgttatgatttaaaataccactttatttttttactgaatattactcttctacaaagtagaactgtcttgaaatgagtaagaagtctaagcaaggtagcctgtagacccaaagtggacttgaatagtgatttgataattgaattcattatataatcagccttatagtgattttctggttaaagggttgccaaaaacaatacagacactaagatcagcctgactattctagaggctggtacatgcaaaaccaacctgctactgttgttaccgctatactaatgctactattccagtagtcactgggctaactactgcaactactatgaataacagtaataataacaataataacaggtatgtttctaagtgttttatctgtattatttcattttatctttacaacagaagagtgaacagacaggtatggaggctcccaatttgcactaggttacaacatgtcataagtagtagagcagaatttgaatccaggcttttgactgccattctacctagctcccagactcacctgttgctggctatatgcaggtggagtggtcaggttcctgtgcagacttggggcagctgttctttgacttaccaatgcagtcatctcattaccttaggggaaggctacctgatcatgcccagatgttcctaccaaatagcactctgtttttattatcagcactgtttataaaggtaaggaagagacaatgaggcaaatcctcaagttggcctccagaaggaataccagtctcctcctctctaccctgtcaaccaaagaatggtcctactcttgtgactcgcatagaggatgtttcattggccacagtctattgccaagccaaagagtggccctgcatgaatgtagtctttttcaggtgatcaaatgatcctggtctgtgatggtttctataggccagacccttcccatttgttgtatcacattgaggcaaattgcctgagtctctcctgcttctctttcttccttgtggctggagtgtctgaaccatggaaagtgtcagagcctctcagccatgtctctccctcttcagtaacctcttcattccacacattaggatgattaacagggccagggctgccatacatgggtggtgggttagtccactcacgctttctccctagaatcccagcctatgcatagggacaaaaattatctcttcatttccttgtcctcaattatggcaggtggttcctcccataggcagattatgtaatctttcaagcccccatttcttcatctgcaacacagggataatgatagcatatatttcataggattattacaggatcaaatgagataatgtgtgtaaagatgattaatccagtgctagtctcttcaatggtagtaatgatgttggtgatgatgatgctgacagtgaagaaagtattgaggtcccacacttaggaggcggtaaaggaagcagatagaacacttcttatggtccaatttagtttaagaccacacacgtcagaggtcttcctacctcagcaaaggaaccttccatttgccctagatccggggccagcaaacattttctgaaaaagggccaaataaatattttaggcttttcaggccatatgggctctgaagtaattactcagttctgccatgtagtataaaagcagccatagacatatgtaaataagtgactgtggctctgtcccagtaaaatgttatttataaaaacaggcagtgagctggatttggcctgtcgaccatagtttgctgactcctggctgactggaggcctaaattgaagtttggggtccaactctttgaatggctctctggatggggaggagtgagtgagacaggacaaaagcacattcccaaatcatcacagtagctagcaacatcccaataagccatcatttgtcactcaacatcatattctttagccctgtgaacagcagaagtagtgtagacagagagatgggaagggagactgctgtggaacaattaagctatgggtgtgctggagaaaaaggggtccatggcccctgggaagacagagtcagaggcaggaaaacagtggttaataggtaggcctcaaagtcagggagacctgagttcaaatccctctcaatatttcttgacttcatggcttcaatttcatttttaagtggtagtataatgacaccaattacggaatgagattgagagcattacatgcagtaattttattacataatacgtcactcagtgcttgacactttgtatatactgaatgaatgtcacgctccattatgtgtttatttttattaatgaattctgaaactcaggaaggtcatgaaagaacaaccttctgcaccattcaggtccccttcatctttccctaccagaccacagagtgcattttttctctgtgcacaagtgatactaattacagtcacttatgtgaactacttaccatttatgcccaattaccatgcagccagtaacgattttgtgtatcacaaaacgtactggattaaccaaaccgttaattagttttgtggattaaaacactcaactcagcccatgcacactcagccttcatagtttgctgctcagaagtgtggccaagacctgagagagagagcgagcgagagagagagagagaagagagagagagagcaaggaatatagtgttaaaggatgcatttcatcttcccaaaggaaattttctcttaagatataagcagaggcttacagaaagacgttgggagtaacaggttaataatcagttgattaaaatgttagagacccatagtatgccatgtctgcacatagcaaggactcaagaaatattggttgaaagaataaattatttacaaaagtagagtagctcactgtacaatgggcaggaaatttaaagatgagagacataaaattggattcctactacagagagttaccaaagggatttttattcaagtgcttccagttggtattgtgtattatttgattttcaatttaccaattcacttttccctctgaaccattattattgtatacctctatcctctccttgtaggcatggaacaaaaggaaaaataagttttctcaatgcttgtcttcttgcatagcaagtatgtataagcagctaggactaaagccaactactgatatccctattttggtaaatgtcaaagttcttaggaggaattggatcaataaagacaagggactatagttaaaatctggacctgcaatacttcagtggcttttccaatctgtaaaaactgtatctaagttgttaagaagtggttaaattataaaattggtaacacttcccatccatactatctctttaaagtttacaaaacacattaacctgtattatcatatttattttctttaacaaagttcaaaagatgtcagctgttcatgctgccaagataaactgaattgaaaaagttgttctttgtgtattatcatgttcttaatgaaataaagtccgtggtttggaatgattatggtttgacctctgataatcacttccatttgcaaatcaaaatcctactcaattttccctggcaatgtatttatcttaaagcagtagattttgaattttaagctctcagctagcaaatttctggtatacaaggttttgatatttttcattgtttgctctatccggaatctggagctaaaaaattttacttaagaatttgatataaaacgactccctatttacttgcagggcaaatgaaacagatatttcattttttgtttccctgacctcgtagattttactgtctgagggtagaaacgggtgggcacaagtgtaaataaatgcaaatattccatatcacaaaagtgctttgaaaaaaaagtacagcagatcacaaaagagaatgaaaaatgggtgagtgtaaaaggcctgactgggaaagtggcatttagctgagaattcaaacaatgatcagagtccagttgcaacaagagagagccataagctaaggaggaaaggccttgggagagggagcaggataagaagccttcctggacccccgccacacctggttatcctgctattcactgtcaaggttctctgtcctctatagcatgtctctatttgtctgtattcatttacatggttacttatttattgcttgtcttctccattaaagtgtaaatcccatcaaggcaaaaaaacaaaaacaaaaacaaaaccacatttccgttgctcactgttgaatcccctgcattttctaagtgtctggcacatagtagatgctgaataattacttattgaatgaataactgtaaagacaatgaaaattaaaggcattagctactttagcacaagtgagcaataaagtacatttgtagcacctgttcagttaaggctgttattgacctggcattttagtaactcattatgtttcacaagtacatttattagtatatatcttggactatcataaagctcagttatacgagctgttaatttttagctgagagatcactgagtttccattttcatggcatattttctttttggactcagtcagaaaatcatcatttcatagctataaagtgttcagttaatttgaaattattaaattgctggtcttatcaattcaaatgtttagcatccctttactataaaatatataagtattatttgtttctctataaaatttctagaagataacattggaaaagcccttctagactttggcctaggcaaagatttcatgaccaagaacccaaaagcaaatgcaataaaaacaaagataaataggtgagacttaattaaactaaagaggtttttcacagcataaggaacagtcagcgagtaaacagacaacccacaggatgggagaaaatcttcacaatctacacatctgacaaaggactaatatccggaatctacaataaactcagaaagtgagctaaggacatgaatagacaattctcagaagaagatacacaaatggccaacaaacatatgaaaaaaatgctcaacatcactaatgatcagggaaatacaaatcaaaaccacaatgtgataccaccttaatcttgcaagaatggctataataaaaaaatcaaaacataatagatgttggcatggatgtagtgaaaaggaacacttctacactgttggtgggaatgtaaactagtacaacaactatggaaaacagtatggaaattccttaaagaactgaacatagaactaccatttgatccagcaatcccactactgggtatctacccagaggaaaagaagtcgttatacaaaagagatacttgcacacgcatgtttatagcagcacaatttacaattgcaaaactgtggaactagcccaaatgcccatcaatcaacaagtggataaagaaactgtgatatatatataacatatatgtatatatatacacagatacatataattacatatatatatggcagaatactactcagcaataaaaggaatgaattaatggcattcacagcaacctggatgggattggagactgttattctaagtaaagtaactcaggaatggaaaaccaaatattgcatgttctcactcataagtgggagctaagctatgaggatgcaaaggcataagaatgatacaatggactttggggactcagcggaaaagggtacgaaggcagtgaaggataaaagaccagagcttggattcagtgtatactgcttgggtgatgggtgcaccaaaatctcacaaatcaccactaaaggacttactcatgtaactaaataccacctgtttcccaaaaaaattatggaaataaaaaaaaatttaaggtattacttgtttccacagacagactccataaaatcattgatgcttttttcctgaaggcaccaaagtaataaacaaaatatctaatccatggacttttctgagataccagaaggaaatgctatgtctcggtcaataagtccaaggtacctggacaagggttcctggtgtatattctccttcatccaggacaagtgtggagccgtaccagaaggccagtgcataacacaaaaagatgagacaccacacgaatccagtaaagaatcccatcactattccttttctaattccccaacgctgggcgaacacaagatttttctcatacctgtgaagacaaaatgcttgagtcaatttcggcagaaacagctcaagttataatgtttaaaacaggccgtgatgcagtggttttacaaaatgatcataaaatcatcgcaaacacagagcagcttcagggagaaaaatctccaataacctttatgtagttttttaaagtttgttttaacctgacaatgaaacatgttgaaagggcgatacttaacagagctgcctgattgctgcttggattgcatagtgaggtaagcttggccccaagagaaaagaattttcaacataaatatatgaacaagagagatctagtattatgtttgaagtgtttccttgagtcacatgacatgtccttatcagaaaataatgcaactggctccaaataagcagaccagactttttgtttccagctccccaggcttggaactagtgtttgcaccaactcatctataactcacccatctgccctgtggctgagacgctgtgttgtgacacactggtcaggttcacagccatgagacatggataactgaaactatgtggaagtccaatgcaaggaataggtttcagtaattccatgatctagccattaacaatgggctttgtctcatatatagctcaggcattctgaaactgccttcctacatctcaggaattgaattcatggagaacttttaaccttttgcaggacacaaactgaaggtctatcctatgtttgttaccatttttaaaacactacactgtctcttttattgacaataaaagataatgtctttcatggtggaagaaatatgctactgaaattttttacaagaaataaggaacctcactccacaaaccaaaagaagtggggaaaagacgataataagaggttgtaaatcctattctcttttttacttgatggatttggtagcaactgagaataacaccatcttaccaaatctacaacacataaagtaagagttgctattcagttggtagctattttataaaaatcaaagcatggcacgtagtaagtactcaataaataccagataaattaaagaataaacaaaattacattttggacaactgtattattttggccatttgggtttttcttttcactgggagttaatctctagaataatgctctataacttttcaacactaatttgttttttgagacagggtctcactccatcattcaggctggagtgcagtagcatgatcacagctcgctgtaacctcaaactccccagaatcaggtgatcctcccacctcagcctcccaagtagctgggactacaggtgtacaccaccatgtctggttaatttctgtatttttttgtagagatgaggttttgccatgttgcccaggctggtctcaaactcctggcctcaagcaatccacctgccttggccttccaaagtgctgggattacaggtgtgagccactgtgcccagcctgtttgaccaaatagaaatcttatcagactttataaagaacatgtagcacagtacctgaataaagtgtgtttaattaaaaaggtgttcaataaaaatgtgtgaaatagcattttgaatcatgctggcatttctttattattttttaattgacaaaacttacatatatttatggtatacaacatgatggtttgaagtatgtataaattgtggaatggctaaatcaagataattaacatgcattacctcacatacttatattgtgtgtgtgtgtgtgatgagaacacttaaaaatctattcttagcaattttcaagtatgcaatgtgatgttattaaccatagtcaccatgttaacaacacatttcttgactttataaactgcctcttaaatgtgaataaggaagggtttcttttagatcaccatgaactaaattaaaacaactacaattagataattaatgtcattatttttaaaatatctcaaactacccctgtttaactgaaattttgaatcctttgaccaacgtctccccagttctcgcctgccccctcccacctcaaagtccctggtaaccactgttctgctctctgcttctgtgagttcaactctgtcagtgagatcatggggtatttttctgtgcctggcttatttcacttaacataatgtcctccaggttcatcgtgttgctgcaaataacagtattttcttctttttaaaggctgaatagtattctattgaatatggcatgtaaatttacacacacattttcttcattcacttgtctgttaatgggtgcttaggttgattccataccttggctattgtgaataatgttgcagtgaatgtaagagtacagttttctcttgacatagtgatttcatttcctttggatatatacccagtagtggggatgctggatcatatggtagttctgttttccattttttgatgaatctccatactctttggctgtactgatttactttcccaccaaaagcgatccgtgtaacagtgtttcattttccccatatgcttgccaacacttgatatctttcttctttttataatggccattcttacaggtataagatgatatctcattgtggttttgacttgtgtttccttgatgattagtgatgtgtgacatcttttcacatgcctgttgtatgtttctttttgtacgtttctatttgtatgttttcttctgagaaatgtctattcaggtcttttgaccactttttaatcaggttgttttcttgtcattgagttgtttgtgtttcttatatgtattggatattaaccccttatcagatgtatgggttacaaatattttctctcattctataaattgcctcttcactctgttgattgcttcctttttgaagctttttagtttgatgtaatcccatctgtctatttttgcttttgttacctgtccttttggggttgtgtcaaaaaaatcattgcctagaccaatgtcatagagcttcttccctatgctttcttctagtagtttttcagttttatatcctacatttaaaactttaatccattttgagttgatatttgtgtatagtgtgaggtaaggatcaaatttcattcttctgcatgtggatatccagtttccccaacatcgtttattgaagagactgccctttcctcatggtgtgttgttggtctctttattgaaaatcaatggactataaatgcatggacttctttctgggctctccattctttttcactggtctatgtgtctgtttctatgccagtaccatgctgtttttattactatagtaatcaaataatctaataatgatctattactttgtagtagattttgagatcaggtaacgtgatgcctccagctttgttcttcttgttcaggatttttgctattcaaggtcttttgtggttgctaagaagtggcaagaatgggcatttttgtcttgttcctgatcttagggggaaaagctttcaaattctcacccttgagtatgatttagctgtgggcttgtcatatgttacctttattgtattgaggtacattctttttatacctaatttgttgagagtttctgtcaggaaaggatattgaattttgttaaatgctttttcagcatctattgagataaccatatggtttttgtctttcattctgttaatgtggtatattacatttattgacatgcctatgttgaaccatccttacatcctagggataaatctcacttgatcatggtgaatgattcttttaatgtgctattcaatttggtttactagtatttttgttgagcattttcacgtccatgtttatcatggatattggcctttgattttcttgtagtatccttttctggctttggtatcaaggtaatattggccttgtaaaatgagtgtgaagtattccctccgctttaattttgtggaagaatttgaggaggactggtactagtttttctttaaatgtctggtaaaattcagcaatgaagctatcaggtcctgggcttttctttcatgggagactttttattactgattcaatctccttactcattattggtatgttcagatttatttctctttatttctccgtgattcaaccttggcaggttgtatttttataggaatttatccatttcttctaggtcatccaatttgttggcgtttgtttttagtaatctcttatgatcttctgtatttctgtggtatcagttgtaatgtctcatgtaggcttttctttaatgacagcaaacagcattatagactgatatgaggtataatatttatacatacataccatcagagtttgaaataaatatctaccctgagctggctttctaaaaattgccaactgcaacatctttaaaaacatactgctaaaggcttgggacttcttatagtacctaaattaccaacctaaattactctgcttagctccctcttgaacaagtacttcctctggaggccacagaccaaggtgggtctgccgctttgcacaaactgagagactcagggtactatgctgattgatgaaattaaggaaagaatcagattccaattaaccaacctttcaacctctcttttctcaccaccaaaagcagccactgttctcattgatgaaatgacttcatcagccaccacccctgctttggcataggccttcagctcatagtccgtaaacttggacacactctaaaaatcaaaaagaagaaaagaaaatgtgaagtccaagaaattaggtaagtcagtctgtcattcagattcatttaacatgtggcatgggtttaatacaatattagattctcactgtaacatcattgacaggaggaagaaatctggtccaaatttggtctatggtaagcttcatccagggttgtctggttgttgatatatcaaaatgaccctactaaaagtaagaacctcctcaaagaataaattccaaataggacattctgtaagactaaagtgtttcagtcattatactaataaagtgttaagttagaccatgtcatagttcattgctattagccaatggccattgcataatttatagacaaacgccagagacacatgcagatatcatgattgggtataatatatgacatataacatataaagtataggcatgatgttgaaagacgatttcagatgattccagaaaagaaagtccattttcactcagttggagacgctcaactatgtagttttgatttttacaaaaggaaatgaaaagacatctgtacttaacagtagacacattactttttctaaaactgacttggattgagtcctagtcaaaatgaacccccaaagaaaaccctggcacagattaataaataagaagaggaaaaaacacatattgcggaagatcaactagctcagaaatataaaaatatatataatacccagattaagggagtttatcttccagtagtttttccaaacttttagcagcaaaactcttatcaaaatcttagatggaattctaagatgtaaattaagtaagtattcatagtagtttttaaaaacaatatattaatttcatcagtgtacattttataaaacatgtgaattaaacatgtaacagtaaggaaagtgaggctttttttttttttttttaaagagacgggttcttgttctgttgcccaggctggaatgcagtggcatgatcctagctcactgcagtctcaaactcctgtactcaagcatttcactggcctcagcctcctgggtatccgagactataggcacatgccaccatgcctggctatttaaaaaaaatttttttttttttttttgtagagatgggatctcactgtgttaccaagactggaagctgtttttattaacattaaaatttacatttgagcctagtgaagttgcttgtatagtttgttgtatagttgcttgtagaagtttgttgtataaggacaagcatacacagacttgaaagcaagacaagacatgtgcagacctacaacattccaaatcagtgacgagtttatgagaagctagaaatgggtactgagatgactagagaaactaagcgttagagctgtttaaaaccaagtgaactgggctatatgttaacctccaacatgttgaaatgtggcctatgatccacgtgagtgtgtatattactttatcacaggtttgaagaaagagattagtgtattcagaaaaaaaatgaaaaaatgtttgcaaaacccctgaagctcttctgtggaagttgagggttctctggagtatagttggaaagtggttagtaggaaagactgccgtaaaacttgaatgatatagtggattgaaaaacatatacatctctctttagcaattgattctgtgcccgacacggcttaaatgcataacgtggattattccctgaatcatcataatgtttttgggaggtattatccctattttaaagacaaggaaactgaggttttcaggggttaaatggatttttcctgagtcacacaacctgttagcggtacagccaagtggtgacctaatgaaatggagcgagctctttgctattgtcactttaaaccattttctattttatctgggaaatgtttgaataatgtagacactgtgagaatattttgctattgagcaataggaagttggtacctattgctcaacgatgtgtgagggtgtatgcagtttttcagttaaattctattctcatttatagcacagttttagtatgcctgattccataacgtgctatctaatgtggctgctctaataataatttctcagtccttgggagtgtttttagctgatgtgacccgaaattcctattcctatatgttgtccaggcctcaattcctggggaaccgagacagtgactgggataactcttggaatgggtcagatcacctctctctgaaagaggttatctgaaagataagatgaaatggagaacacagttgtgattgcagaaatccttcttgtgtgcttgttaatgctctttgtctgttgtgccttttcagggaagtgcccaagcttgggaggacatggagaacaataggcatattggagagtgagtggggtttggagtcagagccccttagacttgaatcctactctgccagctgtgcagtcccagacaaatccccttacctttctgagcctagtttcttatatttaaaatgatgttagtgctcactttataagattgttgtaaagattagagataatgactattaagctcctagtagtgcctagagaaacagtgaatgctcaataaatgtaattgctgttaataaaacaatatttacctattaaaacatcattaatccctattcgatgaaatgtcatttgacactggggagtaatctaacaaactacatgaagatagtgataattatgttgctaactgtactcaggaaaagggactcaagcttcacatttttggctgtttatgaaggcaaatgtcttcccatggagagatgcaaaaagacattcttaccagaccaatggtggctgctccaatcccaatgagagggctgacagaaataataaccaaggtcagtttccaacccctgaaaaatcccaacaggaaaccacagatggtcgaggtcatgcgctgaatgaaaagggccatttggtcagctatggcatcattgattttattaatatcactagaaaccagaaagattttggtcactaaaactgaatttgatcattcaaatatcttgctgaaagtctcagtctttcccttttaaacattcccatctctctatccctatcacccttggatagcattaacagcctctcagatcttggaaaatttgctgcaccttgggatgttatcaagcctctttcctgatagccaatcaattttgttcttaatctaggtttcccagctggtactcagtgttgataaaggcttttggaaaccatcttatttgtctttttcttttacatagctaatatccttgctctgtcttgcaaagcttttctttcttcatgcctgctgaatcctttcagcctcaaggttctagtcacataccttctcgtgcatcaatcttgtataatcccccaagaagaagtaacacctttctccctgtgtttccgtaacactgtaattaatccttgtgcatttgtatgtgtgtggaattattgcattctgcatataggcagtatagagtagtggtgaagagtgcagattctggagccagactaggaatttgaatacagactcttgttgggcaagttacttaacctttttgtggctcaattttcttgtctgtaaaataagaacaataatagaacctaccccaatgggtaataatgaggattaaagtagcgaatatatgtaaagcctataggacagcgcctatcatataataaacaatatgtgttagttctgattatttgcttgcatttcttatttcccctacgaggctgtaagttcctcaagagcacaagtgcaaggcaattgctccagaatatttattgaatataattatattaaattcatattcctgagaacatttccttaatctcttgtccagttggagtgaagagagcttggaactaaacagcaagaaagaacctaagacatcacccaggtattaggccattgtgttccagcagggttagataactgctcaaggtcacagtaaggagcagagtaagtgccggaagtcaggggtcctgaatttcagtgtgctttatctacactgtagagtgactgtctttcaggggacctcaaaattcagttcaatagggttcgaccaattctaattcctctcatttagaattcctgggtggctgttaatgacctaaactaggtgtaaactggatttaaatccagttacacctggacagctaaataacctttttaactgtcttctataatatttcctttctaatattttaattaaggtctacacaccaaattgcagtaccttgggtttcaatttttaatgtccatatttgacagtgtattacttatgaaaaagccatgccacatatgaaagcccaatttaagagatgaaacataggaaaactgaaaatatttttaaatttttatttaatttagaaacaagggttttattatccaaaaatcacacactaaaatactgttttaccagctacttactcagagaatcttgtattcagctcccccactgaattgcagtcaaaccaccctatttccattctcattattctcctaaagtaaaattttctcattttctgtatctgacgagctgcggcaatgacccaaaagcatatctggaaatggacaaaggaatgtttagcattgcaatgtttgaaatatttgttaatttcttttttcagaagaaagtactttcaatacaacagttgagaaaagggggaaagtaattcagaaaatgcctcttcttgggaactaagatgtgagctctgtcatctgctgctaaaagtggaggtaaacagaaccttcagcagggtagcctgagatttgggtttgaatccagctctgacacttaagcaggcccatgtcttctggactttaccctacagagcttcactttccccatgtgtgaaagaaggctcacagcaccaaaaataaggcattattgttcttaaataactatttttaatgccatttctgagtgaatttcctcccggaaagacctgcctagaagcattcatgcatagttttcaggcaataattttcaagaaatgtaaaacaaaaattatgacatcagcaaaaatctaatctgctgatagattttccctaactaaaaaaaaaaaaaaaaaaaaaaaagcctgtcattaaaattcccaatgcctaaatgggaaaaaatgattcatttctctttacaaacagcactgtgtggaattcttgaatgaatgggaaggaattcattatttttctacaaaagaaggcaaaagataaaatatttttctttcttaataagagttaagtacctccaagcccttccaacacttaaatctaaaatatgctctagattcagcctttcagaatttgggttggaatgcagtttgttgagactttagcaatgcgagaaaaagaaagtaaattttgctttcctctatctccccctgccccacattcttcaagctactcaactgccccctacaaacacacctgcaaatgtccatttctggatatagaagagaggatgaagtagggaaaggcagggggaggacaggacattacaactacgagtctattatgcatctctctggacagccacttgtatcctcctaagtttccatctgagagaagaatccctctccattctctcatgtcctctggaaacagactgtagttcttagggcttctgattagcttaaagagtggcaacacattgcatctcattgtagtgtctttgaggtcagatattgatctataaattatacggaggagctactaacttgaatatatcctgtgataagtactgcgacagcaattccagcatagtaactggcaaatttgatcatttcgctctcgatgttcagcaaccttcaaaagagggaaaagaatgttcagacttgcaagtaggatcaagccaccagagattacatttgtggatatagagggatttaaaaaatatatatattttaaatatatatataatatataataaatatactatatatagtatatttctattagacatgagtaagacattttatctatgcaaaattataataaatccaaccaaatttctaaacagacctcatggtaccaatcacagaaaatatgcatatccccttcatttttataggcagagatgctaggactatgaaataattaattagcagttgttggaagccagggtaccctaaatggcagcccagggcttggtccactttagtctcttccatgcatactcatcatgcagtgatagagcaatcacaggcaagaaagattttcaaaagccagacaggctgtctgaaaagaaactgatagaacgatgtgtgctgtaaatcaggaggcttactgttacctcttctaggaatgctagccagcttttcaacttctctatctcagagtgacactgaaaaatgtgcctgttatcttcccatgggagagaaaagcattttattagccctgtctttttgctgactacagcctaagttcattcaccaggacaatttctaaggttgaagccaaagacacttgtgggaaatagcaagaagaaaaatagcaaagaaaaatactttggcatttttcccagcagcactaccatgttgctgcacagggtttgggattggcagtgccagggagtggaggaaaaaaaaattctgaaattgcttttatgaatgaaggcattccataattagaaaattaacatattggttgatgacagttatgatcttcagggacaagttaaatggtatagagtctactttagagaatcagcaagcagcctcttcagcatgggttcttcatcctacatcctttccgctctctgtcagccttctttttgtggcttgagcttgattttttttctctattgaactcaggtcaagcattgcaacataattcatttaatacagaataaactgcactattagtcaatatctttattgaatatatttatattgagtacatttatgcttgtcttgctagtagattgcaagctactcaaggtcaagggctgggcttacactgcttggtcactctgcctgaaatcaataaatgtttcctgattttgctttgactttcaaaatactaattaggaagggaaataactgctgtggtcaacccttctgacaacctcaaaaccagctaaggtctcttgtgctcaccacattcccagtctttcatgatgactaagaagaaccctgagatgaacaagaactagaaaatcataaacttatcgatgaatatccacaatcagaggctcttataaaagctaaatatctctgaacagagagtatactatattattataagtaaaagctttctaaggtatacatgagtcaattctcttcattttcagcttgttttggggtgtcccaaaccagaaaactataagcatttgtccaaacattttacttagagaatagtagttaacagaggctgggaagagcagtggagggggagggatggggagaggttggtcaacaggtacaaagttactgttcaggaataagttctggtactacattgcatagtaggtgactataatagttaacaataatacattgactatttcaaaagagctagaagagaggattttgaatgtcctcaccacaacgacatgataaatgtcttaggtgatggaaatgctaattattcgatttgatcattacacattgtatacatgcatcaaaacatcacactatatcccataaatatgtatacttatgtgacaattaaaatgataacaataaataacttaaatttcctgtggtgtctttattctacaagcactgtaagcggaagtgatgaagcgactgtcattaaaaatgccagtttacaaacatatgtggattaagggtgttgggcactggcccagctctgggattttctggaacaaaggtcaagataattctatcactgctggatggtgcagataaagatatatgcagtttatcactctcttcactcctgcggtgtctctgaaatgagtggttaactcatttttattttattctgggaagaagaggtgattaaggctttagagaacttgataatatttctggaacaacagaaaaaacctatcagaaaaactgacaggaaggaaaagagcaggcctggctttgctcccttgactgcataccaaggtctttattgcctgaatgttgggaacacttgtcatcataaaaccccaggaaggattctataaagtgtgcaggtgatttggaccacagaatggcatttttttaacagcaaaaacagacctgaatctacttgaatgaattaagattccccatttgttgaatagcaaagaagggagagagatgacattagaggaaaaaagataaagagacgttttacaaattattatgacatgaggacttattttgcttttttgtttctttttaccttgttttggaaactttttacctttttttttttcattttaccttgttttgtcattcaatttacacatcaagcttacagatttactaaagccatatcttgcaaatatcttgcaaaactgtagtacaatatcacacccaggatattgacagtgatataatcaagatcagaacattctcatcatctcaagactccctcatattgtccttttatatctccacatgcttctatccaatccccatatcctccttagccccagctacaaccagtctgttttcttttgctgtaattttgtcatttcaagaatgtcatataaatggatctcacagtgtagaaccttttggggttggcttttttccacttagcataattctttcaagtttcatcattaacagttcattcctatttattaaggaggattccatataatatagatagatggatcacagtttgtttaaccactcatcctttggaggatatctgggctgtttccaatttttatctattacaaattaagcagctatcaacatttgtgtataggtttttatgtgagcataagttttcatttctctggaataaatccccaagagtagaaatgctgagtcatatggtagttgagtgtttagaatttttttaattactaaactgttttccaggatagctatgacatggtttgaatggcatgagtgatggtagagtgatccaattcttccacatcttcatcaacatttagggttatcactatttttaattttagccattccaataagtctatagtaatatctcattttgatttaatttgcatttctctattgatgttgtttaacatatttcatgtgctcatttgccatcttttgtccttactcatgtctttttcccatctttgaactgaaatttgctattgttattttaacactgagttttgagaattttttatatattcgggatcctagtccttttttggatatacaagttgcaaatatgttctcccagtcagtagcttgtcttttcattctcttaacaggatcttttacaaagtttttaattttattgaagtccaatttatcaaattttccctttatgaattgtgcttttggtgtcatctacatgctctgtccagccctagaacatgaaaatggtctcttccatatttttctaaaagtttagttttatttgttacatataagtccatgattcatttaagaaaatttttgtgtaatttcatttttttgccctatggatgtccagctgctccacagccatttgataaaaagcttatctttcccccactgaattgtttttccacttttgtcaaaaatcaattggacatatttgtgtgggtctatttctgagttctccattctgttccattggtctatatatctgtcctctgtcaatgccacacagccttgactgcattagctatataatatgtcttgaaattgggtagattgattcttctcactttattattctttttcaaaattattttagctattccagtttttttacattttcataaacattttagggtaatcttttctatatctacaaaaaatcttgcttatattttgatatattagggcttaaatatgtcattttctttcttgttttctatttgttctctctgttatttctgtgtttgctttctcttaccttcctatgggctgcttgaacatttttttagaattcaattttgatttatctatagcgtttttaagtgtctctctttgtatagctttttaagtggttgctctaggaaatacattatagatacatcacttttcacagtctactagtgctgtcattttaccaattcaagtgaaatatataaagattacctcccattacatacctctactctccttcgttaataagtgtcttatctatttccaaattaaacacacatcagacagtgtcagagtaggatcatatcacagtgttagagtttctaccataaaacataattcagaaagcttaagagaaggaaggtctattgcatttactcatagttttgttactacgcactcccttcctgatgtctaggacttcttttattatttcctttctgcttaaagaacattccttagccattcttttggggtaagtcagctggcaacaaattctcttgatttatttcatctgaaaatgtcttgatttccccttccatggcggtggtggtaatgttttgactctgtcaccccaacccagcaggtaaggggagaggtgccttactatagtggggatgagtcaggcctcccacatattctccattgacaccatgggggtgagtgagggggtggcacaagaggggcttattaccacctagcaagtgtggaagagtctatgctcccaaatcaacattcgctggcatgggtgagagtgaggtcaccgttttcttctgtggtgtttggctagagtagagcaattattgcttagaagttttctactaggctttctctttctgacccactatctagaaaaagcaggattttgttgagtctttttggtctgcactcattggggtttccagtttgccagcttttctaacacttaatctagtacatatcaggcataagatacccagggaacttatcaacatgttattacttggctcctgagggctctagccagttgactttttccccccacttttcaggatgttatgtttgttttacatataatggattaaacaatacaatcaaaagacagagattgtcagattgcattaaataaaacaagatccaactatgtactgtctacaggagacacactttagatccaaagatacaaacaggttgaaacaaaaagatagaaaaacaaaatcatttcaaaaagcaaccgtaagaacccaggagtggctatactaatatcagacaaaatggactttaaaaacttgttactagagataaaaatcattttgtaaagataaaagggtcaatccatcgtgaagtgataacatttatggagatatatgcacctaaaaaaagagcctccaaaacacatgaagcaaagtctggttattataaaaaagaaggatgacatcaagtgatggcaagaatgtggaaaaaagggaacacttgtacactgttggtgggaatgtaaattagtacagtcattatggaaatatgtatgtaggttcctcaaaaagttagaaatagaactgctatataacctagcaatcctatactgggtatatatccaaggaaaatgaaaccaatatatcaaaaagatatctacgctcccatgcacactgcagcattactcacaatagccacctatgtgtccatcaacaaatgaatggataaagaaaatgtggtacatatagataatggaatattattcagccttttaaaaaaatcctgtcctttgcaacaacacagatgcacctcgagtatatcatgttaagtgaaataagccaggcacagaaagacaaatacagtgtaatctcacttaaatgtgacatctaaaaaatttgaattcatagaagcagagagtaaaatggtagttactaagggctagaggtggggagattagggagatggttaaaaaatacaaaatttcaattaggaggaataagttcaagaaatttactgggctgactatagttagtaacaatgttttgtatgcttgaaaattattgaaagagtagatttttattttttttgttttataatgtacattttattatttttaaaaaattttaatttttatttcaataggtttttggggaacaggtggtgttgggttacatgaataagttctttgatggtgatttctgagattttagaatggtgcacccatcatccaagcagtgtacactgcatccagtgtgtagtcttttattcctcaccacccaccctttcctccaagtccccaaagtccaatgtatcattctcatgcctttgtgtcctcatagcttagctcgtacatatgagtgagaacatacaccgtttagttttccattcctgagttacttcacttagaataatagtctccaattccatccaggttgctgcaaatgccattattgcattcctttttatggctgagtagtattccatggtgcgtgtgtgtgtgtgtgtgtgtgtgtgcatatatatatatatgcacacacacaaaaacatattaaaatgtaatatatagtaatataaaatgtaatatatattacatatatatcatatctgtatcatacgtaatatatatattacattttccttatccactcgttgattgatgggcctttgggctggttccatatttttgcaattgcaaattctgctgctatacacatacatatacaagtatcttttttgtataatgacttattttcctctgggtacatgcctattaatagtagtgggattactggatcaaacggtagatctacgtttacttctttaaggaatcacacactgttttccatagtggttgtactagtttacattcccaccaatggtgtaaaagtgttcccttttcaccacattcatgccaacatctattcttttttgattttttgattatagccattcttgcaggagtgagatgataacacactgtggttttgatttgcatttccctgatttgcttggtagtggcaagttccctcagcatttgtttgtctggaaaagactatatctttccttcatttatgaagttaagtgccattggatacaaaattcttggctgataattgttttggttaatgaggctaaaaataggaccccaatcccttctagcttgtagggtttctgctgagaagtctgtttttattctgataggttttcctttataggttacctggtgcttttgcctcacagctcttaagattctttccttcatcttgactttagataatctgatgactatgtgcctaggtgatgatctttttgcaatgaatttcccaggtgttctttgatcttctcgtatttggatgtctacatccctagacaaaagatcttccttcagcaaggccagggaagttttcctcaattattccttcagatatattttccaaacttttagatttctcttcttcctcgagaacaccaattattcttaggtttggtcatttaacatagtcccagacttcttggaagctttgttcattttttaaattcttttttctttgtctttgatggattaatttgaaacccatgtcttcaaactctgaagtttctttcttctgtttatttgattctattgctgagacgttccagtacattatgcatttctctaagtgtgtccttgatttccagaagttgtggttgtttttttatttatgctatctatttaactgaagaattttcctttcatatcctgtatcatgttttttatttccttcagttggacttaacctttctctggtgcctccttgattagcttaataatcaaccttctaaagtctttttctggcaattcagagatttcatcttggtttagatccattgctggtgagctggtatgatcttttcagggtgttaaagaaccttgcttttctggttctctcttatttgggtagactatgtcagagggaagatctgggattcataggctgctgttcagattcttttgtctcatggtgtgcttccttggtgtggtgttctctcccttcccctatgaatggggcttccggtaagctaaactgtagtgattgtttttgctcttctgggtctagccacccagcaaagttaccaggctctgggctggtactggcaagagtctgcaaagagtcctgtgatgtgatctgtcttcagttcttgcagctgtggataacagcacctgcacctggtggaggcagcaggggagtgaagtgggctccgtgaaggtcctctgttgtgtttttatttagtgtgttggttttatgttggttggcctctagctaggaggtggcactttcaagagtgcatcagctatggtcctatagggagaatgcaaagttgccctcaggacacctggttatctattcaggtttcccaagcagtgggcagggccacagagttcccaagagaattgggcctttgtctttggctaccagggcaggtagagaaagaccaccatgtaggggcagggataggcgcctctgagctcagcctctccttgggcggggcttgctgcagctgctgtgggggatgggggtgtggttctcagtccaatggagttatgttcccaggaggattatggctgcctctgctaagtcatacaggtcactagggaagtgggggaaagctggcagttacaggccttaacctgctcccactcagcccgcagtactagaggttaatctcatgcccaccgtgcccccaacaacagcactgaatctatttccaggcagccagtgaccagggctgaaaatttgccccagaccacaagcctccccattgagaaagcaagcggacacacagttttttggcatcccaggaagcctgaagccaagagtagatttttagtgttcttacaacaaaaaaagataagtgtgtgaggtagtaaatatgttaattagctcaatttagccattccacaatgtatacatatttcaaaacatcatgctgcacaccataaatatatataatttttatgtgccaaattaaaaaatatttttaaagacatagaaaatctgagtggacctataacaactaaagagattgaatcagcaatcaaaaactttcaacaacaaagagtctaagatgagatgacttcactgaagaattctacaaagcatttaaagaactaataccaattcttcacaaactcttcaaaaaacagaatggaagggaacactgccaaactatcaggccagaattatccgataccaaaagcaggcaaagacattataagagaagaaaactcttatatattatatctcttattaatatagacacaaaaatcttcactaaatacaaacaagttgaatcctgcagcatagtaaaatgattactcattattacctggtgggatttattccaggagtgcaaaggtaattgaacatatgaatatacattgatgtaatataccatatcaatattataatgggcaaaactgcatgatcatcttaatagatgtagatgaagcacatgactcaattcatgacttaatgattagaacactctacaaactaggattagaagggaattcctcaacataataaaggacacttgtgaaaaagtcatagctaatgccatacttaatggtgaaagactaaatgctttccccctaagataggaataagacaaggatgtgtgctctcaccacttctactcaacattgtactggaggtttgggccaaaacaattaggcaataagataaaataaaataaaataaaataaaataaaaaaggcagctagattggaaaggaaaatgtatagttatttctatttgcagatgatatggtcttgtataaaaaatcctaaagagcccactaaaaaactattgaactcataagtagttcagctaggtttaggataaaagatcaatatacaaaaaaagttgtattttgcgatagtagcaatgggcaaactgaaaataaaattaagaaaacaattccatttatgataacatcaaaaataataaaatacgtagcaatcaatttaacaaaaaattgcaaaatattctgaaagctataaaaccttgttgaaataaattaaagcagacgcaaataagtggatcacgaatcagaagacttaatattgttaagacggcaatattccttaaactgatctacagagtcaatgcaattcctagcattctagctgacttctttgcagaagttaaacaatttatatgaaaatccaagagacccagaatagacaatccctagtagtagaatcacacttcttgatttcaaaacttactataaaactacggtaatcaaaacagtgtgttactggcataaagatagatgtgtaggtcaatggaatagcattgagagtccacaaataaaccctcttaattacagtaaattgattttgataaggattctgagattaatcaatggggaaaaaatagttgttccacaaatgatgctggaacaactggctatccatgcagataggaatcaatttggacccctaattcacccctacaaaaatttactcaaagtggatcgtagactaaccgtgagtgtattagttcatctcacactgctataaagaaatacctgagactgggtaacttataaagaaaagaggtttagttgggtcacaattctgcaggctgtacaggaaggattagagcatctgctaagtttctgggaaggccttaggaaatttacactcatactgaaagatgaaggggaagctggcacttcacatggccagagccattaaaagaaaacaagtgtaatgttcacgaccttggatttggcaatagtttcttagatatgacaccaattcagaagcaacaaaagaataaactagacatcaccaaaattaaacactttagtggttcaaaggtaattatcaagaccttggatttggcaatggtttcttagatatgacaccaattcagaagcaacaaaagaacaaactagacatcaccaaaattaaacacttcagtgcttcaaagataattatcaagaagttagaaagacaacccaaagaatgagagaaattgcttgcaaattgtatctctgataaggaacttatatctagaatatataaagaattcctacaactcaataatcagtagacatatatcccagttttaaaaagggctgaatacatattttgttatattatttatttccaaatgaaagatctgaatagatatttttctgaagaagatgtgcaaatggccaacaagcacctaaaaagaagccaaacatcactggtcctcagagaaatgcaaatcaaaaccacaatgagattccacttcctgctccctaggatggctattgtattggtttcctatgactgctgtaacaattaccacaattaaaacaagagagatgtatcccctcacatgcccaaaatcagcttcgctgggtggaaatcaaggtgctgacagggctgtgttccctcctaaggccctaagagagaaatttccccctgcttcttccagctcttgatagctgctgacactcctcggctgtggcaatgtcattccattctttttttctgtagtcaccttgcctctactcttctctctacaggcaaatccccctctgccttcttcttagcaaccatcccttttaagaacacacatgactgcatttagggcccacctggataatccaggatagtctcccccatctcgatattgttaactgaatcacgtctgcatagacccttttcccatacaaggtaacattcacaggttctagggataaggacctggatatctttgggggtcattattctacctatgagagatatcacagatgctaaataacaagtgctggtgaggatgtggagaaattagaaccctcatacactgttagcagaaatgtaaatggtgcagccactgtggaaaatagtctggcagttcctagaatagttaaacatagagttaccatgtgatacagcaattccacacttagacatgtacccaagagaaatgaagacatgtccacacaaaaatctgtatacaaatgttcacagcagaattatttgtaatagctcaaaagtgggaacaatccaaatgtccatcaactgatgaacagatacataacatgtattatatccatataacgaaatattatttagcaataaaaatacatgtggatgaactgcaaaaaacacatgcttaagttaaagaagccaatctcaaaggatcacatattatatgatattattaatatgacatgttcagaataggcaaatctacagtcagaaagcagattagtgttgcctagggatagggaggaggatgaggtactagaaagtgatggccgaggggcaaggggtttctttttctagtaatgaaaatgttttaaaattctagaaataccatttgacccagccatcccattactgggtatatacccaaaggattataaatcatgctgctataaggatacatgcacacgtatgtttattgtggcactattcacaatagcaaagacttggaaccaacccaaatgtccaacagtgatagactggattaagaaaatgtggcacatatacaccatggaatactatgcagccataaaaaatgatgagttcatgtcctttgtagggacatggatgaaactggaaaccatcattctcagcaaactatcgcgaggacaaaaaaccaaacactacatgttctcactcataggtgggaattgaacaatgagaacacatggacacaggaaggggaacatcacacactggggcctgttgtggggtggggggaggggggagggatagcatcaggagaaatacctaatgttaaatgacgagttgatgggtgcagcacaccaacatggtacatgtgtatatatgtagcaaacctgcacattgtgcacatgtaccctaaaacttaaagtataattaaaaaaaaggaaaaaaaagaaaatgttctaaaattgactgtggcagtgaatgcacaactctgtaaatatactaaaaaacatctaattgtacacttcgagtgggtgaattttatagtatgtgaattgtatctcaacaaagccattacaaaagtatatagcctaaactgtctagctacaaaatagtgcttgcttatacaaactgaatatatattgctaagaacatagactgaaatccaagtgaaaggacaggcctagatttctgcattgatttatctgtatgagaggaagtgaagacttgagctccccaatgcccgcagtagtaatcagcctccaaaaagcccctaaaattctcatctggcaatattcacacttgtttagactccttccaaattacaccagggttggtttctgtgacccatagaatatggcagaaattacagtatgtctcttctacaattaagttacacgagactttgtggcttccatttgagtgtttacactttaattggataaaagaaaataaaatgaaattgcaactgtggtattttaacttcctattccttcatctgctttcatttttttatctattattcgactgttctgaccagaaattctgataagctaatcaagagacctgacactctgtaatccttatcagtgtaattcactgacagccatctggaaggctttaacttaaaaattccatctactagattacaattgacatgtggaaaccaatataataaaatagtaaaaccagctcctgtcattacacacacatgcttttgttgctaaaattattgggttgtcttgtatattctaaggctaatacatctattgtaataaaaggagaaactgtacttttaatgatatactttttccacgaaagaaacctgcaaacagtttgggcgactttggaggtatataaactacttacaggtagaaaaatgtcctctcttttctcctctgtcccacccaagtcataagatcgcggtgatcttaccataaaacagctaaacaaacatgttattcagaatagaacaaatagtattcatgtcaatgatcacaataactcacgatgacagtatttaactcatcaaggagttcctggtaaagaaatgcctagaaaggtatagtctatacaatttcagctatctgtatgaatttttttaaaaagaaaaggacaaatgtccattcacatttggtattacgtgaattcagccaaagccagtggacttctgaaagcctcagtttgtattctttgctcgccttcaggtatgtgatccagtaacaatgaagacagtgagtaatgagtggccacagagaattcctttttaatagatggctatgatgcaaatgttgaaagtagattcattctttaattcattggataaatattcataagcacctagtatcatgtatatgcctcaaattttggctcctctcacatttatttccaaattttaaggcatgataagatatacttgaggaccttttcctcaaaaacttatcctcataagtgttatccgtggcttgggtcaatttacatcacacataggtctgaatgcatttttttctccaaggggagaatgattaatcttatgttttgtggtcaaacccctctgtaaaaagcagttcacttctgtcctcccgcataaatgaaggatttcaaagacttttgttgaactcaatctctcttttatacaaattgctctgagtttgtcaaatgaaaagaaacttccaattttagaaaagaaacatacatatttagacattagggaacttatatagaataagtaggcttgttgtttataaagaataattcacattgtatattatcctgtgttttctgtcaggtacctccaagtctgtcactgcatatgtttttaaatgatcattgactgaatgatggcttactaggcttaagcttcacacagatagggatcatgactcttttggtttttctgagatggggtctcattctgtcacccatgtaatcacagccaactgcagccacaaacacccagacccaagtgatcttcccatctcagcctctcaagtagctgggatgacaggggcacaccacaaagccaagctattttttaaaaaaatttttgtagagacagggtctcactatgttgcccaggcttgtctcgaacttctgggctcaaacaatcctcctgtctcaccctcccagagtgttacgattacaggcatgagccaccatacctggctaggaccatgctcttaagacaactgtgtccttgatgctttcatgagttcctggtatatttgatgtttaaaaaaattttggttgaatgagtaaatgaatgaaagaccctaagagagataatattatggaagagtgtcaatgatttagaaggactcattcatagtctggaatcaagcctatagaaaatttcaaaaatgaaggtgaaaactataaattcctctgagggagccattcctagtgtctttctagccaagatgtgccccacccttgattcttgaacctgaatatgtgggttcctatgtgcaaataagctgttctgaacttgagccagcatgaggcacactgcaaaggccatgctatgacagtgagtcagccctgagtacacgacagactcactgattacaaggtggcctgtcaggcttatcacaaagaaaacagtagcatagtgactgtgtctgtgtgagttctggctacttctgcgtggttgcctctgatcacagcactgccctagttttctcacgcctgtaatctcagcactttgggaggctgaggcaggcagatgacctgaggagattgagaccagcctgtccaaaatggtgaaaccccatctctactaaaaatacaaaatttagctgggcatagtggcgggcgcctgtaatcccagctactcaggaggctgagtcatgagaatcacttgaacccaagaggcagaggctgcagtgagccaagatcacaccactgtactccagcctgggcaaaaaaggagactccatcttaaaaaaaaaaaaaaaagaaaaaagaaaaaaacaaactcaactactggttgagactagtgtaccttactcaaagtaatgcagcctgttcatgaaattcccattacagatggaagggttaagatcaagtggatcaccagccacagccacaaagctaaggggcagaggggagttggtgggggggaaaaatagaactcttggagatgatactcaagtaaaattcatgggtcacctccctagtgacgttaagtattggtagtgtcatgctcaagcctatactcaataaagtggtaacattttggcaatgtatttggtgagtgactttcaatcctgtttctattaagattttaaaacatagtaagatagaaggaaacttgaggcagagtaatttctagaaatatgggtaaactcatgtttctattctctttgtgttagataccactccagctcagccagtaaaatcccctctatacattttgaattacaatttaagatatgagcaaaaaagtaaaaaattaaaaacaaaaacaacctacccacaacgtgttccatttgtcatgttctggttgagggaactgttagtccatacaatggtgttattcacacatgcttttcctggaatctggagttcttgtaactcaacgtcgtagtcaataaaaacatctgtcattgtgccaaaaatgagtagcacgcctggctgggctattccatggagaaatgcacacaaacttcccacaaacatcagccaaatgtcagttgatgaagaaaaccgaaacttgaaaaacaaagggttcagagatcatctatgggtgaagagcaggagaggtaggaggactacttaatttagttactagattctcatgaatagtactcaacaccaaatttcatgggaatcaccttaattgagtggcagagttcgtatactaattatattgaaataaacggcacggtacatcaattatctaaaacattagactcttacattgttagatcatgttataaatttcctgctctctgaattcattctgtttatttcaggagctgactttcgtttttagctactcatctacaacttaggggaaaataatcactgtcattgatgccattgccaagtagataaactgtgtggggcattgagaaatactataaattgttttgttgaactgatagtgactatgaagaatgccaatttctgcctagaaatgcctccatcctgagaaaatttggagtaaacacctatactttaaaatttctaaagatttgtcataagaataaatatatatatgtgattgttgtgatgactttccttacaaatatgataaccatgggcttagtgataattttccaagacatttttctgatctattggataggatttgtatgctttatgagcaatatatttctaatagttattcagcatgttatcacataggcaaagcctatgactgaaaaagtgatcactgaagttaaaaacctgccaatatgactaaagatttaacactcccctcatgatctaaacaatttatagctgcacacccactgccataaatcaacacagttttattaccaattgaaagaagccaactctaacgccatcacctttcttctcatcttgtaacctgatgagaaaaacataaggatttaaagaccaccctttccaatacaatgggaaattctccctaggtggtgattttatgagttattctttagtaagaaagaaaatccccactggctggaaaattctggccaaacctagtatcttaaacacaagctttattcttctagatttccctcttctagagatttcagtatagctcaatctcaggttcactagcgattcacagagatgaacacctgagaggtatggagagaaagtaaaaagtcctctatactcccagttataccaacaaataactctttgccctcagtcatgaccctcaatctatttgtgactgcatttcctcatgggtaagttgaagtggttggattagctaattttaaagcttcctcatgcttaaaaatattacaactacattaaataatgttgataatgatgaaaaattcaagaacatgcccacacttttcatagaatcatatttccttaatatttcccattcatttcatttcccataaggccatgtttaacctgtatttgacctcttcaacttcggggatcttgacttaacctgagtcacgcagtccatgaatacaccctggaccttgctgtcaccaggaactactgtctgacatgtttaactccttggcactctgtgactgcccatgtacctcattttctcgcttccttcctccttccacacctatttgtcaacctcacttgagccatgcagtcctttaaatccttcatttccttccattgctaaaccccattaagattttgcttccttccccatgcagccaaggtccctctgccaggcatttgaaccacactctcaccatcatcctcaattattttctctacatcatccttgtaaacttcatcctgcatccatccagctgtttgccctcttctccttaagccaggctgctgggcctgctggacacaacctcaccaccttgtgaatggataccaacacaggcagagtctagtactcagctgccctaagcttcccttctggcccagaaaagaatcctaaattttttctgagactccccacggtctggcccttggctctctgacctcacctcctccaactatattctagttctcaacaccccacttgcctggcctcttgctgacctttgtccatgcccaactgttcccacctctgggtgcgggcacctgctactccttctccccaggtgcattttctttaggtaaccacagggacagctccatcacctccgctagaccttcctttgaaatcacctactcaacagagtcttgcctggccaaagtctttaaaatttcaaccccaccccccacgcaccatttcatagctccatttccagtttatttttccttctcagaaagaaagtgatagattatcactagctaccatgctatacatttgatttatttacaatgtttattatatctccctcactaaaatgtaaactcctcaagggccaacatttttgcctattttgttcttttctatacccgcagcacctacaatagtgtctgataccaaatagacactcaatatttgcaaaacgaatgaattaatggagtgaatgtgtgctctccagctcaacatgcaatgcacacttcatttctctgcggattgctcccattcttctcagcagctctggcaaaatttgctgtgatcttctcattccatgctcacctcctctaaaaacaaagcaactcattcaacttcctactcatcctctccttgccattcatctacatccacacccattttttaaacttcccacgcaataagaaacgtgtggctctcagaggcccaggctgacctgaccactcccagcccaaagctaatcttaccactcccacttcctccctctgctgtgaattacttaaaatttctaaaatacctttaacccttccgtttccaccacctccacttcaggaacttacctgatgcctcacttctgtcttctaaattagacctcatctaatcccgccttcataccagactgtgattagctgatatgtgttctatatgagaattcaaaatctttagctgaacagaaatatgcaataatgacactttaggtctctactctttgcctgtggcaagaatttggggtttagagacctctccaatgcccatgaaattatacttgttgttcaacttttcctcctccctcttaggtcaggagttctgtgccattcctgaatacagaggggacatttgaacctaacctagaagggatattccaaaaggtttttaaaatcaaattatagtaatattttaaagagaaaaagaatggattgtatatattattttatatgaagtgcaatgtgcatgaaagtattctctgctttgtgcctttgatatgaatattatggagttattctagaaaagatgctgcattgttgaaatcagtcacttaccttgatttcttatcattattatctgtcagaaaaaaaaatcaacgcaaaaaagcagttaataataatgacaaaatgcaacgcagtcattaagaaatttgctctagaaaaatattcctataaattacctttattcatggaatattagcaaatgactatttgccttttctttcttcctgctcatattgtctctctctatctttctacacacacacacacacacacacacacacacacacacacacacacgaagacactcgtttagggtccaggagtgctgctacctttactcatttatggacttttcttcaggacatgaaatatttgcatcatctgaatatcaaatggacagcaactttttgaactacaaaataaaattgatatttatttattgtctggttctttaaaagcatcagaatttatctgtttaaaatatagaccacaaattaacaataagatgttaataacaagatgtcattaacacttctacactagtagaagccataggattgagaccacatactgttttccccagtgtaggtcagaatagatgcagggcaggaggtgaaagtcagtgattatagccaggggtgtaaggaagccactagggagctttgtcattcaacactatcatgcctgtttactcttattaaagtaaagaagcatgataatgttgacagacggcaatatcttgggcttgggaatcaaacacaactggattagaattatggttccattaattttactcatgagttccttgccaagtttcaaaaacatatccaagtctcagttttgtcatctgtaaaatgtaaaatcatagggttagaaaacaatagcttagaaccatctgagcccaggacatcccaggtgctagtgctataggccccctccacatgatctcattctggtctgcagagtctgggcacagttcttcctaaggaggagcgctcactcaattatgattaataataacaatacaggactaaaggtagtcataacagccaccactggaacaaccctactctatctaggaaaggtgttggtgagagatgctttcatttacacacacttggtgtgttcttacctagtgctttcagatattacgttacatggattctagggagagccacacagttgtgtataagaatcacacacaatgatacttctacctactgttgctgatttttttctgctccttgaaacttgaccagcttgtcctacttttgttctcacctctccttgtacaagatgcagtgagggaaaaaagccactcacatgatttatctgactcaaaaccatcattctcctctccaaatttctttatacttcgaagaattactgagtcagacatggtaattgcaacccacagccaacgaccctataaaataaaataaaagaatcattgcaattattatctcttctttcttctttaatcaaagtagccaaacgaaagaacaatttggttcaagaaataatctttactaatcaatctcagacaaaagttttaaaatcggttaataactccctgaaagagcctaattatcaggaaagataagccacagtcattgataaaggttttctctagttgttacatggatggttgttttttatagcttaattataggaaagataaagcaaaaccattgataaattttcctctagttgttggatggatggttattctttctgcttatctgtgctttatttatttttaatgagaaaacattaaaaccatgagaaaggcaaaccaactggtgatattcttgagtcactgtagttgatgaacgacacccacatactgttgggtaaccttcagtgttcctttgtaaatgcaacctcaaggtaaggtgagtcaagcttggatcaaaggaacagaaggaagacattttctaaataaaatgtaaatgtcgacagagtcatgattagtcttattcacagtggaaaaattagtttatagagggtacaggctgagaattccaggatatagacactcgattcagcatgaagtttatgcttcactaactttctctgcttcaaatatatagcaatggtggataacatgtttttaaaaagagatacagtcagactcaaataaataaaaataaacatcttcaggaaccagaaatggcagagaagtaccgaagagtaagcagagcacagaagcagctggtattttcccctcagcgtctggatgctgacgagtgtgagagtttagctggcgagaggactgtaagtgccccaaatcaaacagggggctagagaccatctcttcgcttggagccagaggagctaatgtgggccccatgcactgctgagaagaccctgaggaaactgctggccaccattgaagcatctattccttatgatgaaatgcagacccatggaggtcacaggaggagaccgtgatatgtattacatacatatatacacacatgtacaaataaaagagagaaagggggagttatgaaaatcttctaaattcacctaattggaatcccagaagcagagagtggagaatgacagaagtgtaataattaaagagataattgctaagaattttccagaagcaattacctgattcttcaaattaacagtagacaccaagaattgattggaatagatatcagtcaaaacttagatacattatatagaaatgtccctcagtatatgcaggagattggttctagcactcccatgtataccaaaatttgcatataccaaaatccaggtatacacaagtcctacagttggcttgcagaacttgtgcataggaaaaattggctctacatatccactggttttgcatcctgagaatactatatttttcatctgagattggttgaaaacaatccccatacaagtggacctccacagttgcaacctgtgttgttcaagaatcaaactgtagtaaagcatcaagaataaacaaaatccatcctaaacactgtgaaaggggaaaatgcatattcaaatataaagaacagactgacagaagttttctcatcagcaatagaggctagaaaacagtggcgtaatgtcttcaaagtgatgagaaaaaaaagtaatctttaacttagaattttacactgagccaaaaaattattcagcatctttacagacattcaaagtcagagggtttacacttacagacctgcataaaacaacaactagaggatgtgccttagccagaaggagtatccagaagggagccatgaaagagagaaacaagggtgagcacaagagttaacaaaatatgtcaggacggccaatcaaatattgataccaagtataaccttttatatttcaaaagaacataattaaaactctacacagtatgtagatatgagtgtaacttgaacacaagataaggtgttcgatatgcagataaagtatgttaagttcattgttatgacaatctgaggacattgttttataattataattaaatacatatttatacaactataattaaatatatgtttgattaaaccaaaggaaattgccaatatttaaccattttttaattacaaagttcaactaatatctgaacaaagttcaaccaatatctgaaaattttaagaaaaagcaatgaaaaagtaccagtaaaatctatagtttctaaataagcaaaggattaaaaactaagtatgtagaaaatgtcatcaatccaacaaaagttaaaaaaaactaaagaaactaaaaaaagcataacaaacagaaaacataaatgaatattattgaaaatagtccaaacggttcagtaattacggtaaatgtatgtagattgaagtactgatacatgctacacagatgaacctcaaaatcatgctacgtgaaagaagacggtctcaaaagaccacatactgtatgattccatttacatgaaatgtccaagataggcaaatctatagggacagaaaataaataagtggttgcctaatgctggggtaggggtaggggtgggaggggaatgaggagtgactggtaacagatataaggtttcttttggggatgaagaaaatgttctaaagttagattatggtgatggtcgcacaactctgttaatatattgaaaaccattgaatactttacataggtgaactctgtgatatgtaaattataccctcaaaaggctgttttttaaaaaaagacaggtcagtttattgaattttttaaagtcaagacatacactttttttttttttctgagaccaagtcttgctctgttgcccaggctggagtacagtggctcaatcttggctcactgcaacctccacctcttgggttcatgtgattctcctgcctcagcctcctgagtagctgggattacgggtatgagccaccatgcctggatcatttttgtatttttagtagagatggagtttcaccatattggccaggctggtctcaaactcctggcctctgattatctgtctgccttagcctcccaaagtgctgagattacaggcatgagccaccacacccagccaatccagacatatacttattataaatgaaataatttataaaatcataaaaatggtccaaaattaaagggtgaaaaggatacgtcatgcaaatactgatgtctcaaagctgttatgttaatgtcagaaaaatagaatccatgttcaaaacaataatggatataataaaggacatataataattaaaagtacaatccagctagaagacaaatcaattattggattgtatatacccagcaacctaacacaacatagcctgcaactgtaatgaaaaatttaaacacaactttattagaaactgataaacagacaaaaaattagaaaacataaaagcttttcaaataaaaaataagtaattttatgtaatttactacataaaatttttcttaaaatttggttgaacattgttcatatattagttgaactttctaagtaaaaaaagattaaatgttggcaatttcatttgatttaatcaaatatatatttaattataattgtaacacaatgtcgatagattttcatgacaaatttcattactatggaacctgcaaccaagacatttttcaattacatttggcatttttataaaacttacccattaataagccataaaaaatttctacaaatgaaaaactatgtatttctctatattgttgttattcttaagggtgtatattctgacaatgcaattaaataaaaactaaaaaattaaacactagtaaaacacacacacatatactcagtaaaattgtgtgtgttacaaactttaaaatacatatgcagataaatatgggttaaggatgaaatcatgacagaaatagaaaatatttaaaatatggtgataaatatgtaaaatcttgtgggctacagctaaaaagatacttcaagatttatttataaagataaatgcattttgcttttaagagattaatgaatgaattatgttctaatcaagaacctaaaaaatgcaagatttataagatagaaaacaaaataaaatgaaaaacagtagaaaggatatatcaattcaaaagttgttttttgaaaactaaaaacatgcaagtcaataagactgttgaagaaaagagatataaatcacaaatactaattgaaaatgggaaaggtaaaataaataaagttttaaatcataagcaaatactaagtaatttcatggtagtaaatttgaaaaccaggttaagattaattttctagaaaaatatgagttatcaaaatttgtttataaaggaatagaaaacttaaaaagtaatggctattaaaatattgattcaatattcaaaagtctcccacctcaaaaaacaacagggctagataatgttacaggcaaattttaccaaaacttcaaacagtagataattctaatcttatataaatagttttggtgaaaagaaaaataagaaaagctacccaaatcattttataaagcaagtataattttgacatcaaaacaaagaaggataaaaataggcttataattacttctgaaaacagattttaaaatgataaataaaatatgttaaacataattcagcagtttatgaaaaaaatgaagcaatgttgatcccaggaatgcaatgattatttaaggtaaaaaataattaatcattttcataaatgcaaaaagtattcagtaaaaatcattatccattcctgttttgaaaacctataaaattaaaaaaaaatcattattttgcaaccctaatgaataaatttggggtaatgatcagcagtgaatactaaaactattcattgaaatattggcaaagatgaaatatccagtagtacaaagtgttgttaagatgtggaggaaagagtcctttcatgcacagctaatgagaatataaattgactgaatgactttggatagcaatttggaaatatctagcaaggctaaacatgttaataccccagatcccagaatatccttctctggtattttcctcaacaatttaaaaaataattaacaatgaaatggcatttaatacgtggcaggcactgttctaaatgctttatacatgctatgccataaaacctcccaacagcctcctgagatgggtattatgactatccccgttttccagataagggcactaaagtatgaaggactaagtcacaagctcaagagcacaagttagtaagtgatacagccgagattgaaactcagaaaatgcatgcagagatatgtgtaagcttgtttattgcagtacttctttggaaacaaaaagctaggagaaaatacaaatgaacaagagattgattcaataatctatagaatagacacacagtggaatattatctagccattaaaatcaatgaattggcatggataaatctcaacaaacgtaagtttaaacaaacaagacaaagtttcagaatgatactgtatgataccatttatgtaaattgtgttacctgcaaatcactatttgtaatgttcgtagatatatagatacgcagtagaaatataaagacttacctgaaactgataagcactgaattaacgatagtggttacctctgaggaaaagaagtggaatgagactggggaggggctcagagggcccctgaactgtatctgcatgttttaatttcttaaaacaaaaagttccagcaagtatggcatagggtttaagatacgataaagttggaaggaggtaacttggtgttcattaagtttttctcttttttttcctgtggctttaaaatatttcatgatatggatacagggagcacagggaggggaacaacacacactggggcctattgggggagggcagtggggagagcattaggaaaaatagctaacgcatgccgggcttaatacctaggtgatggattgataggtgcagcaaaccaccatggcacacgtttacctatgtaacaaacctgcacatctggcatgtgtaccccagaacttaaaataaaataaaataaaacttaaaaaagaacatatggaaagctggataatgccacaaaagggttaatgttagcaagcttgggatggaggcactatgcaccatcatcatgtatttttccatcttaagcagcataccactcctaaataaaacaaaatcattttgcagaaaataaaacacttcatgacagaaaataatttttttcttaaccctggtgaatctcttttaattaaacaaattagagcagttttgattttatagaaaaattgtgaagatggtacaaaattcccatgtaccccacacccagttattaatgtcttacattattagtattaatgtcttacattagtattaacgtaccaatgtgcactgtaaatgtcttgcattagtattaatgaaccaatattgatacattattattagctagagtgcataatttattcaaattcccttatttttcacctaattccttttctgttccaggattccatctaggataccaagtttataatgttatattaagttgtcatatcttgttaagcaactcttggctatgacaatttctcatactttccttgtttttaatgaccttggcagttttgaggagtactcatcacttattttgtagaatgtcccttaatagcatattaagaagtagagtaagaaatattatttaattaagtagtttatgaggctggtttaaaatatactaaaggaaccagattcaaagttattttattcaagaacaaaatttgctcactatagcagtattatattcagagactgtaacatttgccggttacacaatttttgaagttttaaccaaatttttttttcaaaaaaacagagagactctttaataatgagaaaataataaacaacatttaaccacagatgtgttattgcatttcctaattttaaaatacaatattaaaaaaatttagtctccatttattttttcccttggcttagctctccatttaaaaagatttctttccactggtgtgcaaatacctcgtagtatttagaggacagtggtgtagtgtcttgcccacgaaatttggagtctctcagatcctgatacacctgttgcttcactctacgtagttggatttattttaaaatctctctccacgtcctgatttctccatctttcatgtcaggaagtggtggtgatggtggtaaaatccaccttgcaggactggtgtgaagatgaaatgaaactgtatctctacagcagccagcaaaagggagatagcagctgaagttccctttgcccttcaagcttaaagaccgagtcctccctacctgatcctccaccccatctgcccttccagggtcatttgtagtaatctgtcctccattaagcacaggaatactaatccactaacctattctctttactttccttctgtgtccccttgtcaattccatacattaggtttcaattgcttacattttgcttctttccgaatacccctacaaatagtttttgtggtttctattttactgttaaaagttacattctaaaaggcaaaaatccattaaatcatgcgtctctatgcccacagcattgtcaatgcccctcagtcagtgagcaccaagaatacatctgtagctaaacaagtcgtgtttgctactcattgcaccaagggtgaacacactgtcaggggctgtggggcatctcagtaaaatggtgttagaaagaacctgttacagaactcgggctttagtcagatgatttggggaaggatctaatgtagtgggtatttgttctaaattggatgctgttaaaaagctgggactatgttatgactagataaagaaataacagccattcatttagcaaggtgtttggtattttgtgggttgcacagtgaccttgattttgcctttgctgagaacaaagtataaattgaccttgcattgactcaaagtaactttgaggttggtactctgtgagattgtttatgtctaataagagaataacatggcttaggtgtgagtaccaggccagctatgaaatggaacagggtgttcttttgtttgttttctttgtttgttttctttctcagcatcaagtgcatcactctgaactttggtagtccactgttcttttttgacatgccaaggagctatacttcaaaagatgtatactctctagggctaaaggcatgcactggttgttcagtcagaaatggaagctagtccctttatctttgggcagcttagaaacggctgtgatgatttttgaaggccattgtgctgaaaatcttaattacttgcatgtacccacaaaaacactgggaattttataacactaagtttgggaaagtacactgaaaaaccgaaatttctagaaagaatgaaggccttgcctgtgatatttgccacaaaagaggttttcagaattgaatattagatgaattgccatgtatcattatgaatgtagaatatatatctgatatatattattagaccatgttttcttccactggcaaattattttttttatcagatgagatgttgggaaacccatacatcagatgctggaggacatggctgccagtctctgaaaccctggaaatgcagtgggaatctagtttttggtgataaacatatttgttttgcaggttcttgagagtgtacctcctcctcatttggcactttctatgatttaagagtaccatggtgttttgccacattatttttcctcactgattacaagtagatataatgtcacctagttctactgtctcggccattagctgtaacacttttttagcacctaacctaataacttgatttgagtttcatacattgaaggaggctttaattagggtttcttaacaaatttacaataacaaaattttacttaaactaacacaagaaaactcagagttgaaaataacatccaatgctatttcatttttactgtgcactttaacatattaaattattttaacctccccaaaatctcttcaggaacagactgagaattttcaaggcattccagaaaaatgtattttccaataaacttaagggaatctaagagtaaaaagcaggaaatcgagatgtctaagcactagttggcagactttggacacctaatcatagaatcccccaagaattcttaattgtccacaccaactccagtgttcctctctgctaagtgacatgtggtctataacctgcacactatatgcgcttctgtttaactattcagggttgaagttttctcttgataaaatgtgtaatcttatcaacacagatacgcacattagagaacagtctcctgacaattactggtaaaaacatatcaaagatgtttctatcttacactctaacaacagcattctgaaagacctcactgctggggaggaggggatggggaagagagaccatcagctagatggtcacttgagagaacctagtactttgactgaccttaaaaatgggcctgaatgagtagtaccacaaaggtcctgaggctgtcaaaattggaggagatacagggttctacaagccatgccagaaagaaatcaaagatcctgagagcataaaatgtcagtgcccactacttgccactacagcaaggctgctagtgtgaactggtggggatgtcagcctggagcaacagatggacaggctgatcttcaccaatggctgggatcaatactagcaattggctattggtattgtagaagaattgaagaaaaaaaaagggtcagggttgagaaaaggtgtctccagagctgaatccttctgggctgaaagataccattaccatcctattttataaatacagttttatgggaacacagtcataccctttcattttctattatctttggctgcttctgtgctacagtgacagaatgtatggccctttctctctcccatacctaaaatattcactatacagctctttgcagaaaatgtcaatccctgtactgtgagatcagttcagggcagcctgaggcccaggaagaaatctctgaggacctgatttacctaccctaaaaattgtgtggagcaccagccctccagccagccctaccctcatggaacttacaatgtggcagggaaggcagacattatctgggaaattaggcgtcaagcaggatggcagtgaggaaaggggaaatacaggcatctcctgggccctgatgcagaggagctgccttgtctagagagctggagaaggctctggagcaagtgcttagcatgagatgttgaagatgagagcaagttttccatgggaagaggagagggaagagcagtccaggcagggaaggacacatgcaaaggcccagatgcaagagacagggcagccgggtccaaggctgaaggagcccagtgaatctcagggaggcggatgggcaactcgggaggatgtggctggttgatccttcagggcctcatgatccttaccactgagaacttgggaccttatcctaaaggccatgggaagctaatgaagtcttttaggcaagaaaggatatgatcaaatttatacttaaaaaaagttaccctgataaggcttgggacttggagcccacacccacagaggttaggaaatgggtttgagaagaatagagatcccaccagaccaagaggcagagatggctctgtctgtgttctagggttttgcattttctctgcagagatttgttccactttccatttaatttccacccaaatgctattttttgaaacatgttgaccttttctagacttaattaaggaaaaagagctttttccacattcaggccaagatggtaagaagaatctaaatgtcctcaaagccattgaggagctgaggacagtgaggggaaccaagccaggcccgggagtggagagcacccgcccccaccatgccccacatcacactgtgaatattctgatcatgtgagggtccctccacggcttttctcttgtgaagtcttgccctctgtaaagactttcaagaccccagcgccacaaactcccccttcacagagctgctcagagagaacagaactgcccctgctcctcttcaatttggatgtcctttctaaactacagttttcttttctttcttttttttttttttaaagcccttaaaacgtctttcactgctgacatttaaaaatgtaggtaggatacttttgttattatcagctcagcaaatgatttctttatctaaaagattattagagaaggaaagaaacatttaatatatgctaagaaacaaagaaaatagaaaggcattattttccagataagctcactgtcggttgatgctgtgtgtcaacactgtgggtgacccagtctgggaatagactaaaatgaggcccttccagccctgagggctatggctgatagggaagggaaataaatacacggtgatcccattggccacgtaagtcctttcttcagaggcaccgttgaggtagaggactaaagaattgcttaggaagaaaacagaatgtaacaccaaagttaactgccacagcgattctttgtctctaaatgtacagttctttcctcttttttttttttttttttttttttttttgagaggagtctcgctctgtcgcccaggccggactgcggactgcagtggcgcaatctcggctcactgcaagctccgcttcccgggttcacgccattctcctgcctcagcctcccgagtagctgggactacaggcgcccgccaccgcgcccggctaattttttgtatttttagtagagacggggtttcaccgtgttagccaggatggtctcgatctcttgacctcatgatccacccgcctcggcctcccaaagtgctgagattacaggcgtgagccaccgcgcccggccagttctttcctcttgaccaagcaaaacacaactccagtatttgatttctgcaatgaaacttgggcattttatggcaattgtagcatcttttaaaaccacaaaatgggcattttccccctaaatagcttcttaatccatttttaggagtcatcccctaatatttgtcaccattattcttggtactaggaaacaaaaattattcaaggggcttgcaatctagagtggggtggagtgtaaacagaagctcctagacagggaaatggaggcttcaaccagagacaatcacagtgttacagagcacagcagggggaaccaaggtgaggggggtgagcagtgaggggacgaggttgcccacagaaaagaacttctattaaacaacagctcataaataagttatcacttcaaatgtttaataaaaaccactactaactcctaatattaaaaagttttaggtataaccactataatttgtctctaacatctctaaaaagctattccccctcaaaatgttgacaaatactgtcttttattcccagtctgaagtgtgaataatatttgatctctgtgctcaagccattagcaatatgtgactcccactggcttgggtgacctaaaaactgaaattagatcctagaaacaaactttctcccctctaaacatgcatccacagctcatttttttttgcatctatatttttgaaaaccgggacaatgaagaaatgagtacggtgttggagaaaagataaagtcggtgtagttctgcattaaaccagctttcaagggtagaatttgtgatcattgaatctgtgattatcagagcaaacagaattgtgctttcacaaagccaagttaaaaaagaagcccactggtatttttactttgagcagattattcaatctattcggccatttgtaccacacacccatgtacaccactctctctctctctaagagattgatacatgaaatagcattgctataaagaagacagcaaccaagagtcatctgtattgtatacaatgttgtgaaatcattaatgcatcctgtaagtttctatccaagtattgtagcgttgtttacactggacaagagaccaatgtttaataaaccagaaacactccactccacaaagtaagagttaaagggaagagggaatggatttgcagagacaagtataagttacttacctgtgaatatgaatttgaggaagccagaggaaataatggactccactgtggagagttaaaaggtttcacaaccttttccaacctcggttttcatcattctaaagcactgaacagaattcaaactttttcaagaacattatctatttgcctaaggatcaatgtccctaagggcagcccaagcacagttcagtgacatacgagaaacatactcagagcaataaccccaaacacagagtgtgcttgggaaaccctctgagggtgtcaacaggccttggaaattgctgattcaccttggaacgagaggcaaattgagcagagtgggcccagcaagagccctggaattcaggctatcccaacccttattttttacaggcctgtagttgtgaaaagttacttaaaaacataacaagacaaaaaaaaaaaatacctttaaactttccccctcaatataaaagattgctcttggaaaatccctggttgcaggatccagatgctcctggcccagctatagagttttgtggagacaaataccctaaaagaacatttgaaacagccttgctcaaaagtctgagtgcacagacaactcttgcaccctggcatggacacaccagatgaagctctgtataagcaaagatgaacgattttctaaaggttcaaatgaacaggtcttgagtcaaataagcatgtggagctcctccaatatatttgtgctgcctcttcctctcccttcttgtgaatctttccatttttcctacaatgttcttattttttctcctttgcctgagcttacttttccctaaatgcctctcactccagccttcagcaatgaataataataggcaacattggtcaagacttggttgggtgcctggcccacttcaaaaatgttatttgtatcacctcatttgggcctctcaacagccctaggagttgggtgctatcatgtcatttctattttatagttggggaaactgaagcacagagaggttaaataatcctcctaaggtgtaacaactagtagatgtgaagccacatgccagtctgtgctaaccttcttccactctgtgctctgaaatgcaattgatgggccagtgcttcttaatttgcagaaattaaactgtaagatcaaattttctcaattttaggtttctctgtcataaattttttattaaaattcagcatccaccattttttctctattggaatttatgtataagatggtttatgacttagcccataaaacccaaaattataacatataattttatatgttattatatgttcaaatctcaaatatatcaaggtcagcaaagaaaagcaagatttctagatgtttcctctatgcaaactgaatgggttgacttctgagttgacgcaaatgtagtaatattggatttggcaccaattaggacccaggaaaaaaattttgcttcacacaaaaccaaaaaggcaacacagctatggggctgtagctttgattgggaaaagattcccaatagaattttgctacctttgctgtgctgaagttattgacagcagtcaaagggtaaaaatgccaagagaaatttgtcaactcaggactatagctgatctgctcacaggtccaagggtcctaagactttccttctggtgccatgaagatccaagggaagataaaagcatagagttttagagctagaaacaacattgtaaatattgatatatcatccaacaacttcatcttatagatgagaaaagtgaagacagagtggccatctgtccagggccctggagagttcagggtgtcttcctctgcaccctcatgctggccagacacatctgggcagtgtgagtactgagttgatcgtgcttaattcacttcagctataagcttgtcttctttatggttcacggtctgaaaataggtagggttgtggtccctacagtcacccaattaaaataccggctctttttgaatgtttatgtgccaaacactgttctcagttctgggattcaggaatgaataagacagacgagaatctctgcctcaggaatcttacattctgggggcagggagggggcagtatagagaggagacaaagaagtaacacatacaatacatcagatggtgtaaatggtatggagaaaagcattgcaggaaagggatatgatagggagtgtgtgtacgtatgctgtgtgagagagagagtgtgtttgtgtatgtgtgtgtgtcagttagcgtgtgaggggagaaggatgttgccatttttaactgggttttatggaagggcccactgagatggtgacatatgaggaatgacctgagggaggtaaaggaacaagtacatgggtatctggggaaaccacatgggcaaagctctgggcaggagcatgcctggtgtatgtaaggaagctgaacctggagtggagtaagcaagactgaagtcagctggggattatgtcagtgtggcgggaatcatggagtgccatgagctcacagggcagtggctctgaaagtgtgactactggaccagcagcagcctcctcattacccagtaggaatgtatgttcttggtcctttcctgagacctactgaatcagaaactctgggagtggggcccaatgagctgaagcttgaggaccactcctgtagagccttggaggtcactgtggaccaatttggaacctgtttcaaaaccttagcaaaaatgtctcagagaaagctctaaaccacaatggtagaattcagccaatagttgtttaaaaaatattgaagattgcactatggaagagataaaagaagttgccattattttactctttgaatcattcaaaaactgattgagtatcttctttttacaagacactatgtcaaatgttacgctggctaccaagttgtacacattacagttagtgtccttgagaaagttttaaccttaaaaggataataaagcttagtatataaaccaagtaagaataaaaaagaagaacagcaaatgttataatgtttgatgcagaccttaagtatttaaaaagtgacccatcagtatggattctcaaagaaggaaggacttgagttatatctcaaagtatgagagggaccaggtcataaatacagcatgagtgcacacaggcaacattgaaaggaccaagatggctgctgagagaagaggcaaaaagtggcttgtaaatttgcttaagtaggtgaagaaagacaaagaagggctttcagtgccagtaggatgagttgcatgcagtctaagataagaacttctgttcacggccacccagggccagtgtttacaaagctgagccacaagaaggatgggttaggcaggaagtcttgcacatgcacaccaatcacagaagctggttattaccaccctgaaaatcaatataaattgtgtaaagccagcatgagtcagttaacacaatataattggctatgtttttttgtggcatagagactagcagagagaaaaatgtctaaattagagctttcttaggtagcttatgtatttttaaagcaagctgtgtggaaggacacaatttctgtagtttagttgactgcagagggaggcagaatggtatagtgaaaagagcacaggcttgtgaagtcacaaagaactggctttagatcctggttttgccacttacttgttggatgatttggttaaggtagtgatacttgctaattatttcccctcatgtgaagtccagtaggccttgaataaggggaaatcggtgttgggcaaaggtgctctgctccatgcagtcattcagagacccaggctgacagaagctctaccatcctcaacatgtggcttttaaggtctccttggacatggacatgtatccatcacacagggaagagaaaatatggagcattttgtatggaaagttcctgtgggccaatcctggaagtggcatccattacttctactcagattccactggagaggactgtgccacataaccacacctaactgcaagaaagattggaagataaggtcaggctgtgtgtctgggaggtttagttaaaagttaaccaatctcaagagatggtctttgaaatcacaaaggtttgtgttcacttactagctatctaactttggacaagttacttaatctccattagcctcagtttcttcatctgtaaaatgggagtgagaataccacctgcacaggatgatgaggcctgcctgaacttccctgtgccatagattctggattgggagttcctcccccaagtagccatttaattgaattgtgtatatttttttacctaccaaaattagtgtattcctaattttgtcatgtacacatgtagaaaagactggaagaagtacaatataaaaagtgcttatctgtaggttatgcaaatgtgaatgagggtggttttcattttcttcctcatgcttttctgcatcttctaaattatatacaataagggtaaactattttttaaacatataagttattaaatgaaaataatgaatatgacaaaggaaatatcaataataatgcataataaaattttattaatgatttttagaaatacatagagagtacaactatgtgggtgttctccaaatattagctgtagttcagtcattgctttttttctgggaaaactctgacttctgcagaagggatggggccgtcatctggacatcacaagcaaagtttctgtggattcaaagcccattaagaacttgctttatcctaacacagaccagccctgtgtcatggtacctgatgctcctgctcagtggtgtgccctgaatgtcctgaacctggaggtagatccaccctatcccagctctctgcctcatctggctctcccaaaagctggctatcactgatcccctttggctcagtgcctagtttgctccacctccacatcatgtctgggtagggctcctggaattccttcaggcctcacttgtgggccatttagagtaaaatagtgggcacatacaacacttcattatggtcttcaaaccatgtttcctttaagatgatcttaaggacgaaagtaagaaatagtgagttgagtaagtccaatgtattattaaatgttttatgctccctctgtagaattaataacgccaaataagactaattacaatcctagcaagttgtcatttatagttatctaaatgaaatacattgatctccacagcactcagtacttggttagaatttatatttttggttctccctctaatgaggaaaaccagcacaaaaaatatggacttcattcataagcaaatcttttctgatgtttttgagtgcggtagttcttgtctttccctgaaggctcattattgtgcataaagttataaaaattataagggtacctttataattgccaaatgaaaagaaataggtgaaataaataaagaagaggaatcagagagaattctgctacagaacaaaagtcaattataagtaattgtgcctgcagtgttgaatactcatttgaactgtagaatttatcactcgcaaggggcaagtctgcctgggggtatgggtagattggattttcatgtcttggctttatccaggacacctcccttcttaaagtcatgtttcagtcgtggaaactattcctttgttgaggtggaagaggaggtgataagaagtgggtgcttgttaatagtcaagcataggtcacagtgatctatgtcaagtggttataagtaagctgtgggtggtgcctactactccctagcttaaagcaaggcaattcatactcaatgcaacatgcttaggtaataagaaactagtttcaccaaattagtcaacacatctttggtcagcaatctagttgcctcatgaaatcaagattcagttctctatatgagcttttcgatctaagtaaatgttgttataaatgtcgttaaactaatatttttatctttgaaggggaaaaaaggaaggcagacatattatttttattgttatgtttcatatggctgttcataactttccagttccacccttactaaccctgggtgactcctcacgactccaggaaacttaggttgtgaaacactgctctgaagccataagctgtctagacctgggccactaattcattgcttctcactgactaggcacacatttgggggtgacaattttaaaaaacaatgattaagaacagttaactacagggaccctgagtttgggcaccaaacctcaaactgaggtaggacaaaatggctctaggctagtgctttatacatagtaacttatttattctcttcaagataataactcatctctccggttaatgagaaaactgagattcagaggttaaataatttacttgtccaaagatgcacgtgtgataagtaggatttaagcccaagcccacagggctccaaacatataccccctccacaaagccaagttgctccttaaagacctttgccaattgccttactctatcttgtctgacagtcactatttgatgttagtactttcttccttactaacaaaaccctaagtttggaaagaaacacattcagggaaggtgggctccaggcctagccccagctccaaagtctaaatcagtcatggtcattccattcccctactccttttgatagaatggagttaagacatgtgacccagttctgttcagtgaaatataagaagaaaatctgtggagatccttctgggaaattttttttttctgacgaaaagatggcattttaacaagagaagttattttgcccttagatttttttttctgttttcaacactcatgtgtgagaatgtgatatcaagagatgcagcagccatttggtgaccatgaggtggcataccaaataatggagagccacatgctgagaatggcaggatggagagagacaaagaacctgagccttggtggtatgactgaaccagtgaacaaaccttctaaccaaagacctccaggttttatgcaatgcaaaataatgaagtcgtcattactgagatggtcttttatatgccaattgatatctcttacatttctagatagcttcagaaattaaattgcattattactttgcaaaaaggtatagacaaacgcacacacacacacaatttcatatattctgaagattttattatagggaattgagaaaatgacacaagaaaggaaaaaaaaaaaaaaaggaagtccagctaagaaaactgagaaaaggaaagaacagtacaactaagtgattcttcaatgactcatctcaaatcttcattccgatgacttctcaaggcttcgctgagtgatccctcacccaaatgattattgacttccctctcctccctcaccccagatttctcatgtgtcactgccaattcaaattcatggctaaagcactaatctctttccacacctctacttcctggaatcctttcttgttatcagtcttatatctatgcccaattcagccagccattggggtaatgaactttccattctagaaccacagtccaatttgcctgttacctcactgagaaggctctggggctctgacaaacactgctgtgagtttcctgaaacctacttttttttttttttttttttttttttttaacttttatttcaggctcaggagtacctgtgcaggcttgttatataggcaaactcctgtcatgaggatttgatgtacagattatttcatgacccaggtactaagcctagtaactcaatagttaatttttctgctcctctccctccccccatcctccaccctccaatgggcccccagtgtctgttgttcccctctttgtgtccatgagttctcatcatttagttcacacttactggaaacctcctttggccacattttgacactatgtcaggagaggttggatcctccaacccctgccgagatcactgcagatacttagagcctggataagatgatcaacagtgctttaaatagcttatattttaaaaagctgtgctgaatgttttgcaggccactgaggtgcggacatggttttatatcagtgagatcacaggtgagcaaggtgttattggctataatgtttgaaaatcagcctttaacatctgattatatttgacttcttatttgagtgtccttggaccatgtgtgatcagactgctatgtgaataaaataagataatgtataaattttctataacttcttcatgcataaaatcctattaacattgctgatatttcctactataccctaaattcccaaacattcaagtttaaatttttcactttaaaatactggtaaaaattcacagcactactaagtttgacatccttcctcataactttcaatgttggttgctttttttttttttttttttttttttttgagacaagggtctcactctgtcacccaggctggagtgcagtggcccaatctgtgctccctgcagccttgacctccaaggctcaaccgatcctcccacctcagtctcccaggtaactgggactacaggcatgcaccaccacacctggttaatttttatattttttgtagagacggggttttgccatgttgcccaggctggcctcaaactcctgggctcaagcaatccacccgccttggccttccaaagtgctgggattacaggagtgagccactggttcttaattatcatcttttaagtctctaagcccctaaactccttacagctttcaactcttgagactcacttcctctttttttcacacttccactgtcttgacattttttatttctccttgcaagggcctgcagctgtgttttttgatttttttttaaatcagtaagtctggtgataacgaggaatggggaatcaaggatgaccccaaaattcctagagaaccactggatgggtagaagtgttatttattaagataggaacgaactgagaaaaaaaataattgcaaaagtaaaactaagcgttcagtttttaaattcatttattttaagatagtacgagatctctaagcagaaatgtggtatagcaattgggtctggaactcaacaagtaacaatagactggggatatcaattatggagtcattggggtgtctacagtatttataggcttaagagactataatatcttctaggagaatatagaatgagaagaaattctataattgatccctgaaggactccaccatttagggctgggccaaagaagggggaatccataaaaaaggtttaaaaattggcttatagaaaagcagaataaaaaccagaagagcttctagtaattaattctggaaggtaagtttttcagatagttcatcttttcagcatatctgagagccagacattgagccagaaaaaaaaaacctcaccattattctctacaatcatcaaagaagaaactatactagaagaaattaaactaaattagtagttttggatcaatctggtatccaaatgaagacatagaaaagggattcaaacatcattgaagtggcttggtaacatcattaaagatggcagagtagggaccttaaggggcctgtgcctccccagaaaaccaaaaatatgggaaaaactgtcaagatcatccttattggaactgtggaagataggaaaaaggtttacagcaaccaagagaggtcactaaccaaagaaaggtcactaagacacagtaagagagctttgtggcattttaatttaccctttccccacccacctccttggcttgatggtaatcttgaagatggcagcctgaatccccagtataaatatatggtcctgaaggacgtagagaaaaccttgttcccaaggaatcacatttgttttgatccaacttggggtttcctgaagaactgacacaatggacctgcctttctattgcctaacttggaaccctttcagagttgaggacattcttcaaaaacattgaaagataaatgaacaagcagctaccacctgagacaaaaatcaagaattgaagcaaacaatagacatgacaaaagctgggtaggaaaagctggggagtgagactctttggggaataagggatttgaaatgcttctttgagcactaggcaatctagaaagtcacatgtatacccaaggcaggatgtatgcacagaaaagaccataagttttcacttctagctgatcttgtggtttagcataagcaagaaataaacactaattcatggttgtaaacagcctggctaagcattcaggagtgtccaacacagccaatcagaaaagatctgcagattaatttctttttttgacatctaggtaaatctctgtcaaacagctggctggctattaagctgagaaaaaaaaccagaaacttcagggatcaacaaagaagatcccagaaaaatagcttaggaaagtcactaaacaaaagaactattaccctcaataagaaagacaaaaaaatttctacactgagaagacagtatgattttcaaagttatcaaattataaagttcaaaatatccaattttcaactaaaaactacaaagcatgcatataataagaaaatatgacccagtctaaggaaaaaagaaattaacagaatctgtccttgaggaaacccagacattgggtttactagataaaatctttaaatcaactgtcaactgtctgtaaagtgcttaagagctaaagaaagccataaacaaacaaaaaaaggaaaccaaaagaacaatgtctcagcaagtagacgatatcaataaaaagaagaaattataaaaacaaaccaaatagaaattttggagctgaaaagtttaaataacagaaataaaaagtcatcatgacagtatatctcagctgtcagaagaatcagcaaacttgaacataagtcaaattgaaattatttacttaggccaggtgcagtagctcacgcctgcaatcccagcacttggggaggttggggtgagagaatcacttgaagccaagagttcaaaaccagcatggacaatatagcaaaaccctatctctacaaaaaaagaaaaagaaaaggaaaaaaatacactttcaggagcagaaaaaaagggtgaatagaaatgaacagagtctaagaaacatgtgagacaccttcaaatataccaatatgcacataatgggagtttcaggagaaaagaaaaaggggcagaaagaatatttgaaaatataatggctgaaaactttccaaatttgaagaacaatgtgaatctacacatccaagaagctgaactgactctaagaaaaataaatgtaaagaggttccacaccaagacacactataatcatacaactgttgggagacaaagacgaagacagactcttgaaagcaccaagagacatacgattcattgcatacaaggaatctcaatcagattaacatctggcttctcagcagaaaccatgaaggccagaaggtagtgaaatgacatttaaagtgctgattaaaaaaacaaaccaacaaacaaacttatcaacaaagaatgctatacctggcaaaactatcattcaaaaatgaaggcaaaatcaagatatgccgcgagaaacgaaagctgatgaagttggttgctagaagaattgccctacatgactgcccaggactaaatggcttcactggtgaatgctattaaacatttaaagagttaataacaatccttcttaatttctttctgaaaaagaaaagagaaaagaatattccctaattcattctatgaggtcaatattgccctgataccaaagccactttccttaggaagatgaaagcaaaaatttccaataaaagactagaaaactgaaatcagcagcatgttaaaaggcttatatatcatgattaacagggttttatcccaggaatgcaaggttggttcaacatacaaaaatcaatcaacgtagttgatatggtttggctgtgtccccacacaaacctcaaattgaattgtatctcccagaattcctacatgttgtggggggaacccacaaggaggtaattgaaacatgggggccagtctttcccatgctattcttatgatagtgaataagtctcatgagatctgatgggtttatcaaggatttccacttttgcttcatcattttttctcttgcagccaccatgtaagaagtgccttttgcctcccaccatgattctgaggccttcccagccatgtgg

SEQ ID NO: 7 - DNA, 128335 bp, Mus musculus
aattcctaggcaaatggttggacctggagggcattatcctgagtgaggtaacccaatcacaaaagaactcaactgatatgtactcactgataagtggatattagcccagaaacgtagaatacccaggatataagttacaatttgcaaaacacatgaaactcatgaagatccaagaccaaagtatggacactttgccccgtcttagaattgggaacaaaacatgcatggaaggagttacagagacaaagtttggagctgagacaaaaggatggactatctagacactgccatatccagggatccatcccataatcagcctccaaacgctgacaccattgcatacactagcaagagtttgctgaaaggaccctgatatagctgtctcttgtgagactatgctggggcctagcaaacacataagtggatgctcacagtcagctattgaatggatcacagggcccccaatggaggagctagagaaagtacccaaggagctaaatagatctgcaaccctataggtggaacaacattatgaactaaccagtaacccagagctcttgactctagctgcatatgtatcaaaagatggcctagtcggccatcactggaaagagaggcccattggacttgcaaactttatatgccccagtacaggggaatgccagggccaaaaggtgggagtgggtgggtaggggagtggggggagggtatgggggacttttgggttagcattggaaatgtaaatgagaaaaatacctaaaaaaaaaaaaaaagaatatcttatgtgttaatgagcttcccttcaagatggaatgttttatctctgagaaaatcagtgtgtgagggatggaagtttatgaatttacctgtacctgctacaaagcagcaaccgaactggactcagtgttagaggatgtgtctagtcctgcagtgacttgatgtgccagggtggggtgatacccccttttcagagaaggggaggagaaagtagctgtgtgaggaagactgggaggagaaaggagactgatactgggatgtaaagtgaaaaaataaattaaataatgaaaaaagagtgccaaacataacttctgaagctctctgggaatgtaagcattatcagttaacatagatgcaatagcagataaagagatttcctagtgataatggcttaagtaacaaaggcaattacttcatatgacatggaacatggacatatggtgtttagggttgatttagtgatttaatcttatcatcaagtacttgttgtttccacctctccacccccaccatcctcaatatgtaaatcttcattattactgccacatcatggtcaccaggtggctattacagcccttggtacatgttgaaaacagaaaaaaaaaagtacaagataatttctcctggtagaatttctgaggaacatttcagagtaaaaagtccaatcccacttctgggtttgaaaaacctaccaagacccaccactcctgagcttggcttgaaatctcaccaatacctaccctggaaatctccaccattaaaaactctgccacacaagaaatcctgtataaaacatgccttcggctcagttccctgctgcttcttgcctgagcagaggtggcccccctcttgtgtctttccaataaatctcttgtgtgatgttttttgtgtggtgtgacttggtggtattccttggctcctgacttccaggataccgttcagagctataacaattcctctgaggaaacatttccccttagagctgtaattggtatagagaccagtaaatatcttcttttgcattgaacaaaattgggtcatatgtctgactctatgtcatcaaaagcagaagaaggatgtaataaccatgtctggtttagctgctctgggggcttgtcccagaggaatcaactttccctgcaagtgtgtttttccttaaacttatacaaactcaggagatttttagtgaaagaaattaacatcaaatagtgactttcagagaaggtgaattaaagtaatggttaaggcctctaaggagctgcttggctttgtgggcagggtatgaatttcatatacagtagatttggactgaaatcaaatttacatgtggttatctttggataaaccagtgattttccctcactgagtcttagcttttcatgaactgcaaaagtaaatcattagcttgaagagattaaataaagtaatatgaatacggcactagcttggagactggaaggcagaagctgtctttgaggttaggttatagatcctattactgataaacattttattttaagtgttctttgccacagaaatagaaaatacagtttcttgagatctgtattttcttcactgagagaatataatttattacaagtttgcttctgcttgatacatgtgccaatttctatatccacataaaatagttatgaagaataaggaaaatgggagtccaggagaggaggaaagagaggagaagtgggtgactgtttttagcacatacctttagtaaacatgacgatactggagtgaattcccgagagtggaggaagtggtcattccagagtcaatcagaagtcttgtgaggatatgtgacctctggtgaggagactgaggaaacttcagagagagtgactgttctagatgccacttcaccagttctcttagagtggtggatatgagttgggtttggctgcagatcttctatttatttattttttcctatcttagtttgatgattgatgcttgagacagggtctccatagtcagctcctttttttgcttggtttggtttcagtttcagggtcttgaagctcctcatgcttctacttcgggaatgctgggattacagaggtgaaccaccacacctgttgtttaatgacgttcagcattacttcaaccatcagtcttcaaatatgtggctacaaaggtcaggagacgtggtgggttagtgagttgagcctagagagctcactggttgctgtctgattctttttttttttttttttcttccaactggatgaaaaccaaagacatttctgggacaagggaatctcagctagagaattatttctatcatacttgattgtaacaagcctgtagggattttttttattttaaattaatgactgatgtgggtggacagtgctcactgtgagcagtgccacctttgggctagtggaaagcaggctgagcaaaccataaggctcaagacagtacgcagcacccctccatgccctctgccttagctcctgtcttagtttctgccctctttgagttcttgctctgatttccctcagcaatgaattatgacctgagagttatgcgatgaaatacctgtcttcccccttttctcccatgttgcctgtggtcatggtctttaccagagcaataggaaacaaactgagacaggagcctgccaaaggctccaaccagcaccccatctcccactggcaccttaagcaccatcaggtctcctgggtcgtatggtccaggtagtacagaattctgcatggctgcctgaacttgttgaaaagcctcctattcccagccccattcaaagctagggctttattgaattacttgatttatgggccagaataacacacccaagtaaggaatgcactgcctccagaatccaaatatgccaactgaatggtgtacttttttcttggtggtgggaggggcaggtacctccttcatcttagaaggaatatctttgcatgccttataccactgcactccccaaaattacactgaggcagaaggcttttgaattttgttcagatttatttcccatcctctgatgggcatatgtgctaccaacaagtccaaagtgtttgctgcctcctgttcatttagtataatcagcataatgccaccaatatagtgaaccagtgtcatgttttgtggaagagacagatgatcaagatccctcaaactaagttataaaacagagctggagagttaatatatcctggaggtaaaactgtaaatggataactgctggccttgccagatgaaaacaaatgttttccagtaccttatggacaggtcctcctgagaaaaaggcacttgctagatcaagagccacatttcatgtaccaggagaagtgttaatctgctcatgtaaggataccacatctgccacagcagctgcaactggagtcattacttgattaagtttgtgatagtcaactgtgtttctccatgatccctttgtcttctgcataggccaattaagagagttaaagggagacgcggtgggaaccccatcttccaagtccttgctgtggcactaacttctgaaggaacttgacgttgcttttggttggaggaaatatagactaggtagttgaggaccagcaacgttcccagggcttgagcattaggactgcagagacattcaacctcttggactgaacgtcttaccagatttttggcctttccattatgggcagaccttgttggacttcctggaccacacccttaagccagtctaataagttcccttcttttattatgtctatttgttctataagttcagttcttcaaaagagccctgactcgtacactgctgagcagtgcttcagtggccaagatgttactctagattagtaaagaaggggcggacgctccgagcagccatttagaatggaatatcaaaaacagcatgccagccttattttcactttcaaaagctaaactattacttatttttatcaacatttatgtggttggaaagtttaaaacaagctagacaggacgttcagaagtctaccgggttgctttccaaggacgtgttttgactaatttcgacaaattcttctctgttaccagtctttgttgtacgaagcatgagccaccttgctctaagctacgaattaatagatgccacccacccacttgggacagatccctgtgacctgtgcttccctgtaagcaagtgctagcgcaggatcatttccaagactgatgcgtcactttgagaaggaggtgttctagctaacactgagacatgagaaccccgtcagccaaaggatcaggcaggctgccccccttcaaggacaaaagatttctcatgacagtaataataactcaacgccatgggtacaagggcttatgatgacttctcttattctatagcaggcttctctcgattttctcagttattttacttcctctcttgtacaagtcctaatgtgacctcccattttctatgacgatgctccagggaaagagaaagaaaaacaagacttattacagtcaagtatttttgtccgttgtttgtttgacagggtctcatgacgtggtttaagctagcctcaaaattataatttatatttatgatacattcctgcccctgccttctcagtgctggaatcatgggcatctaccacagtgtctgtcatcacatctgtccagaagatttgctgatgaatcaagtctaaattcctgtgcttcattccttcactagagagggaaataaaaatagaagttctgtccaagagctgcgtgctaaagatgactagcagctgaagaaactggtgcattttgtctacttttaagttttcattactttttcaattttttttacttatttaaaagtttaaatacttgttttagtgttttttacatgtaggtgtcttgcctgcaaatatatctgtgcatcatgtgcatgctcattaatttttagtaatggttcaaaaggtggattcatgatgacattttcatccctttgcatctgtgctttcctcagttttgccatgtagctggtgttcttcgttctcttaaaaagcttcccctttccccccatgtcacaaatgcatatatatgtgtgtgtgtctgtatatatatatatatatatatatatatatatatatatatatatatgtgtgtgtgtgtgtgtgtgtgtgtgtgtgtgtgtgtgtgtgtgtgtgtgtacatgtatatatatgtgtatatatacatgtgtatatatatatatatatatatatatatatatatatatacgaactggcagatgcagttgaagttgatctttgttcaggacaagacatatgtccttccttcactctttcaggtgaagatttaccttggctgcactatttgtttctctgacatgttttttttttcttattgccaaaaattaggtggttacagttgtgtgtgtcctctattctagtccgttggagtgtctgtgtttgtgccagtatcatcgtagtcttgttactataaggtacggtataatttaaaaccaagtgccataatacctctaataaaaaccaagcaccgtaatacctctaacgtcttagcgtgactttggctattcaaggtattttgtgcttccatgtggatatatatatatatatatatatatatatatatatacataaacctagactccaaatgcgaaaaccatgatattttgtctccccctactgccttctcttttagatccttctcttcctccttttatttccatgtcagatgtgtgttctgagtttggcatgttttatccatataataatatccagttctatgcatttttctgcaaatgccataatttaattctttatggttgaataaaattgtcacacacacatacacacacacacacacacacacacacacacacacacaaacaaacacacacacatccgtacacatatatctatcacgttgtatttatccattcatctgttgttgggcatctagactggtttcttagcatgactattgcgaacagttaggtatctctgtgatatgttgattacattctttcaagtagatctcagagtgtataactggatgaagtgtttgttccacttttagtttcattcaaaacctccatattgatttctgtagcgctacgatttccatacccaccagcagtgtgcaagggtccttcctatcccacacccctgacagtatttgctttatttgtcggcagacattctgactggggtgagattctcagtacaactttatctcacatttgcctcatagctaaggatgctgctgagtaactttccaaatccatcttggctagttttatttcttccttgagagctgtttgtttaatgtgtttgcacatttactgacttgacaactggtcttttgctgtttagaatgtgaagctctttggagatgctaacaaagattttctcccattctttagcctgtctctcccccccaccccccacccccgacatctgatcccttggcagtcctgccctttattttcaggcaatctcattcatcacttcttggagctatttcttgctctccatcctagtctgaattacagattgatatattttccccatttccttctagctgtatcagagattctggccacactaagttcacgaacccgcggatgcggttgaagttgatctttgttcaggacaagacatatgttttccttcacgctttcaggtgaagatctacctttgctgcactatttgtttctctgacatgtttttttcttattgccaaaatttaggtggttacagttgtgtgggtcctctattctagtccgttggagtgtctgtgtttgtgccagtatcatcgtggtcttgttactataaggtacggtataatttaaaaccaagtgccataatacctctaataaaaaccaagcactgtaatacctctaacgtcttagcgcaactttggctattcaaggtattttgtgcttccatgtggatttttttattttagtttaaaaactgttttcattaattctttgagagtttcatgcaatgtattttggccacatccacttgccattcatcgtcttggattcctccaagacctagtccattctccattgctcccccctcaaattcatgttcttgtttttttttttttttgttgttgttgtttttaaatagccttcacatccagtttatgctgcttaaatactcctgtgtgtggaggccagcctgtggagcgtggttgacctacaaaggtcaataccaaaaacaaaacaaaacaaaacaaacaaacaaaaaaacccctaaaacccaaaaccaaacaaaagaccctcaacaacaacaacaaaccggaagctatcaactgaccacagctcaccagttaggtgtgggagctctgtagtccttttcccttcatgtgggagcgttgacttgttgaccttgtacaagtcctgtgcagccaaacagagccactatgagccctgcactttcagaagatgctacttctctgtggtccttcccaacctccaattcttacaattcttccttccctttgctcacaatggtctctaagccctcagggaggtatcccatttatagctaagcactccacagtcttatttatcttctgcactttgatcagttctgggtttctgtgttggccaccatataccataccaagaaacttctctgataagtcctgagaactactttaatctttaaacagattggtgtggcttatttctaagggtctacgcttacctttgcactctgtcactcagacagattctcctaagttcttaacactgctcagttcaggcaccctggagtggctgatactctagttgagttgccgtgtgtcccacatgtaaagacagccccaagaactgtaagcaaatttgtcttcatgctttcaaaatctgctgagttagactcctcctgctgcagatccgaggctgcagaaggtctagtaggctgctaaagcttcagattgctcagtctgcacagcagtgaaccatgcagcacagagcaggctccagaggaccatctacccaccctcctcagactcagggctaccaaactccagatttattttcaattcttttttctttctttctactatccaccaagggtggggttgtcagtctctgcacactccatgtcctaactgaaccttctgctgcctttactagtaggcttgtccatgtccagtcttcactactcatcttggttgcctccggtggctgtctcttaccttggagttattcctcattatcagtctctcaaactatcttagttttaagcagtaagttctctctcaaagagcacctagcccatagacccatgtgtcatgaagactgacaagagtgagctcctctccattcactggcctgtgtggccagaggggtgaccaattcatcagaatttgtgactaggcttgtccctttgcagagctgtgggcctatctgccaggctcattttgacctgggcatctggcttagcttttgggtgaggtgtctgctatccttcccctcccaggaagctgggggtgtggagaatcttgttactgagtagcccttctgtttccttgtgcatttttgactcccaccctcccaccctccgacttgctaacgttggagcatgctccctgcaagtcaggccaactggtttttagcaaatgctgagagaaagcctgctctgcttccacatccgcgtactttccatctgcaggatctctacccagaatccatagcacagtgaggtcccagcaggaggctggttgggtcatatcagtcacataagtagtacaatataaactaaaatctttgtgatttcaaatgccatttcttgaggttggctagctcttaaccatactttctaggcacataggtagatcttacctcctagtttccctttcaggaaggagtggttatacgatagagtctctgaatggaaagtgaataatagtgatgaatgccactcccaggcttggtccatggaaactgttcatgtaaaataccccatgtgatagttagatgccaatatctaaggagaccttgaaagccgaatcttcaggataacagaggcttgtcattctaagtccctggatgactatggagaaccttcctccactacagacttcttctcatgcagagcacagtggacttcacgtgagggtgatgaagttagcaagtgtcttagttagggtttctattcctgcacaaaacatcatgaccacgaagcaagttggggaggaaagggtttattcagcttacatttccacattgctgttcatcaccaaaagaagtcaggactggaactcacacaggtcaggaagcagaagcggatgcagaggccatggagggatgttccttactggtttgcttcccctggcttgctcagcttgctttcttctagaatccaagactaccagcccagggaaggcaccacccacaatgggccctccccccttgatcactaattgagaaaatgccttgcagctggatcttatggaggtctttcctcaagggaggttcctttctctgtgataactccagcttgtgtcaagttgacacacaaaaccagccagtagagcaagcatcattaccatagctaaatcgagaagcaagtgctagaacctaattatgaagccagttccttttgcttctctctgtaatgagttaaacctccctactctaccaaagtacagccaattatgttgtgttagataattggtgttgagtttttccaattcattttgatctgcagggctataataaccaaacaagagttgatagttggtggaagacttctccacaaaaccattcctattattctgagccacagggctaacattccagtctgtctgcaattcatctccttgattctgaaaactgttcttggcctaccttcaccttcttaggtaagcatgcataccactgtattgtaacctttatgctcagtagccatctctggtgtggtgggtatgctttaagaaccacagtcttgcaagctcagccttttttcttgtcctctctctggcctggaagaaatgaagatagtgtaaagagatgctatgtgtctctccatctgaccatcagactactgtagtgaatctggtcctcccacctccaaattgaaatttcctcaggaatctcactctgggagaagaaagagataccagccagagcaagaactagtctcttgagacttcacacaagtctcacaacttggtagaccacttcaggaaccagcctgaagcccagtcagtggtgggcaggatcatattttaactggcactgctaagatgtgcatttggtgttctaattaaattctggtctcatttcaggagcccaaaactggatatacactggatctctgtatttttttcccaatgtggaacactgaataaatctcctttctctgctttctattactaacttggctattttattggcctatagaaggcagctgatcggttctgacttggagcacaagttgggaccccatgtccagtaacaatcttacatcccctttccaggaagaaatataaaaactaaatagcattttgaatcatatggccatattactttttataatacaatgcaattgaaattaatgaagaagaaaaatggtaaaacttgtttttttaaagaaatatgtggagattaatagtaagaaggcatacgaaaagtcacagccagttctaagcttatttgctttgaggttttgttaatgggaatgtgttttttaaagtaatgcatttctacttatacagcgctgcagctagtgggcagagcttgaggctattgactgctcagaccagagttcaagggtcatctgtgtgcacagagttctgagcagaaggcaattgcatgttatcaattctccatgaaactttggggctggctccagatcactgagggcctgcaacccaggatgtcacaagggtcacttcaaatagagcagagacgataagaagtagtttggtcctgttagatttttttaaagttactttttaaaacctagggcttaaaaaagaagagtcgggcctctcaccaggctctctaccatgaggccccactctcgggcaactgggcattttctaaagcttgttgataccctcagaaggtccccacgcactctgggtttgggttcctgctttgagtatgttcgacctttcctctcatgtcactgaactgtgctagatctggactttaggccattgacctataagcaaatagatagtgttcttaaaaaagcctgatttctgttcaatgctttattaccatgaaaactgaacttggaaaggggtgtacaaccctgactttccacagtggcgtctctcgcttctcctggctccctcaaattcacatctgtaggtaagtgactctcatttgcctatggcgttttttaagtctttgctttccgagtctgttttatttggtagtctcagtttatgggggagggttgtggttcagatttaccaaaagcccaaccttgtcatccagtaaagctacagtgcttgggtagacgtgtgaagacaaatggctgacttcttagtattatatacagtgagggaggcctggtaacggtcttacagcagtgctattttgtacttcagttgtctcaaaaatgtgtgtgtgtgtgtggcaaaattaggtgaatggattgaaaaaagagatcacccaaaataaaaaccccagagagatgtcctttaaacttggcattatagaagcatgatttgaactaataatcacaaaatcccaagacttatcggagatgttaaagtgttaacccctcactagcttccgttgttctcaggataaagccccaatccccagggttaaagatcacaaggaaccaagggatcgacagctgctccagagatggccctgtactccccagacctagtggggagtccatccttcgtcccttgctcctattctgtctctggggtctgggccttctatgtgttcttccctcctctccaccttcccttgtctactttgggttttcctcccaaatccaaggtgaatatgcacattccagagccttcccaggctagtgcccatgcttctccctcagccaaggtctgtagttttccatgaattctgtcacctgtcttctgtcccctccggaagctccactagggtaaatcaggttacaaggtttggcacactaaatattttagtcgggaagtaacctccttgagaactcccccactgttctgaactgactttgtgtggctgggatgggaagaggacacccagtgcagaaggctcttccgtaaagagcccgagagtgaatgcagcaggaacattcactttgtgtcagagatcctcgatgacgcaaccaaagacaacaaaatgatgagtgtaataactatatttcaataaaatcatgattcagagagggagggggaacggcggggtccttgctcttactgcagtaggattgtaggattcttcattctgagaccagcttctgagaatccatttcttcttccttcctccctctcccccttccttcctccctctctccctcccttcctccctccctcccttccttcttatttgcaataccagactcagctgttagtgtggaccaggcccttagagaagttcagcccattcatgtgctgctctagcctggtatttccaccaagtcacaaagcaccttggccaccatgagatgcacacaagaaactggaggaccttgactttttgtcctgtacctgcgtggctcacaggagcctgtgtttgtcccctttcatctggagtatctcggaggcccctcattcgtccccatcgctggatgctctcatcccttaggttctcaaggacaatccatgcagacgctgggctccacccttctgctcgactgtgctcttccaggagctgatgcaaatgttctaagatagaaaagtcactgctgaggctaccagttatggtcatgggactgacctccagtgttcggctctgaattgataagattccatcttttatcaaaaggaaacttcaccctagttgaacagaagcacatatatatagtaggcaggttaaatatcacatgtcatggaacagagagggacactgggggttttgtggtcaaataagagttcttgaggtgttcctacttacacagccaagtcagataaccattatgtagaaatcttaatttcctgctttaaactgctagattctccgatgttacagaaaattgatttttctgaaaggcttgaaaattctcagtcctttcctcagagatttgggagagataaaaataattcattacatggaatttcagaggaaaagcgaataacattaaattttgttttcagctctgaattatgtgttattaatttaaaatttttattactgtaaattattaagaaattctgattatagtttttggcaatggattaaaatagtttaggtgctaattggacattataagatatgagctgaaaaagtaggactcagcaacattgtgactgcttcagttgataacaaaacaaaacaaaacaactaacaaaccaaacaacaaaaaaaaccttctcatagtctcaagcacctgccaaacctgtttgtcgttgagaatcggattcctacctcattgctagggtttcagagactaacaggactactacaagccgtttccaggactgttcctgagtcagccaatgggtgaagatgtggtctaatacagattggttgcattctacactgtaattatatgaggcaaggcatcgaacatccagtcctaagacatattttcttttattctctctctctctttctttctctctctctctttctttctttttctttctccttcccttcccttcccttcccttcccttcccttcccttcccttcccttcccttcccttcccttccctcccctcccctcccctcccctctcctccctccctccctccctccctccctccctccctccctccctccttccttccttccttccttccttccttctttttgtatttgtttttagaattttagaattttttttttctggggaaattcacaaacaagaccttatttattttctactaattttctgttttcagtgtactttcaccacattttttttctttttggtttttcgagacagggtttctctgtgtagccctggctgtcctggaattcactctgtagaccaggctggcctcgaactcagaaatctgcctgcctctgcctcctgagtgctgcccggcttttcaccacatttaatgctaaaaattcttcagtgtctttgtgacttgaagtcattaaaattttcagcacaatggctttcaaatgtcattcctgccccggctgagtgcctcagagatcatgacaggaccttccaattctcacagaaatactgatgaatgcctttggccccgagacctgtgtcctgtgaattatgtcaagaagaggatcatagcactacatcattccgaccaatgatgagagaggaacagaaatcatcctctgacgtcagtagctggcctaccactttagttacaatgctgttctcctattagacacagacataagcaatctcacagcgctaacctcagacctactctgaaagcatacatagtaaaacaaaaaaccaaagaatagttaacaattttgctgcaaagtgcagagcatctagagcaaactctcacttctttaggcccttccccagcttccctaatggaagccccaatcccataacaggacctttctaacattctcctactgagacacttcatggtcaccaatgtgtcctcctctgtggctccacttgttgacttatggttccgttcatggtggtctttgctgaaggatattgatgatgttacgggtgtagaaatccaggcttgcaaaaaagctttatctttgaggaggtttcattttcataataaatgaaagatgacagaaatgaattataaggctgtccagaaagacacaagctgtaggaaacctcatgtgtgggattgctgagtggctggaatgagagaagggatccaggttagtgtgttgactgcaaaggaccctgaaaggcagagggagggagggagggagggagggaggggggagggagggagggaggggattggtatggacagcataaagggcaaaaagcaacctgtgttctcttcccttgtgggctttcccagcatcagcacactgaggcgaagatggattaactgggaggcagagatatgttttaaaaacatgatggcttggtggtaaacacctataatcccagcactcagtgaggcaagttaaagatcaacctgggtttatatagtgagttccaggccagagagaagtacaagtaagattgtgtgaactctcattgtgccctccatctaaaaataatatagttgagcagcaagtaacagtggggtctgtgaaaatctggaatctgagggaaggcactgtactgttggcctctaaattctcctgaagacgtgactggcagtgggatgaatcatcttaaatgaacgactgaggtagggaaaataactcaagggaacccacccctcactacttcactagttgctactggtgcttcggagagccggggaatcattacctccagtgtctactgtgagccccgccaggaactatcacattgatagttctggtacaatggtcatacacaagaccctggttaaactgaataggtcacacaatgcaacatgaagtcatgaatctaggagagggaaagtaggggttgatagggatggaaaggagataagagagggtaggaagagggagatagaagggggagggagacttatacatctctccaatccatacttcccctgaattctcctacttacttcatttagtctgaataacaaaagttctatacaccgaggtctcattttcttgttcatttatatattcttcaagcttttgctttcaaaaacatgctgcagtaaacacgctactacaggtctctgcatggatctcatatgatgtgagtttgattctaggccccatcactcgctaacctatgctcttgagcatgtggctgaatctcttcatgccttagagccagtatctggaaaacgtgggaagaggtagtttccatctcaggaaataaggatctattctatttttgtttttgttggtgtttgtttgtttttgttttgtttttccaggcaggggtttctctgtgtagcctggaactcattctcaggaccaggctagccttgaactcacagagctccacctgccttggccttccaagtgctgggattaaaggcatgcagccaactccctacccccattgagacaagaatttcgtgactttttatttggttttacccttgcctccagcctctgagagtgtgtgttcaggtccccttcttgttccatccggttctggggatcattctaggatagtcaggctggatggatgtcaagggttttagttgctggaccttctctccagttcctcttgaaggatttaaagtcaaggcatttgtaaagagcattgctgggggaacaagcaatttttgtaaagaccaagctcagggagtcttgtggaagtgtgggggaaggattgaggaagcaaagacaccataagaagacatacaggtcaatgaagctggacccatggaagctcacagacaccgaaccacagaccaaagagggcacaggtgctggacctaggcctcctccatatacatatgtagcagacacgcagcttgatcttcaagtgagtcccctaacaattggaggggggcagtctctggcttggggctctattgcctgcctgaggaccccgttcccctagctggtctgccttgtctggcctcagtgggagaggatgaacttagtcctgatgagacttgatgtgccagggtgagttggtacccaggacggggtggggaatgagtgaaggagggtgggagggagtggctgggagggacagagggaggggactatgatggaatgtagtgaataaataaattaattaattaatggaaaaaacaaacacctgtggtagatactaaacgccatttcagttttcttttcttttttttaattattagggaaaataacagaataggatattctccaacccaccattagcgtatttattctttctcgttatttttaatttgctctccaaagctattccatcagagtatatttttattagctgtaccaaagagaacgctccctctattctctcagctccttgtgctattggagcttagtctaggcttgtatttggttttagtacttcttcctgatcatgacctcaaattttcttgttgttacatttgcaaaacttcattttgtttttgttttctggtttttttttccaactttattggtctcctaaaatcaggaacagatgttaattatatcaagtacattttctgaatctattcaaatgatcatttgtcttcctaaataaccatgctatgctccaaaccagccttgtctcatttattttgtaggctactgaattatgtttactgtctatcttagcactttaaagtcaattttcttgtctatttttcctctttataacattctctctttggtgtcaagatcaaagttgccttgtgaaatgagttgactagctatcctagcttactagttaacaagttgactagctatcctagcttcccagttaacaaagcaactgatactgttcactccggcagcaaatgtactaaaggagagcagagcagagcagagcagagcagagcagagcagagcagagcagagcagagcagagcagagcagagcagagcagagcagatgggttagaacggcctcaaccaggaaggagcgggaaggacgtgcacttgtgaagccatccatgcttttgatggctttgttctttctaagcctatttttgaggtgggggacgtgggtaagaattggaaggattttttttaatattgaatattcaatttgttaattgttgaaataattattaaaaattgttaatgattattaatcttacattttttattttcttctgtacagaatgtggtgattcacatgttttctagaaaaatctgttttatcctggttttcaaacttgttatcaaacagtcatttatagtatttgattatgacttaaattttttttggtctggtctctgcctatgtgttttctattgtttatttgtggtttgcatatattctactgagatgctttgtggagttctgtctggtctttggttatctgaaaagaaaaacttttcagttgctttgtcctctattttttatttgaattttaaaaacacttttattaattttgaaatcctttcccccctttgctatgctgaggcttgagtgcaggacctccacgtggtaagcatggggtgccaccctcagctccgtaatcttttctgaaagcatcttaagaagaatggcattcattctttaatctttcgaaaaattaactgcatttatgcttacaactaaatctttgatgtctgtttagctttttctagatccctgactttattatcaagcttcaatttcttaattttctttgtgagctcgtctttagcatgcatgtgttttaaagttgtaacacacaattttttttaaatttttatctgcctttattgtttttggtttgttttggttttgattttgtttgtttttccaacagatttccatcataacatattttgctgacgttcattttcattgatggaatttttatcatggattttgtatgtctgagacaggaaaaaagacatgagaattaaaaatgaataataataggttattaaagacctaataggttttagtctttttattttgttaattaattaatttattcactttatatctggatcacatgtccccccttcttacagtccctgccttaaacagcctctccccaacttccctctctatctcctctgagaaggggtgggaaggctcctctgggtatcaccacaccttggttcattaagttgctgaaaccagacaaggcagacaggttaggggagccagatccaaagacaggcaacagatttagggacagtccctgctcctgacatctgctacatatgtgcaggaagcctagggctatcccatgtatgttatttggttggtggatcagtctccgaaagtccccaagggtctatgttagttgactctgttggtcttcctgtggaatttctaacccctcctggtccatcaactcttccacatgactcccagagctctgtataatgtaatacataattttactgaatagaaatgtgtatattttaccagtgtttaatcttttatttcttacttggttgcatttatatcagcatatctgctaaaaaattatatatacaaatataattatcaggagaagggaagattatgatcaatatatatattctgtggaaatttttaaataaaaattaaaatatgcttgtgtagagaaattagttttttctattaatatccgaattaattttttgattgtctttttaattgtttgataattgtctacatttatataatgaatttctgtgatctttaattccatcgatttccctctctcctcaattttcctactttttcatatcttccttttctatgtggcctcttcccatgtgaatagagttgcttgccagagcagagatggggaggctgcttcctgggctagaacaattcatcaatggctacatgactgaagaaaatgattccccgtctctcaacagttgttaattgcttatagtgtctcagggaggaatgaggccttgtggctccctcccttaaccatgacgaaatatgaagacgtgcagccttaagccggtctattgcagataatcttgagtgccatggctgtgtcatacccagaagacatcttttttttttctgcccgtttcccatcctctgattcttacattctttctgctcactcttctatgacgttccctgggctttccaatttaggaccaaacactcagctctccaaacattcttggacttttggccagatgtgggcttctgcgttaaacactgcccagaagtttctctgatgaagactgggcatagcacttatctatgggtataatcgagtattgagaaaacagtttgacaacaggacactttagtaaacttagaatctaagttttctgctatggcccaggacctcctcagccacgggctcttggctaggtttacagacccattcgtgtgctctctcctgagaagtgggcctcacattcaaccagagagaagttgatggtccacataatcatcatgtcagtgtcacactaaggaatacatcttacagatgtcccacagatcattactgtagcttgcgggatccacagctatgtaagactgttggtaactcttctcctccagaaacttacacaagcgccttcaagtatgtatgaaaaccaggtagtacagaggaggctgtcagctcgcttcagcttcatttaactatatgtattacgaaatagcaaatttttatacatatgtcaaatgtaacttaaatatatttttacctaaattcagattttatacattgttgttaaataggaacttaccaaaactcctaattatgatagtttattatcaacttgacaggatgtagaatcacccatgagataagcatatctctgtgaggaagaatcacctagattcagcattctctgtcgatgcctgtgaaaagatctttgattaggttagttgaaatgggaagacccattctaaatgagggtggctccacttgatgatcttgagtctcaaaccacataaagaagagaaagctagccgactgtcagcatttatcactctctgtttctctactgtggaatttttctcccttgaatgttctgcctgcatgtttatagctggttggaggtgtaatttacgtagcatggagttcatctgaatgaagcatataacacagaagattttagtgcatctatagattatgcaaccttccctgtagttcagaatttgaatattttcctcatccttagtagaacctgtcttcattaccagctactctttcttgaactcccttctacagctgctccaggcttagaccatcacttactgtctctattggttgtccctactggacatttcatacacacaaatggaaacaggtaatatgtgggggtagaggttgccactgtcttcattcactgagtatgatttgtaggtttatccttggcagtttgaatcagatgttcaattacacattccataactagtagaacatttaggcatagatacttatgagagtgagttcaacacacttcatctacacactgaacactataccttattgctttaggatttccattgctgtgaagacacaccatgaccaaggcaactcttatataaaggttaccatttcattggggctggcttacagaggtttagtccattatcatcatggtgggaagcatggcagtgaccagacagacttgatgctggaggagccatctatggggggctattctattcaaatgaccacacacagttttaatttttgtctctttgaaataagtaagttaaactccatattgagacttaatggcctatactgaggtattttgttagttcttatgtttatgcttggttctttttcataatcctttctagttactctttacttctgaagtccactctgtattagttcactctgcatcctcccttcattctcaatgtcaggatactgacaaactgacttttttgacccaggttaaaagttatttttcctcagcactttgaagatgtttatctgctgttttccagtattagttactgataaaaaatatatctgtcagttattatcacttatttcatagatttaagacaggttgtagttattcttgatgctctacactttccatataaattgtctattgactgatttttgtttatgctgatcaacccttggaatggctaacagctgttgttgctgtaacaaaataccttccacaaacaagagtaaaggttaattttgtctcatggctaactctacttcttgaggccctaggcaaggctgaataacatggtggtgggtgtgagtgaaggatgagacttctcaccctgtcatgactaagaaacagagagagagacatgaaggagccaggacatgttctcagtgactcaccttctacagttccaccatcttccaatcgaatattccaattctgggtcaggaaatggattactcaatttatgaggacagaatcctcactatctaatcatttcctcaaagtgtggggagcgggtgtggcggcagtcccaaaggcgccagagactgcagctaagtcgtatgacttgcacctgacttcctcatataagccacaaacatcttgagtgctgcgcaggtgtaccaggatacaggtgaatccaatttggtggagatttgcccctgctgccctgattagctgaagctgcgtgcctggtgaggtggcgtggcctgcggtgcgtggatgagagagagtataaaaggagtgagaggcccagggttcggaggagatataaaaacaagggagatataaaaacaagggagatataaacaggggagatataaaaacaagggagatataaaaacaagggagatatatggagaaagaagaaacaggactgaataaatgtgtgcagaaggatcctgtagcagcgtcgttcttcctggccagttgagcgcgcgcaacatcaaagccccataactgtgcatcactcctttgcacagggaccaggccttcaaggcatgcatgacataacatagaatctagtgttaattatatcactgcttttagaaaattgctagcaatgatctaattactgtatctgtcatttccatcctctgtgatcccaattaggtaaagctgagagatttttactagtccatcttcaactcttttatatgcatagtatgcagatgtaatcatatatatacacacagcatgtgtatatgtatatgtaacatataccactgtctccttatataacctttatagatctgcatttcatcatgagctataagtccttgggcaacgattggcactaagagttcaggagccttctagcagtgctgggggtctagaatagtcaatagctccacctagaaaggagctctttaatctgcttttttcaggagctaaactctcaagtctcccatatgtatctagaacctatagtgaaaataccaactggggtgctcttttctcttccacttaagcttcattttattttgattgtttatttttattgtcttgagcctgcttgaatttttaaaaacaccactcatggttgatatgtattcaaagtagagaaaactcataaagagagctgtgattaaaactaatgctaacttcttgttttattcagggccttctctgcttcatctagactcaccttcccctggggctctacttacgaaaggccactgacactacctgaaaggtcttgggtgttattattgtaccatgtatactaaagaatagcatcaactgttttgttcttttagtactataatgatgatttgttaaaaataggtaaaacacatataaacagaaagagcacataaatttataaacaatcattgtctactcaccaactaaagaaaatcatcttctttcttttaactagatggtcttttattgaaatatttcctcttgttgcttcttagctagctggacactccactgcaccactgttgatgtcatctatgacatcatgaggatggcagccattcatagttcaacccacagactatgtagtacccaggttcttaatatttccagaaagctctctggctaaagaccactgtcacatatgctaggcaatgttgataatctcattaaaagtaacatttctattgtgcttaatgttctcttgtttttttttctgtctcttggtggctctgagagggttttggttgtcatgaagaggcagagggcaccacctaaatctggttctgtctgttctagagtgtcagtgtcatgctaatgacatgtcagtgtccagttactgattgctttggtaataccatgaccaacattttttttttttgaggcagaccaaaggaaccaatcttgatgaccaaggcagatgtagcagtggtccctgccaatggtgaacctcacatgcacaattttcatatccttagggacaaagttgggtggcacggtgtaggctgttggtatctgatgaacctgaatttggaagactgaagaaagctgtactgtagcttcctctgagccaaaagctgaaaagcaagtcaaccatttcaactgggctaccttttgaaaagttggcaaaagtcatttgcataacaattaatgaacacatgactctaatccattctcagtttctttcctaatatttagtctctttcattgttatgttattaaattataagatctggggggttttgtttgtttgtttgaggcaaattatagaagcttgtttcttgagccaagtcccttgcttatttagctacttttgttaaagagaaaatgtataataattgcagcaactgttttattttatagggttgttgagtgaagattgcagacaccatgtctgactcagtgattcttcgcagtgtgaagaaatttggagaggagaatcatgctttcgaatcagatggtttccgtaagcgagtttccttgatccttgtgtaaagaaaactaaagacaagagtgagacacgcctagtgaggtttcaaaaagcagagaaaaatcagctacaacatggggggctagggctaggcatgtgcctgacatacaaccaaactggacgggctctctagaattcatgtcacatctgaaagctagctctgtgttaaaatgcacaacatgagtgagtgctaacatctcccatgagcacttccttctcagtagagtgatcactgtataactttagccccatagcattgccgatcaccatggcaacgataattgttaatggtttctgctccttaaacaggccctaccaacactctcctggcagaaatgaggggccttgacacattagtccttggcatgttctaagctgctattcatccattcattcattcattcacgaatcaaaacaatccatgcaatcatgcttctaatccagttttccaattttcaagccctttatccacactataatgtctctttagtctttttctgcaactgtattaaatgtcattggaaccaggaaatggtggccatggtaacaaatattccttagagttcttttctctgtggcttccttatgtccctgtagacactcacttccatttcctactgacatctgctctacatgggctgacaaaaataatatgtagctctgtcttatggattctggtggcgatgaggtattaaagacatgttacagtcaatttgtgatctgttaagtagataaattttgacaaatagaaaatgtttctaaggaaccaaacaatagattacttttcatcttaatagataataccaaatgaccatatttacttctgctaatttagaaatggtgatttccatcaagcccagtagctcacatctgtaattctagtccatgggagactgaagcaggaaaattaccacaagtctgaatttgaggctactcttgtctatgtagctcccaaaccagcttacattacagagtgagagaccctgtatcaaaaagggaaagacttccttttgatattcagaaaatacaaatattttataatctggaaaaaatatccaaacatatagtcaaagcagcaggaaatggggagagaaggagggatgataaagagatagaaagagacagttattagtttataatatttcatgaataaaagtgcttcctagaaatgcttttggttgactaatgattatgttgcgtttggacacaattattaacctttttatacgttgtcttcatcctgacagataacaatgataagaaatcaaggtgagtgaccgtttcaacaccacagcatcttctctagaaggatttcagaatatttctataaatataggacagagtattttcatctacgttactatgtatagaaagtatagaacaccttttcttttttctttttccaagacagggtctctgtgtggctctggctgtactggaactcactctgtagaccaggctggctgcgaactcagagatccatctgcctctgccttctgagtgctgggactaaaggcgtgcgccaccacttttgggctgctttcttcttccctttaaagccttataggatagcccttcctgattatgcccagtttcctcccttgcatcccagtctaccacagagcttctagcctgaacaaacaggaaagagctggacaatagtgtgattttatgagttccaggaggtcctccaactccactcctgccccctcctccaactctacaccttctgctcactcctccaaattcccccatctcccctatttcccaacccctggagactaataaaaacctaaagttgaattctctgagctttctcttcagcactcgtttgagttcacgtgtaaggaagtgttgaggcaggattggatggggctgcattagaacagtggcaccgtgtgagtacctgacatggaagatggatggcagaaggttgatttagaaagtttaaagtatttcaggacagaaggcagcagtagtactggtaagattagcactttgctagaagaaatctggtgaccctggtcctccaagagtcccattgcgagtgcagaaaagaaacatctattataaatccttcactgcaagaagggcattttatttttttcattttttaaatatataatgtattttgatcatgttttctgcctccgattcctaccatgttctcccccatttccctcctacccaccctaccttagttctctctcaatctcaaaaaaaaaaccttcaaaaaaaatgaaaataacaaacaaaaacccaacaagaccaagaatatcaaaacaaaattaaaggaatcaaaaagcccacaacagccgggaggtggtggcacaggcctttaatcctagcacttgggaggcagaggcaggcggatttttgagttcgaggccagcctgatctacaaagtgagtggcaggacagccagggctacacagagaaaccctgtctcaaaaaatcaagaaacaaaaacaacaacaacaacaaaagcccacaacaagcaaacaattatggaattaattttgtgtcagtcagtcctgggcatggggcctctttgctctgtactgtgattgataagcccagtgacattctgttggagaaaatggattatccctttgccagcaggcatcgattgcaagaggttaaagcccagagcctgtgcccacttcttcctctcagtgctgggaccccatctggtttgaacctgtgcaggtttcaggtgtgttgacacagtctctgtgaattcccgtgtgcacccgtcctcttgtactctctggggtccttcatcctctctggttcttacatctttttgcattataaatctctgagccccaaggagaggggtttgatgagtgctccaaagtctcttcctctttgcaggttttcagttgtgaatctctgtgttaattcccagctactccaagaagaagcttctctgagcagggccataggatgctctgacccagggctttagcagtaggccattaggagtcattacactgctatgtttctttagcagaataatagtggtacatccctctaggctcatgaggaaagtatatttatgggcagatagaataaacattataaatttagaaaacataatacccggtagctactgagaatgcataactattttttttcctaagaaagagactgaattggagatgaagctctgagaaggaatgtgtgtgtcagggcagatgtcattgaaatcttaacgatcttggctagagaaggtcctgacaaggagacttaggagacttggagtgagaatctgaagttggagtaactgtccgcatgagggtctaagaaaggacattttgagctggagcacatttggcaaagataaatggatgggtgattgttttcatgacaactagaatatatacactattactatacattataattgttctatatatattctatgtatccatatctctatctgtatgtatatatagaacatatattaatatatatagaacatgtaaaatatatatagaatatatggtatagtgtatatatatatatttagaataaatatacaaatatatacacacatatatacaaattatacaatcaataaatatacaaaaatatatataaatattttatattgtatctcctgctgagtccatttaatgttgcctgtacacatggcctaaggctgactgttggattatgggcaatctactaagaatcttactcctgaattaaacagagcccagcccctgctttcagctgttattgattacctgtaactcttcaactatgtgtccgaccttgtggactcccctactcccccccccccaccccctgtcctcatgctgtaatgtagattggtatggccctatacaagtcttgtccaggcacctacagctgttgggaattcatcagtgcaaaatacattaaaatactgggtttggccagaattcccagccagaggggaaatgcatacttattaaagaataattcagaaaagcaccatgtagggagaatttctcaccagttttgggaacatgacctttaaatgcctttccttctcttcaggttacaagataagaagaaaggggaaggcgctcgagttggcttctttgaactggtaaataatgcactgtgctgctccccttggcaactttgcaactgtgagttattcccacagtagaggaagagccaactccttagtcatactggcaggacttaactctagggatcagtcttgtagtcatgagctttaccgaacatatgaatactggttaaaatccaatgcttagtaaacccactggctaatatcagtggaatagaatccatcgacacacaattataatcttaataaggaaagcctttacagtaactcccagggcaatagatcacatatatacattgttatgagaagtctttagaaattccatagcttatatatctaccacaaatttgtataggatgcaggcatttcctctttctttctttctttctttctttctttctttctttctttctttctttctttctttctttctttctttctttccttccttcctccctccctccctccctccctccctccctctctccctccctccctccctccctctctctctctctctctctctctctctttatttctttctctctttctccaaaatagtgtttttctgtagccttgcctgccctggaatttgctctgtagactaggctggcctccaactcagagatctgcctgcctctggctccggagtgctgggattaaaggggtgtgccaccaccgtttaggatggagcatttttaagcaacaatttgcctgttgtccggatgggttctcagagctgagaggcaacttcctgcgctgttaaatgttcactcagtatgtctacctggtaatggcatctgtgatgaagacttggaaggtagtaaagtcagctcctggtctgaggagaagaggctcaaagatttgggcgtaatataaggatctgatgttttagacaattgatagctagtacttttacataattagtgtgaagacaactgctcagagatgacccccacaagcacctggtgttgaatgttgtttaacagaatagaggtgaaattaaatagccctcctgcccatccccccaccccatctcccatgtgctttttacatatagataatctctgaaccctttgtttttcaagtttcgattttcttcatcaaaagacaactggctgatgtttatgggaagtgtgtgcgcattgctccatggaatggcccagccaggcatgattattgtgtttggtatactgacagatatttttgttgaatatgacattgaaagacaagaactcagtattccagaaaaagtgtgtatgaataacaccattgtatggatcaacagctccttcaaccagaacatgacaaacggaacaagctgtgggtaagctacttttcttttttgttacaccttaaattataattcaaaacatccaaagacaataccgactgagttggaagtggcatttagtacagaagaatagaaaaacaaacttacccatattgataaaattctttaactttgtagctatttccatccttccaggtttcaaagcatcaacagaccttgctaatcaaatacctacatcaacaattgactacttggctcactaaaagtccacacatgacaatatccatacttacgaccactaagaagataattgaatttcacttgagtctcctggacaaaagctcctttctgctcaccacccctgcctttttttttcttttttctttttaccccttggctttgttttctgtccatgtgtttcatgagcatgctatattagaggaatatgaatcaatagttctagcgaatagttagttaagttttcatcaagagggctgcacctatgacaaagaaggtagccctgaagaactaggcagaacattatggaaatcagacaaggtcggtcactgtgccagagttgtctctgtgacacgcccaacagcccactttgtaatcactgagtctgtagtacatgtgggctgactcactgttgtggctctgactttgtacctgcctaatgctgctttggatacaggaccaagttcattggtatgtatgagtccctgtgctcgggttcatgactcaaaggcagagcatatcctgcctagaaagacacttggatggctttctcaaatacatctttatttttcatattaattactgaaatgtggacagggttggtttaaactgggtctttctaaatcattaaaatttttccataatatcatctactttgaggatttttcactgcttcaatcaaaaaaatttgaatgtcaactaagtaacatgaatgtgtagaagcatcagggaaggacacactgtcctatgagtcacatccttattttgtagaactttggttagtcactcagactgtcattcactcaatggtcttttataaaatattagttacaaactagtgagtgctgggtgatgagaaaacataaaattctatgtaatacacaaagttatcctttaaaatgaataagcagagactggagagatcctttagtgggtgcagggctcacaaatgtaagatccccggcacccacataaaatgaagaatgacagagcctgcatctgtgactgagcctgcatctgtgactccagagctaacggagagggcaagaagagacaagaaagtttccaaagcttggtggccagtcagcctagtcaatcctttcaatcctttagctagaggagtagtgagagaccttgtctcaaaaattaaggtgaaaatatacgtgctcatctcttacatacatgcatatgtgtgtatctatacatatatacatatatatgtatatatttgcacgtaccacacatacacatttttaaaagtaaatttaaaaattagcaagccagattattggaaataaatgtgctggcatttgaatttgtatgtttctctaagtttacaaggatattttcttctgagagactctgcatttcctatgacgagactgatttcaatgagccctttagagctcttcatttctgttggagggcagaaatgaactacttttctgagtgtgatatcaccagagccactggtaacactgggccattaaatcatgaagataaaagttagagaggtcatactgggagacatttccagggtcttagccacctgtagacatttgttagatgaatcgaagaatgaatctagctttggtgtttccatcaccttgataagcaaagaatcccctgttgctactaccactcattggctcattcttcctgggccttatacctggaactgaataaacattgcaaactgaagctctcagaagaacaatggcctccgctgagttcacaggacacaaatatttaagtgagcttttggtaaagtacaataagtagatgaagcattcaaaatggtcgtttgtcttcctcatttaaagtatgagtaagctgaaatggattagggcatacctttcttagattatccctttaccaggaacttgttgacaaggtaaatactttcatgatgtgttatggtagccacagctgtgcgtactgttatttattcctttatcttttgtggggtgagatcattgtgaacgtggagttgggtggatcccagcaacagggagagaacatttctcatgtgtccatggttaaaatacctcccgagttacccaacactttcaagatcctttcttggaaaagcttattgttaaggatacaatattgttacctaggatgatagatgagttgatctgtaagacaagccaataacttagtgacgtatgtgtgcaagctgtggcaggagatgtttgtgtgcttttactatatcatatttcatatgtctttaagctgttgggtggatggtagagataaacttttagacatagttcttagtcagttctttcgggcagttcatttggttctttgcaatttctggtatattcttttggccacatagactgtagttcagtttggaaggcactacacacacacacacacacacacaaacacacatgattgtgaatattggataatacaaacctttgcagtcctgtgagagcagaccacaccaccactggagaactgttttctcagctgccccccatgtggacacccctcatatagaaatctgaggctatgttctcaaactgatttcagaaatctgtgctctacctaaagctccctaacttcccatctgtcacgtctgggcaacagtgattgattttttgtgagagatcatataaatagagtcatgaaacatgtggccctttaggtctggatttttaaaaacagcataatgtttttgaagttcttctatattgtagcacgaatcagtattttatttttatttgtgaacactttgctatttggtcataatgttttatttcatcttattcctccattggttgtaattttaatttttcctgctttctttcgctattgtaaataatactgctttggacatatggcttcgtttctatagttccataggtcaaaacagagttgcccggtcattcccatgtaatcctggaggaactgtcagactactatcaaagtgtctgtagcatttgtgttctccctcgtggtatatgaggttataatcttctaactttcactaacaactgttatctttattttgatagtgtttatagtagattaaatcactccctgtgatgtcctggttctaatccctgtaacctatgaatatggaaaaaagagtctaagcaagtggtatgactaaattaaggatctaagatgggctttgtggcacatgtctgtaatcccagcacttgggaggctgaggttggaagactgctgtgagttcaaggctacttgatcctcattggagtaccaggtcaaccggggttcaatcttgaacctcttcctaccataccctacacacacacacacacacacacacactcacacacacacacacacacacacacacacacacacacacacacacacaaaacagaaaaaaaatcagtatttgcaggtggaagagatgttcctgaattacataggggcactctaatgcaatcgttggttttaatagaggtggagtgagaccccactacagggaggagaggcaggtgacaggaaagccaggatcagattgtcaagtcaccttccagaagaggcaagagagattctgccctagagcctctggacattgttgagtctgtagtacaactttctctacacaacaacgtaggcccgggaaagctttcagacttctggccttgaggaggagttgagtcaccaagtgtttgggactctgttatagcaatggcaggaaagtcgtgctgtgccatcctggtgaatatgaagtagcatctcatccctacacattgccttgatggcaaataacaccagagatctttctacattcctattggccattggcttatgttccttagaaacagtgtctatttaaattttaccaaattttaccaaactggattaagtgtcttcttcttattgagttgtaagagtacatttttctagttataagttctttaccaaatgtaggatttccttaaaattttaccattctttaggttatcttttcagtctacggatagtggctctttaagccctaaagctttaattttggtgacccttactctatttcttttcttgttttgattcttttggttttggcatcatctaagaaactgttcaaggtcatgaaaatgcaaacctgtgttttttgttaaaagacttttatagttctacttctatattttgatctgtggttcacgttgagtaaattttctctatggtaggagaaaggactttgatgattcaaatttttacatagtcaatcacttaacatcatttgttactaagactatttcaacttaatttatttttcacgttaaatagtatcagaacccatatcaaaatcaattcatgctaaacatcagggtttatttctgggctcttgattccttcatgtctatatatacacttatttttaactaacagcacctttttaactgctatagctttgtaggagtatctgagatcaagaagtatgagtctacaaacttggttctttttctgttttttaattaggtatttatttcatttatatttccaatgctatcccaaaagtccccacatgctcccccaccaactcccccacccactcccccacccactcccacttcttggccctggcgttcccctgtactgaggcatataaagtttgcacaaccaatgggcttctctttccactgatggccgaccaggcaatcttcggatacatatgcagctagagtcacgagccctaggggggtagggggtgggggatgggggtggtattggttagttcatattgttgttccacctatagggttgcggatccctttagctctttgggtactttctctagctcctccattggggaccctgtgatccatccaatagctgactatgagcatacacttctgtgtttgctaggccccaacatagtctcacaagagacagctatatctggatcctttcagcaaaatcttgctagtgtttgcaaaggtgtcagcgtttggaggctgattatgggatggatcccaggatatggcagtttctagatgatccatcctttcatctcagctccaaactttgtctctgtaactccttccatgcatgttttgttcccaattctaagacggggcaaagtgtccatactttggtcttggatcttcatgagtttcatgtgttttgcaaattgtaacttatatcctgggtattctacatttctgggctaatatccacttatcagtgagtacatatcagttgagttcttttgtgattgggttacctcactcaggataatgccctccaggtccatccatttgcctaggaatttcataaattcattcttgttaagagctgagtagtactccattgtgtaaatgtaccacattttctgtatccatgcctctgttgaggggcatctaggttctttccagcttctggctattatgaataaggcagctatgaacatagtggagcatgtgtccttcttaccggttggggcatcttctggatatatgcccaggagaggtattgctggatcctccagtagtactatgtccaattttctgaggaaccaccagactgatttccagagtggttgtacaagcttgcaatcccaccaacagtggaggagtgttcctctttctccatatcctcaccagcatctgctgtcacctgaatttttgatcttagccattctgactggtgtgaggtggaatctcagggttgttttgatttgcatttccctgatgattaaggatgctgaacattttttcaggtgcttctcagccattttgtattcctcgggtgagaattctttgtttagctctggaccccattttttaatggggttatttgattttctggagtccacttcttgagttctttatatatactggatattagtcccctatctgatttagaataggtaaagatcctttcccaatctgttggtggcctttttgtcttattgacagtgtcttttgccttgcagaagctttgcaattttatgaggtcccatttgttgattcttgatcttagagcacaaaccattgctgttctattcaggaatttttcccctgtacccatatcttcgaggcttttccctacattctcctctataagtttcagtgtctctggttttatgtggagttccttaatccacttagatttgaccttagtacaaggagataggaatggatcaattcacattcttctacatgataactgccagttgtgccagcaccacttgtcgaaaatgctgtcttttttccactggatggttttagctcccttgtgaaagatcaagtgaccataggtgtgtgggttaatttctgggtcttcaattctattccattgttctacttgtctgtcgatataccagtactatgcagtttttatcacaattgctctgcagtacagctttaggtcaggcatggtgattccaccagagcttcttttatccttgagaagggtttttgctatcctaggttttttgttactccagatgaatttgcagattcccctttctaattcgttgaagaattgagttggaattttgatggggattgcattgaatctgtagattgcttttggcaagatagctatttttactatattgatcttctttaatttctttcttcagagacttgttcttatcatacagatcattcatttccttagttagagtcacgccaaggtattttatattacttgtgactattgagaacggtgttgtttccctaatttctttctcagcctgtttatcctttgtgtacagaaaggccattgacttgttttagttaattttaaatccagccatttcattgaagctgtttctcaggtttaggagttctctggtagaatttttagggtcacttatatatactatcatatcatctgcaaaaagtgatattttgacttcttcctttccaatttgtatccccttgatctccttttgttgtctaattgctctggctaggactacaagtactatgttgaagaggtagggagaaagtgggcagccttgtctagtccctgattttagtgggattgcttccagcttctcaccatttactttgatgttggctactggtttgctgtagattgcttttattgtgtttaggtatgggccttgaattcctgatctttccaagacttttatcatgaatgggtgttgtattttgtcaaatgctttctccgcatctaacgagatgatcatgtgggttttgtctttgagtctgtttatatactggattacgttgatggatttctgtatattgaaccatccctgcatccctgggatgaaacctacttggtcaggatggatgattattttgatgtgttcttggattcggttagcaagaactttattgaggatttttgcatcgatattcataagggaaattggtctgaagttctctatctttgtagggtctttttgtggtttaggtatcagagtaattgtggcttcatagaatgagttgggtagagtaccttctgcttctattttgtggaatagtttgtgaagaactgggattagatcttctttgaaggtctgatagaactctgcactaaacccatctggtcctgggatttttttggttgggagactattaatgactgcttctatttttttaggggatatgggactgtttagattgttaacttgatcctgatttaactttggcacctggtatctgtctaggaatttgtccatttcatccaggttctccagttttgttgagtatagccttttgtagaggatctgatggtgttttggatttcttcaggatctgttgttatgtctcccttttcatttctgattttgttaattaggatgctttccctgtgccctctagtgagtctggctaagggtttatctatcttgttgattttctcaaagaaccagctccttgtttggttgattctttgaattgttcttcttgtttccacttggttgattttgcccctgagtttgattatttcctaccatctactcctcttgggtgaatttgcttccttttgttctagagcttttaggtgtgttttcaagctgctaatgtgtgctctctctagtttctttttggaggcactcagagctatgagtttccctcttacaaatgttttcattgtgtcccataagtttgggtatgttgtggcttcattttcattaaactccaaaatgtccttaacttctttctttattccttccttgaccaaggtatcattgagaagagtgttgttcaatttccatgtgaatgttggctttctattatttattttgttattgaagatcagctttagtccatggtgatatgataggatgcaagggacaatttcaatatttttgtatatgttgaggcttgttttgtgaccaattatgtggccaattttggagaaggtaccatgaggtgctgagaagaaggtatatccttttgttttaggataaaaagttttgtagatatctgttagatccatttgtttcatcacttctgttagtttcactgtgtcactgtttagtttctgtttccatgatctgtccattggtgaaagtggtgtgttgaagtctcccactattgttgtgtgaggtgcaatgtgtgctttgagctttactaaagtttctttaatgaatgtggctacccttgtatttggagcatagatattcagaattgagagttcctcttggaagattttacctttgatgagtatgaagtgcccctccttgtctttttttatgactttgggttggaagtcgattttattagatattagaatggcaagtccagcttgtttcttcagaccatttgcttggaaaattgttctccagcctttcattctgatgtagtatctgtctttttccctgagatgggtttcctgtaagcagccaaatgttgggtcctgtttgtgtagccagtctgttagtctatgtctttttattggggagttgagtccattgatattaaggaaaagtaattgttgcttccaattatttttgttgttaaagttggcattctgttcttgtggctatcttctttttggtttgttgagggattaccttcttgctttttctaggacatggtttctgtccttgtattgtttttttctgttattatcctttgaagggtggaattcatggaaagataatgtgtgaatttggttctgtcatgaaatacttttgtttctccatctaaggtaattgaaagtttggctgggtatagtagcctgggctggcctttgtgttctcttagtgtctgtataacatctgtccaggctcttcttgctttcatagtctctggtgaaaatctggtgtaattctgataggcttgcctttatatgttacttgacctttttaccttactgcttttaatattctatctttatttagtgcatttgtttttctgattattatgtgtcgggaggagtttcttttctggtccagtctatttggagttctgtaggcttcttgaatgtttatgggcatctctttctttaggtttgggaagttttcttctataattttgttgaagatatttgccggtcctttgagttgaaaatcttccttctcatctactcctattatccgtaggtttggtcttctcattgtgtcctggatttcctggatgttttgagttaggatctttttgcattttccattatctttgattgttgtgccgatgttctctatggaatcttctgcacctgagattctctcttccatctcttgtattctgttgctgatgctggcatctatggttccagatttctttcctagggtttctatctccagcgttgcctcactttgggttttctttattgtgtctacttccctttttaggtcttggatggttttattcaattccatcacctgtttgtttgtgttttcatgcaattctttaagggatttttgtgcttcctctttaatgtcttctacctgtttagcagtgttctcctgtatttctttaagtgagttatttaagtccttcttgatgtcctctaccatcatcatgagatatgcttttaaatccgggtctagcttttcgggtgtgttggggtgccctggactgggcgaagtggaaatgctgggttctgatgatgatgagtggtcttggtttctgttagtaagattcttacgtttacctttcgccatctggtaatctctggagttagttgttatagttgtctctgtttagagattgttcctctggtgattctgttagcctctatcagcagacctggaagactagctctcttctctgagtttcagtggtcagatccctctctgcaggcaagctctcctcttacagggaaggtgcacagatatctggcgttcggacctccctcctggccaaagatgaaggcccaaaacaggccctgtcccacaagctgtgttgctttggcctgtcacagaagctgttagcttctgtagtccacactctcacctgcatagactagtttcagaaggatcctggaactaagatagctcccctaggtgctcctgcaaagccctctccagcagggcggacacctttcctctggcagggaaggtgcccagatgtctggagcctgaaaagggggctgcctcagaagctctgtggctcccgcctgtcccagaagctgttagcttctgtagtccacactctcagctgtgcagactattcttggtggagtcccagaaccaagatgtcttccacagatgttcatgcaaagccctcccgggccgggcagacacctatcctctcaacttggttctttttcattctgggcctttagtatattttatataattttgaggcctagtatatttaacttctgtaaagaaataaggcagcatacaaggggttgcactgactctataaatcaacctgtgagaatattgttctctggaattcagttattgaagtcatctacaacagggttttataattttcataatatacattttgtactattaaatttgtttgctaggtattccattccttttggtgctcttataggctaacttaccttctggattccttggtcagattttcactgttgttacatagatttacaatttattacttgtgctgattttggcttctaaaattcagttctgctattcattcgtgctgataggtttctactggattctctagaactttctatataaggtcatgtcatctgataaatggaaacaagagtatttcatttctaataagaagatgtattttcttagttttatttttttttctgtctaattgctctgagctagtcttcctatacagcattgaacaggatctgtgtgagtgtgcactttctctttttcctgaagtgttttcccattgagaatggtactagctaaaatgggtttcaactcccttttattataatggggggaggggggtgtcttctattccttgtttgaggagtttttaatccttaagcagtactgagttttgcccaaaaacttctgtattatgaagaccacgagggttttttttttttttggtgcattatagtattcatatgacctatatgactgattgattttcatatgttaagtcaccagggatatattgtatttagtaatgatggatggtcctgttcatttgctctaagaattaatttgtcaatgttttctttaggatatgtgtgtgtgtgtgtgtgtgtgtgtgtgtgtgtgcatttctgtgtatgtgtacacatcagtgtttgtgaacttgtatatgtacggtgtgtatagagagcagaggtcattattagatatctttgtcaatcaccctccaccttatttttatttatgttttaaaattaatctatgctgtaagaattatatatatatatatatatatatatatatatatgtaatacactctgggtatacccattcttgcatactcagttcttcttcttatattcctgccctccctttccccgactgccattatgtgctggtcccatttgatggctttttggttttggtttttgtttgcttatttgtttttgctttgggacccactgagtgtaaccagggtcatttgtacaaggataggtgtgaaggtctttgctgggacaccgagaactcactagttatttcatgtgagtttggacctttcattgaacccagagcttatggattctgctgcaatagctgggcagaaggtgccaaaggtcctcctgcctctgccttcccagtgctggggttacaggtacatgcagctgtaggtcgcttttatgtgaatcgtggggaccaaagtcaggtccttatgctgatgtggcaagcactttagcaactcagcattccccagtcttctagctgttgagagttttgtgactatagccactagacatatcagcgtgtactactaggcattttttgtattattttagaaccaggtaatcaacactgaactcaaagaacgaaattggaagtgtttctttcaagtatttttttaagtcttaaaataaatagtattaatatttaactatttggtaaaattcccagtgaagccatctagtcttgagttttaccttgctgagtgtttttgattgttgattcagtttctttacaggatttagatctgttctggttgctaataccttggataaaaattttaagttaattactctaaaattgcatgtagaatgaggtgttttgacatatgtatacattgtggagtgtaccctagttaacacttatatcattatacatactgtataattatacaaaaaacatacatttttataatcgttttattcttttacatttcaaatgatatcacccttcctggtttcccctccacaacccccatcccatccccatcccctttgcctctatgaggatgctcctccacccactcacccactcccacctcacctctctagcatccccctatgttggggcatcaagcctccacaggaccaagagcctcccctcccattgatgccagataaggccatcctctgctacatatgtagctggagccatgggtccctccataacatacattttttaaaaagatttacacaccagaagagggtatccgatcccattatagatggttgtgagcccccatgtggttgctgggtattgaactcaggacctctggaaaagcagtcagtgctcttaacctctgagccatctctccagccctagcaacatccatctgtgataaaaacgtttaaaatccttccttcagcatttctcagatacaaagacaccatcactaactgtggtgtgctgtgcaatacaacttttacacttgttccccttgctaccaacggttctatcttaaaaaaaaaagatttatttatttcatatatgtgtttatactgtcactgtcttcagacacaccagaagacaacttgagatgcccattacagacagttgtgagtcaccatgtggtttctgggaattgaacagtttctatcttttgataaaattctgttctcatcactcctagttcctggataccagtacttcattctttcctgtggtttccactttttcagactttctgtgtaagtgagattgtatgataccacttcctatgctgggcttttaaatgacaagttgtccccttccttttaaagtctgaatagtattccattgtatatgtatactgccttagttagggttttactgctgtgaacagacactatgaccaaggcaactcttaaaaggacaacatttaattggggctagcttacaggttcagaggttcagtccatcatcatcaaggcaggaacatggcagcatccaagcaagcatggcacaggaagagctgagagttctaggcttcatctgaagactgatagtgaaagactggcttccaggcagttaggatgagatcttaaagcccaggcccacagtgacacacctactccaacaaggccacacctactactagtgccactctctggaccgagcttatacaaaccatcacatacgctgtattttcttcactgaggaattgttggacacttactttaattacagtattagcaagattcctttaaaatttgtattgaaaggcaaaagagcagaactaaattcattgaaaacaaaataagctaccaaatgtcaaaatccattgtaactgtagcaacagagactgcttactattgatggaggttagacattactaagaaatatgtccacaaaagtaagtatgcctattttttttaaagtaaggatgaaaggaattcaatggagaacagatgaattctggtatgatattggggcaactagggctttgaggggcagaggtaaaagtaaacactaaagaaagtgaacccaaaagacctactgacttaaatatttttttaaactatcaatttttatgactgtatatgagatcacttctatgttctaggccaaaccctgagattctatacttgaaatgtgaagcacaacccacaaaagagaaaatggtccttcctttctatgaaagagaagctcaggttatcagaggaaggtagaccccataaatcatgcagtatgagtgcatgctcactaaaaagaacttttcctcttccgtcttctttcctttcctaaataaacaggatccctgtcatttagaccagcattgccataaaacaaaacaaaacaaaacaaaacaaaacaaaacaacttgctatttctctgactacaaaagtcccttatttcctgaaagcagttttagagtatctcccccacctccccacccctttcctggttcaccaagccaagtccctgtgtcatagcatgacagctccgaggaagggaaggacacatcttaggattcccctgcaagtatttctttcaatttctgaactaaccctagtaagaaaaactttaagggatgtaaccagcagaaagctagggctaatggggaagggccatctccccagtaagaatatgacaaacacgtttttaaaatgccattctgggatggagaaggtgaaaatctggtttaccttcccaacggtaagctcttcattgacagctcacttctttctagaattgtctttccagacagcacaactggcttgttaaaacttttctctgcatgcatttaatagaaatgtatagcaagtttatttcaaagccctctaaatctaccaatacaacctttgatacctggatcctacttgtaaatctcagtacttttccttctttttaaggttggtggacattaacagcgaagtcatcaaattttctggcatctacgcaggagttggtgtggctgtccttatcctaggatactttcaagttagtagcacctccgttctagtaacagacagacatctggctttgaagacaccacgatgaaatactcagttctgcatatgaaagctctgagagagtggggaaggttccgacagccgagcagtcattgtgcagagaacagggcatgcaggcaggaaaagtgggcatgtgcaaccaccaggggtgggtttggatggggtgagggtggggaagggaggggtagacatttcctgctaagttgctgcctgtctgatctcccccatctgccttgctcttctcagtgaagtagttagtgtctgtaggctagagctgaggattatggagagaaccagactttgaggagagatcaagaaagcaaaatctattttcctaacagttttttttcctctttctttgccgaagcctaaccaagtgtccttctagtccaaattctgtaattttgaatctcattttttttctagccttagatgataaaaattttattaactaagagaaatcttccacattttgttatcttctgtagaaaaaagaaatgatcactccatctcacttattctatgagaacagctagcattagttctaaagagaaactgatccatcttttattctggcttccattttcatgatgccttttttttttttaaattagtggaaatccatcagcaaatgagatctacttggatcatgacttttggcttaaattgtccccacataatttttcttttttattggttattttatttatttacattttaaatgttatcccccttcccagtttcccctccacaaaccctctatcccctcccgtccccttgcctttataagggtgctcccccacctacccatccactcctgcctcagtgctctagcattcccctatgctgggttattgagcctccacaggatcaaggggctcccctcccattgatgcccgataaggccattttctgctacatatccagctggagccatgggttcaagctcagtccaatgtttggccgcgtacatctgaattgggggtagccactaggaagtttcagatgtcagagacccaagaggttcccaggagtcaacagggagaacattaaccgaaatacacaacaaaggggagagagaatctgtagagaccacatccagtggataggcatggcccccagttgaggggtggggccacccacccacctcaaaaataataatccagaattcctcctgtcaaaaagaaatgcagggacaaagagtggagcagagacttaatgaaagagactgccccacctagggatccagcacatctggatccagtggctattgttgatgtcaagaagcacttgctgataggagcctggtatagctgtcccctgagaggttctgccagagcctgaccaaatcatttcttgaacactgtgcatggatgcctagaggtgtatacacagaaggagaaagccgagaagggttacgcaaagtgaatgaatgtagatcatccattttctagtgtgggcgttgtgaatttctttcacttgatggagacagtgaagcccaataggtcaaatgcaaagacagcagcctgtcctcctgccagaattagagttaaagctggatccttgccacccccacaaatgtcagctggcctccccattagcaggggtatcagagctcataccctagtgcccaagagaggcactttgtcaacgccttcactcttcttttcagctagtcccaaccataaccacgggaagtgcgatttttcagaaataggagaaagtatagacaaatctgtttaacctgtttagtgctacagtgctaaacacacctttgtttgtttccagataaggttgtgggtaatcactggggctcgtcagataaggaaaatgaggaaattttactttcggagaataatgagaatggaaatcggatggtttgactgcacttctgtgggagagctcaattcaagattctctgagtaagtagcaagtgctactaagttataatatcttatttagattgcgaaaagaacccctcatggttatgttaagtaacaatttgataaaattttcagtttcattttgatttgctctgtcttgtagattggcaagcatgactgcccatggctgtccagtaggtgggaggtggaggcaggatgatcagaagttcgaggccagtgttgactagacagggtattcaaggccagcctgggtcacataacaccttggttttataaataaaaataaattatactttcataggcatggcattttcatagatattagcttaaactatagttcctaaaaaataacagggtactagaatttgtgtatagaacattggtccaaatgttaagtgtgacttattacaggagagggtttagaaatatgatgttatttgacatacagtgaaactgagagacggataagacaacacacatggggaaaacacacatagaaaccattcttttgctatgtctatggaggcacagaaagaaacccccaaataaattctaaaagtagcttgagaaagttaaaaacaaacaaacaaacaaacaaacaaaaaactatgcaaacaacagacttaaagacagcttaaagtagttggaccctcctgaactgaacttgaagccctgccaaagtctgtaaatatactgtgaaggatatgagggaggcaagcctcaggaacgcttggtaacttgagactctgttaggtttgggatatacatcgcctcccttgtacaacaatgtacctggcagcctaacttctttgctttcaggacacacacaaacacacacccctctacctctgaacaatattcctaacaactccagactccctcctgtatcgactacacttatagatctctgtaaaatggagaagtttctcttaccttaacaaccatcatatttggacagtttctaccaaaagtctatctgtgtataaagagtagaagggcttgaagtgcctttgagaatctgctcagtaaatcaaaactgtgtccttgggcaaactttagggaagatcctctatctaccatcttatgcttgtgaataactggccatgcatatgattaaagtcaggtgcattatagaaagagacatgtctagtgtgaaagaataaatagtgtcaaaatctatcaataaaaataccatccaaactatttccccgtagtagccagcctctcttttctttagagcgcacagaagtcagatctcaggacatgaggcatggggcccctgagtactatatggcctgtacagtctattccctgtgctatcacttcagtttgaacaaagctatcttgcttcttttgcaattttacgtgaaccactatttttagttctttgaataagaggccaagaactcatgcttatgctgtctgccagtgatgttagaatggaagtttgggtgtctagagcccagcactgcctttccctccactctctgtgactatcaacagatgcttaaccccactagaatacaatggttaacctctgggcgatgtcttgagttccttcttgctattaaataccaacctatttgctccatccagacgagaaattaaggcaattctctcaggtttatgcaattatattcaatcactattccacaatactttccatctcggctctgaagatccagagtaccttgattctggtaggaggcataaaattagcaagcaaagaagtgatccaaagtagcaaaaattggtgctcgttacactaagtactgttatatatgcttgcatataattactgaactgtaaggcaggacctgctactatcatctttttatatttgagaaaatcgatacccagaaacttgaataattttcccaagaagaacttgtattcaaattcagagtgtggtcccagagtctgtgttatatgccaccagtctctctctactgcctataaatagaatatgataaatatagacagacagacagacacagacacagacacagacacagacacacacacacacacacacacacacacacacacacacacacacacacagaggcagaaagagaaagacagagagatcagacagatacagagacagatctatagatagacaggtaggcagacagacagacagacacatacaagttaatttctttgctatggctatgtaatgaggtgatataagtgtttcctgggaatgatccagaggtttggaatccacatcagtgtgcagagttgagatgcacacagctgactgactataaggtgtgagaaattctggaaggtgcgagacagagttctcacttctcactaaggagtaacagcagaacagcagcatatgagaaagagaaagtgaactgacagaattcagtcgtattgatctacacctctcttatttgtagtgatattaataaaattgatgaagccattgccgaccagatggcccttttccttcagcgcctgtcgacagctttgtctgggctccttttagggttctacaggggttggaaattaaccttggtgattctcgctgtcagtcctctcattgggattggggcagccgtcataggtctggtaagaatgctttgttttgttttgttttgttttgttttttaacttcgcttcaaggaaagatgtacatttacaccaaaaggccaaaacatgattcgtggatgccttcaacaagtatagtcaatgtgatgatcactatattgatttctaatgcttggttactcctcagtattaaataatgacccacagcatgtgcataacgatgttttagtaaggtaaatgttatttggaggacagaagtctactgtatggatttaggatcttctattttgccaggggtttcacactcactatctctaattcttacaaagaaggaacatgctaacatcaataagagtcaataaatggagctcagagaagcaaagggagctatctagcagttcaagggagcctgatgcctggtccccacccactctccagcagaccctatgccccctatactctaatgttcaagatggcacaaattcagtcagaccagcattgagtactccaaaaagatttcttgctttgcagccgcgtccccagttcagtttctgggtcagatctgtagatttggttagagcgtcttctctgttaatatctatccgttacctcagttactcaggccaggcccaagtgtagaaattggagtttggggatcactgcagtgaaatgtctcccttgcttgcagaaagtattattattattatttttatctttagaacatatttttaaaaaaaaaaatctgaccatcacaggtcatggtgtaaggctggctgaaggcttactattaatagattgcaaaggaaacatgtgagcaatacttagttatcattgaacagcagctaataatcaccacagtgatggtttccagtaaaatatccatgcagcaactaatcatcacacgtaaacacttttcaggcgatacaggaaagggctaagagtaacagtagcaaggaactccctctaacaagtgtgcatcactgaagagcaacacatgtaccccttcagagctcccgtcacaaaaccaccggacctgaccgctaacaagtgtgtatcactaaagagcaacatgtgcaccccttcagagcctcagtactgttgtcttcaatacaggggtgacagcctaaatcgtgggataacttgggggtgatggccaggttctacattaagtacagcatctggcacaaaaatctattgttaaagagatagtatagtacttttttaaaatccacaggactatgcaagctttagaactggctttccgacagaccgctgtcccgccttgctccagagaacctcaaattccactgacgaccctgagggactctgaaaaattttgttcagcttttatttttctttctatagtcacccttaatttttcttcaaacctgtaataaattaatacacatatactcatgggtccctgagataaattcatacacatatgctcatgggtcaccgctgtgttttcacaccatggaggtggaacaagtgtctaaacttggattgagccagacttcacagtacaatttcttgtgccaccaaagtgcctaagagtctagcctcttcatttggaatgttctagttcggcacttaactcccttcgtatctgtgtctatgcttggctatccctgtaatatgataccagcaactttgttgtgtgtaagtcaaagacagaacacacacacactgcagtgaggagcaacatatgacacagtaacagcagatgtgggttttgtatggttttgtcacatcttcctctttaatatgagaaatatgaataattatcaaatattacaaaatattagtttcttaaaatcccaatatgttctcctctttgtatttgttttgattttcaaaacagagtttttctgtgtagccctggctgtcctgaaactcactctgtagatcaggctggcctccacctcactgagagccacctgactctgcctcccaagttctgggattaaaggtgtgtgtcaccatcacctggatgaatgtgtcctattattaagaaatgtggccctcagtaaaggtagtatcactcataactctttaatatttttattactgtgcaaaaatgtatatgtttcaggaataaattagatagagaagggataaaagttgaaatgtcatccatcaaacttgaacatgaatagcgctgttggggaaaacagctttttaatttacagattttatgaaatttagactgagcaaataataaatatattgttgaagctattttcatttattttgtatttataaactctgtctaatattttgctagtcacagttctgctaaagatctagaaaaatttaaccctgttagaatatatactcttatcatctgagtactatatgtgtcttagatttctgagttaagtgctgttccacgatattaacttcctcccttccttcttattgttgttggctggttggctttggttctgatgggctctcatctatctcagactgactacgctctcatgtagctggggttaccccggaatccttgtttccctgccacgcactcctgtcaagtcagcttgacaggccgagaggcctaaaagccactcatgagacagagagtttcacagaaactcactcctggagtctgacgttctctttaacccatatactcatattctattcccgcattagtctggtgtatcgatccacgtgctctcttttagtattatcttattataagtgccttttaagattgaattctgacatagctaaagcctttgccagtgttccaacagtcctagaaagtccttgagcagacaatgggcttggaattcaggaagaatgttgcctattcagtgacattcagaatagcctctagtattacactatcactttgaataaaagctaggtcactgccgtacacaggaatttaccatcatctaggaagaaggaagtttcagacctaaggagaaaccagaatagatacttagaactatagatagctgagttacacccatacacacgtatttacaatggcctaagggaaaggtggactatacaatagactaaaataagaactatggcaagggcacgaagcccttgaccctggcttctaagattaagtgaatcttaggtggagcccttgttgatcccagttgctatcaatgaattctatcccaggtggttcctgttagaccttctgtgtttgcattcctctgttttatgtaagaattcagtaacttctttgtaccttgcgggtatgtcacccaacttccctattgtcttctgtataaaaagtttgatgctcgatttgacaaattacattcagattctacacaacttctcctgagtgcatctgtctgtcaattcatccaacgctttgcccacctgcgactagagacccattccatgcagacaaaggggcccagagggtctgcagcatttccctggtgtgattgtaggcatatgtcgccatgtccagctatttttgactaggactcagtccaaactcagttttagaaaggtgacttttgaaaaattgctgaacacagttgcctttttttcttttgtaaacattaaaaaggtcgtaaaccccttatgtttgagtcaaaatattcacccaatgccttctcctttggaattccctttgcaatgctgtgtctgtgtatcctggtccttgctctccctctctactctagccaaccatatgcttacataggcctccagtccttttttctgatgtttgtaaattctgcaatggtttctttccaattgtgaagggatacatcatagtttgacttagggacaccattagcacaacagctgaaacattagtattcccagacttgagagtacttaactctatgagaacattttcattgagatagactttaatctcattttaacataccccaatccaagcacccatcttgaaccagctttttctctcttttgttacaatgaaacacctagtgttttgttaaaccacaccacctgttcattttgttagatgaatcactgactgacaggccaacttcctttttatttcttcggattttagagtgtggccaagttcacggagcttgagttgaaggcttatgctaaagctgggtctattgccgatgaagtcctctcatctattcgaacagtggctgcttttggtggtgagaataaggaggtggaaaggttggttatttttgaatgtctgtggctttcctgaatttcatgaagcaatacagttccctgcctttttttttttcttttctttttcattttgtacaaagtggcagatccactgtcatttagagcaacaggaggggtcgggggcatttgtttaagaggtggattggcaaatgttgatgggcagagtgttacagaaggcctagagcaatgttttggggtttcagtttcccttgtggatcttgctgtatagaccatggcggtcttgagctcatggtcttctgcctcagtcaccggagtactagactgaaaggtatgagctcccatgcgtaatacagtatgcttctgaagatgagatctagagagccaaataagcaagaaactcgtttcaacactgatgatacaaaagcgaatatattatacctcatgtcaaccttcagcagcattttctgccgttaaagacaatctactgcgcttagtaagcatgtctacatggttaacagacatcagactacacagacagcacagaaatgcatcagacatgaaaagctcagcaaaaataaacaaacgatactgcatcatgttacaaagctcccaggtacaacagcagcagctcacagaaaagacagccgtcagaaagagagaagctatatgcaaacgacgcatctgacaagggatagctatagaaaatatgtaaggaacttttaaaagctcactagtaagataatgattaatccaacttgaaaaggaacaatagggttaagtagacagttttcaaaggaagacacacaaatagtcaagtctttattaaaactgcttcatcacggtgactagtcaccagggaaatgcagttcaaaaccagcatgcaatactaaccctagtaagaatggatgttggcaaaacggctaacatatccaatgaggatatgaaggagcccttgcacactattggtagacatgcaaatgagtagatctattatgtaaaatagcaaagaagttcctcaacaaattaaaatgagaacaatcatgtgattctataatcccactcctgggaacatacccaaaggaaatgaaaccagtctgtgtaatagacatgtgcactcttgtgtctgctgtagtgctgttcataagagctaaggaatagaggtgacattagtgtcaattaatagatcaatgatacaatttgatcacaaaaggaacaacatttcattgtttgtgacaacgtgcatagtcgagtgaataaggcaggcttagaaagatctgcacaattgcacttacatatgaggaatctacaaatgttgatgacatagatgttaagagtagaatgatggctgccagagactgcacagagcagcaaggagagatgggcagagaaagggtgaccaaaggatttgaagttatggtcagtcaggagaaagttctgatgtgctgaaacacagtacaactataagtagcaatgtactgcatatttcaaaaagcaaagacgaagttttaaagtttgtcttttgtttcttgttttttcactaggtatcccagcctgactttgacttgctatgtagccatggctgtccttaaacttggaatcttcccacctctgactccctaggtctagaatcacttgtttgctcccatacccagttgataaattattgagactatctatctatctatctatctatctatctatctatctatctatccatccatctatctctcctgatttaaacattatacaatatgtacatgcatcaaagcatcacattttattccatctatacatatatatatatgtgtgtgtgtgtgtatgtgatgctttgtttttatttattagtaaaaaaataatttaatttacagtttcaaagaataaaagagcctgactcatgtctgtcatcccagcacaaagggaactgaggcatctattaaaattagttgttcatacactgtggcaaaaaaataaaataaaaaaagaaagaaagaaagaaagaaagaaagaaaaggaaagaaaaggaaaggaaagggaaggaaggaaggaaggaaggaaggaagaaagggtaacctgatccaaatgcaattccaaggttttcaaattttaaaattatattttatggggaagaagggagggttgtgtgctcaaaacaggagtgtgaagatcagaggacagcttgcaggagtcagatctcctcttctgctatgtgggacctggaggtcagacttgagtccttggacttggtggctttactcactgggtcatcttgccagccccataacatttctttaatcgaacatatttaaattgaacatttaattgaattgtgaagtattgtgctgttaaatgcccttaataacttttataatttttcatttaagcaaacagaatttaacatcagtaaattatgataaatcattctagagactaatttttaataaagtaaaaacttaatttgcaaaattatacagttgtcaaaaatatgattttatattagggcagtggtggtgcacacctttaattccagtacttgggagacagaggtaggcaagtctcatgaatttgagaccagccttgtctatacaagtttcaagtttcaggacatccaaggctacacagagaaaccctgttttgggaggaaggaaggaaggaaggaaggaaggaaggaaggaaaaggaagaaaggaaagaaaggaagaaagaaagaaagaaagaaagaaggaaagaaagagagaaagaaagagagagagagagaggaagagaaagagagaaagaaaaatgcatttatttttgtaatttagttaatattttttgagctttttggttggttggttggttttgacacacagtctcatgtggtcttcactggcctgggattcaccatgctgactagtttaatctgttggtttggagataattgccttactttctgataaaaaaatgatttatcttccaaagaaaccttttcaacataatttttaatagctcccaaacaaaggtatttgttaaaaaattattttctcttggagtcaaagttacccactgtttctcatccaagcttcaaccaacttcagaagctttgtttcagggattgacgataatcactgaacgatattcttcaccatgaatgcagacacagacagacacccagactctgactctctctctctctctctctctctctctctctctctctctctctctctctctctctctctctctctctcttacacacacacagaggcacactctctctctcacacacttacaccaacattttaagctttaggccttaagctgctctggctggtgttgagccaacccttttctgtttacaggtatgagaaaaatcttatgtttgctcagcgctggggaatttggaaaggaatggtgatgggcttcttcactgggtacatgtggtgtctcattttcttctgttatgcactggccttctggtacggctccagacttgtcctggatgaaggcgagtacacaccagggacactgatccaggtactttgctcttgtttcctatatatagtctttcttgctagcttgtcagaaaagtcatcagaggattaatccctttaatgtcttaggcaagaatgcctcagaagtttgctgaagtccatctgcagggccaatgatactaggacactttagtgaagagaagttgaactcgtggtctgatgagaccagtaacttaatgattcccaattaactaaagagtttacagctgtacagtaatgatcctccacctgatcccaaaagaaattataccatgaaaatggcaagtcattaacccctcagctaaaggtgaacaggtcataaaagcaaagttagtaatagtgcaagatatgtaacgtcttcaacggaataggtgatacaagcatatttcacaattcttttgtgggatgttatgacaccacgaacattatagctactttaattcacagtgttctttgagtcattcactcaagcatttacccagcgtttgctatgtgccagatccatccaaagcacagtagacaaacaacaacaacaacaacaacaacacttttcatttgctgtggtgctggaaatcccttcatagaagatttttaaataaaataaaatgttacagctgaagattcttgataggaaggcaccagctttaacaatgaaaagtaccaggagttcattacatgagagttttatcattcaaaacgccactgtttattacaaacccagctctaggggaaccaggagattcattgtcgatgggaatgatcaactaatacatgtcactctgagcaagataaggaagcaacaagattgttttaagtcatctttgtctttgacggatggacatctggagtagctttgaactttgtttaaaaatactgaatgtgataacacatgttcaggtgttctgtagattttgaatgatagtatggaaagtgttaatgggatcacaacctaccaattgtctctgcaacttagatctaattttgcacatcggaaaagttaaagtattgtaggtctgagatctgactatgaagttctttctctttatcgatctaattgcttctaaaagctttagacattcattggcgctggcgagcaccaatgaatgtctgccaagcacactgtcctgagttcgattcccaagactcaaaagagaggaggtaactgattcaggcaggtccttctttcaccttcacccctgcattgcagcacgcaagcagcccctaataaacaaacaaaaaaatgtaatgaaaataatttaaaagctgtatacatttacccaccaagggtatcagtagctgaagttagctttggctgttcactttgtagaaatgttttcactgagcaaaatcgttcttttattctgtgcctataagcagaaagagggatttatgaataaaagttcaaaggagaagtgaattggtaaattgaaagttaaatgatacacaattccaacagaaagctctgagtaaaagtccctgtgtgccatagcttcagttgtcaactttacatacctgaaaaaggacccttgattgagaaattaccttcatcacattggcctgtgggcatgtgtgtagggcatggctttgatccatggttttgattgctaattgacatcagagggcatagtccactatgccattcctagacagatggtcctgggctgtagaagaaagcaagctaagtaagcctagggaacaagccaatggagaacaagcaattcctctgtggtatctgcttcagatcatgagattcctgtctcagctttcctcagtaatagactgtggcttagaagctgagtaaactctttccttttcagattgtttttgaccatggtgtttgtcacaccaacaaaaaatcaaactagaacaccttagtcatgaagtggcagcatgactaaggcaacttatagaagacagaatttattggaggatttcaatttcagagactgagtccatgactgtcatggtaggagcatgacaaaagttaggcactaaagcagtaactaaagaaattgcatcttgttcttcgagcatcagggaaggagagagagagaaagagagggagagagagaaagagagggagagggagagggagagagagaaagagagagggggagagggagagggagagggagagggagagagagagagagagagagagagagagcattaactggagaaatgtcatggacttttgaaacctcaaaacccactcctagtgacacatctcctccaacaagaccacacctcctaatccttcctaaacagttccaccaactgttggaagcattcaaatatgtgagcctaacaagttcattctcattcaaacactatagcaactagattctagttttatggttctccttttttaagtttcctgggggttcaaccatgagaccacctatcatgtgtgtccagcctgccacccacatgtagccaatgaaagctatgaacttgggccaacacaatttctaaacttacttaaaatattaagattttgaggggtacttctttgttttgtaacttgattgtatggactttgaagttggcaacattggttgaacatccctactagatctttcctgaggagtttgtcatttagtggtttttaaagtagtttactgtgtgtagacatagcataccatgtgtctctaatgttttagtaatcaattacaaccctcttattctcaacttcttgctataatactctgcttaccctttacctggataaatgctgcttctttgttaaggctctctttaatgatattctctcttctctctctctctctctctctctctctctctctctctctctctctctctctgcctctcgtgtgtgtatgtgtgtgtgtgttcttggttatatttctacacagcaattttaaaagctgaatattcttgagtttcttgagttgagtttactgttttaagctactaaactaattaacaatcaaattaatctagcacattttgtggtgcacaaaattattatgactgcattgggtgtaatgagaagcagctcacatagattactgtaattagtatcacttgtgtacagataaaaacttgctttctggtctattagggaaagatgaagaggaactgaatgagggggaaatcttgggtttttatttacattttaggtttcaataataaagaataatggcagtaatagaaaacagtattttcttggtgcatataaggcatcaggcactgagcgaggtgtttaatgtaattaccataaataatatgcattacttaattctgtgattggtgctgtaattctactactacaaaaatgaaaagcagctgtgaggttaattaatatgtgctaggaggcatcaagtatgacttgagctcaggtcccagtgacttaggactgtcccattagctgaccttcctgcctccaggtctatgtggtaagagatacagatcctaactccctggaagggtggcccatgtgttcttcttaccttccttgcatagggatacagatgtgggatttctggtgagaacatcttgcctgggatatgtcccattgactccagtcatattgggcataagtctgtctcctctcactcctggattctctaagaacctccatagagaaaattgcttgaggcaatagctttatataaagccaggctaaggtcaagccaaggtttgaccctggtttcaattgaagactccaatgactcagtaaaagagtcactggtgcaaatatattccttatccatttttttttcataaatacacttttattgagacatagcaatggtcatttatttacacattgctactcttacttatgtgccatgtggtctgggtacacatggattcaaaactcatatggcctgaactgtttattagtgggcttttataatatgtgtttgctgggctcagatctaggacccaggaaggcttgctttgctgaggtcactggagaggatggtctttaaaaagcttagtcaggaactgttcttctctgcctgtttgcattgctcgctccgttcttccactctgtcgaaggtaaacgaggtattttaaattttaactatggagaaattctttacaaagccaaaacttttatatatttctgaaaagcccttaaactacttgactttaataatatttctgagaaatcttgagaactcgtaaggacactccaaatggtaaatgtcattatctataaactgcaaaaatgtatgcaaactatgggttgtttttttgttttctgtttttgttttatttttttttccagattttcctctgtgtcataatagcagctatgaatattggcaatgcatcttcttgtttggaaatcttctccactgggtgttcagcagcttccagtattttccaaacaatagacagggtacgtaaaagtcaaaagaaatagttaatggggtatgtgcttggataggtcccaatagctgggacactttatgtccttgctgtcatactgggagatgcccattaaaaaagaaaaagaaaaagaaaaagaaaaagaaaagaaacagttttggtgagacagggtctcacatgtggtcctggctagtctggtactgtctatatagacctggccctgagatccacctgcctctggcttttgtgtgtgtgtgtgtgtgtgtgtgtgtgtgccagaattaaaggcatgcactaccacacacagcaagaaataaacatttaagggtaacatcagacagcactaaatccactaaaagataaaataggacaaggtgttatgactggctagaatgggagacttgagaagtaagaaccaaaaagaaaaaaaaaggaaatcctggttgagaaacatctaggttgggaaagagcttggtgcactcaaggagttaagaaagtccagtgggaatgaacacagtcatccagggcaaagactggaaggatgggaaaagccttgtgatcatgcctgcaagcatggatgctcttctagcaggaagtctctttacatttataaaggaccttggtatccctgggtggatagtgttggttaatttatgaacagacattgaaaatcctgtaaggtaaccacagaccaagaacagaagggagaaaataggactctgctccttcttctcgctggggaccaagagccacgtgtcacctgaactgagtggcttttgttgtttttgatgttgttgtgtttttgtttgtttttgattttgattttgtttttttgtttggctacaatgagattgttatctacctgaagaaactcttttgtgttgtgagttccatgacctggaatatgttgatattttccctttgaaaaaggtttgttttatttttgttttttattgtgtgtgtgtatggtctgtgcatgtgagtgcaggtcagaaatgttagactccatgagcctcccattgtgggagctgggaaccgaatttgggtcctctgaagagcaagtaatgactgagccatctctccagccctttgatcttttctttttaaaatttatttatttattttatgtatatgactgcaccatcactgtcttcagatacaccagaagtaggcatcagatcccattacggatggttgtgagccaccatgtggctgctgggaattaaactcaggacctctagaagagcagtcagtgctcttaaccactgagccatctttttgagcccctttgtccttttctaatgttatcttttctgtcccagtctcaaatcaaatgatgcctgcagagcttccatgtaaacagctgagaattaaggcatttctattttattttattatctttattaaacacttgagaagaagaaaatagactccagtataacctctgatggggctatggtcatgaattcctattactagtgtgaactatggacaaagttgaacctggagtgtcctaagaggaagaggcagcccccttcctcatgtagttagccagaatggttgttttagatctgtctcattagtaacagcagagccaggtcagggtacagttggaagttggtgatatggatcattttgtggtcacttaattgtattcatcatctgtattgcctgccaaatgtagtgctactagccccagcctagttggtcagctatattaccctgggcaggaaactctctgagaggtttccccctgcctaactagaacatagcaatcatgtaaatgtaaagggtacattaaaacactttgtactttgcctcctatcatctcaataatataatacattacaataaatattaaccatattaatattgtattttatgtgtcaataaacaatggttttataatattatagaatatcagcaacctataagcttatggtgataattaacaaataatattaattaaataaataaaactatctgctattatataaaagtcacattcaataataacatatagtaatataataataactcagcaacctcaacagtaagtagtaactgacatcactcttgtaaatatgaaatattgaagcgatttatccttagacatctctgcaatattttgcctagaaaggttatgctttaaattttttattagatttattcattttactttttttgtgtgtattttgcttgcctgtatgtatgtgcactacatgcattcttggtgtggaagtcaaaagagaaagagaatatcagaagccttggcaacaaagttacggatgattgcaaaccaactaccatggggaattgaactggggtcctctgcaggagcagcaagtgctattaactactgagatatctcaccagccccagtttttctttgtgggttaactaatatcaagatggatacaacatgcatgtgtcatgcactgtcacaagtacaatatctttatattgcattccagcaacccgtcatggactgcatgtcaggagatggttacaagctagatcgaatcaagggcgaaattgagttccacaatgtgaccttccattatccttctcgaccagaggtgaaggtgagtgtgtacctttggcctgatgttttggactcttgagtaactcatctccagatccacacactcttttctaagtgctgactcagttttctggaacagaggacaggaatgtgtttctctgaaagtgtcctttggtattgtgccaacttagggacacagtgcatttcttagtgatgattataatgtgcaaatctccctgggtggaactcggtctggcacgaggcttgggctgagtcatgtggtcctctgttgaaatgagtggcaggtcctgccgttctgtgtatgtggtaaggcaatcaaaacaagcaagtagcacagcttcccattaccacctccttggaaaccacaggtggggcagaacgaggggaggattctgaccagtagagatagcagctatgagcagctttgcattagtccttagaggtaagcaacctggtgctgttgctctcttgcatcttggactcagtgatcatccagggctcacagtgagggaaatatattgttttctagcacctatggggcaatatcattaaaggtaactccactctaaaggaatctccaatcagcgctcttgaatggactggctttgaaatactgcttgtactattcatccagaacttagcatctctggtttccttttattaataatatttcccttatactcacaatactaaatcctaacttcacctgctaacatttatttatttatttgtttgtttgtttatttatttatttatttttttggtttggttttttgagacagggtttttctgtgtagccctggctgtcctggaactcactctgtagatcaggctggcctcaaactcagaaatctgcctgcctctgcctcccaagtgctgggattaaaggcatgcaccgccacgaccggctcacctgctaacatttagaccatgcccttcacagagttttagacccagaaacacagcacacacatttactaggcaaacttatccaaataataaactcacaaagacatcatcttcaaattggtttatttctgaccctttgtccatgaattatcattacacttgtgacttataggagcttctttggtttggttttgttgtgttttgttttgtttttttgttttttttgagacagggtttctctgtgtagtcctggctgtcttggaactcactttgtagactaggctggcctcaaactcagaaatccgcctgcctctgcctcccaagtactgggattacaggcgtgcaccaccactgcctggctatggagcttcttatttaactaattgagatcgactccttgtaatatcctagtatgtcagatgtattttaaattagattttgaggtatacatttaaaggtgacccttgcttatttacgagtgttattacattatcatttttattgtttggcacagctattaagcaacatgctaacgataaagcctctttccagtcagtcttcttttgttgttgatggctagatatggacagtgctacggggcataagtaaacatgcacacgcatttgcacttatgtgggaggcatagatacaggacaccagtcctcatgaagcaccctatgtatggcctcattgcttggttaggtgcacagtgacattatgaactttctaaagaatgttcttcccttgtcagattttaaataacctcagcatggtcattaagccaggggaaacgacggcgttcgtgggatccagtggggcagggaagagcacagcactacagctcattcagagattctatgacccctgcgaaggcatggtgcgtatcttctagaaacttctcaacatggaggggtaagggaaaaccagtggtggtggtgccagtttgatttttttttttgaaaaaaaagtaataacatttaacattttctttctttctttctttctttctttctttctttctttctttctttccttccttccttccttccttccttccttccttccttccttccttcctccttccttccttccttccttccttcttccttccttccttccttccttttttttctttggctcacatttgtaatttcaactgctttgagcagcaaagtgttatttgacgatccagatttcaaagcaagatataccataaagcacatatacaagatagaggctactgtttacttttattatatcctttgatacaattttggacacaagccaaaaggcaatagatatattcagagtctggtgaacaactggttactctcctgagaaattaaaaatgtacccattctgatgctagcagtgagaacttaagtaactttcatactacccgtgtttctacaatgaatttctgtgcagggaaactcagctcaattgcacactggcatcctcatacaacaggcacagttccatggaaattgcttctattatggtattcttaggctctggttattctccccaggcaccaagtatcacctaacttcacgattccgaatcttgaaggacactaagctgtgtgatgctcttctgctctctaggtgactctggatggccatgacattcgttctcttaacatccggtggctgagagatcaaattgggatcgtggaacaggagccagttctgttctccaccactatcgcagaaaacatccgccttggtagagaagaggcgacaatggaagacatagtccaagctgccaaggatgctaatgcatacaacttcattatggccctgccacaggtaccctacctacagtccaggggagtgcagaagtcatcaaaggaagaattagtccttttcatttgaaacttcagtccttaaattcttaatggcatgctctagatttatgcctggaaacgcccaatgcttttcctttcatgtaaaaatacactgtctatacggttagcatctgtgaaagtggagctctatcttttaaaaatgtcccttttgctggagaggtctcatatatatatatatagatagatagatatatgtgtatatatacatatatatatatatatatatatggatctgcaggcagcaggaagatagccactggggtctggcttgagcttctcaaagcctgccctcccagtaacacacttcctccaataaggccacgcccactccaacaaggtcacacacatttccttttaaataatgctactccctatgagtttatggaggccattttcattcaaatgtcacatcttctaaatcactgttttgaatagcattgccaccatgaggatgctatagcctagtagctaatgagaataatgctttagaactaccctgcctcgacataacgccaacatctccaccttctagctttatgagcttcaggcaggctagtttaaccctttgggttcagaatgtccttgttcaaccattaaggcaaataatggttacttgcctcctggggttctatgaggactacatgagatatatagatgcatatccatacatattctatatgtagaatttcaacaccatgcttttttgtcagtggtgaggagcttagcccttcttggctgatactgagaaagtcaagaatctgacttctaacactccattgttaaacttcagtgtggacttagttctgtggcttatcctcagtcaggacttgctgtgacagcaggagtataacatcagcttcattttttgttcacaacataaagacagatttagcattgtgtttgctttgtgttcagcatgagaaaagagacaagactgtggcatgtaacttagtcctctaggatggattttcaagaccgatcaattttcattttggctaaccatttttatttcaccatgaactaaaaaaaaaaaaaaaaggaacattcacacagttcaatgtattaattatctcacatacaaatattgattggttagttctttcagtaaaggatgtttctttcagtaaaagttggacccgtaaaaattcacactggagaagaaagttagaagggatactgaatcgctgtctgatgccatcaaatgtgtcttcctcatgatttctagcaatttgacaccctagttggagaaggaggaggccagatgagtggtgggcagaagcaaagggtagccatcgcccgcgccctcatacggaaacccaagatcctgcttctggacatggctacctcagcactggacaatgagagtgaggccaaagtacagggagcactgaataaggtttgtgaagagtcaattcattttaatagcctcttcgagaagggagtaatactaacaggtcaatatattcagcctgaaaatgtgtaaaacattggtcaattaccatctatttagtgttgaataggacatagttgtgattcactcaccaaagatgcaacataaaattaaaattcatatgaagtgcaacataatttatcctcattttattaaactattgatgaattatgacaataaggtcaatctgtgatatgatttatggctacaagacactgttggctatttctgatatatgcacagcctgtgtaaggatatttctagggtccaaagctgacttccttgtggactcatggatagtacaaaggttagcattggctctgtcgtgtagtcttgtttaaagatacatcttgtcttcttacagatccaacatggacacacaatcatctcagttgcccatcgcctatcaacagtcagatctgcagatgtgatcattggctttgagcatggaacagctgtggaaagaggcacccatgaagaactgttagaaagaaaaggtgtctacttcatgcttgtgaccctgcaaagccaagaagataatactcacaaagaaacaggcataaagggcaagtacctctttctctttggcctgaatattatactaaataattaacatttatgctgctggttcaacttatgtttgtgaatatgcattattcttattattcctacaaagcccagcaaacattatgcagttgataaggaaaaacaaaaaaacaaaacaaaacaaaacaaacaaacaaaaaaaaaaaacaaagaaggctaagttacctgatcaagtcatagagctaactaaatccaaggttttttgctttcaattttaccattttttaagcaggacaggctgcctagatgagtcaggcatatgaaggattctcattattattgcatgaattaaacaatgactaaatgttttgcacttattttcaaatggagatggcttatttttttccatctgaactttcagacttagtgtttatactgagctaattaatcaaccacttttgactttctccaccatctcccatgggaacctcatgaacagcattaagcataactatcgtatatgtttaatacttgaaatctaagaagttttgaaaatttgctgttttttccattaattttatttattttattttattgatttgcattctagctgttgctcccccttcctggtcccctgttccacagttcctcatcccattcttcctccctcttacctctgagagtcctcttcactaggcctgtcccttccctagggcctcagttctcttagggattaagcacatcttctcccactgagaccaggtcaggcagtcctcttctatatatgtgctgggtgcctcagaccagcttttgtatgctgcctggttggtggcttagtctctgggagctccctggagaccaggttagttgagattgctagtcttcctatgcagtcaccctccccttcagcttcttcaatccttcccctaattcaacgatatagaagtcccagacttcagtccaatggttgggtgtaggtatcttcatctgtctcagtccagctgttggtagggcctcttagagggcagtcgtgccaggctctcatttgtaagcacattatagcatcagtaatagtgtcaggccttggtgacacccccaccccatgagatggagcccaggttgggctggtcattgaactgcctttccttcagtctcttctccatttttgtccttgcagttcttctagacaggaacaattctaggtcagaaattttgactgtgggttagtaaccctgtccttccacttgaggccctgtctatctactgaaggaggactctccgagttccctctccccattgttgggcagtttagctaaggtcattctcattgagtcctgaggtctctcacctcccaggtctctggtactttctagagggtccctccacccctcttcctctgaggctgtgtatttctattcattctcctggccctctgggctcctttcctaacctagacccaaaaggacatacatggtatgcagtcactgaagagtggggtattagccaagaagtatagaaaacctaggatagaatccacagaccataacaagtgtaacaagcagtccaagtgaggatgcttcaatcacacttagaagggggaagagggagggagggacctgggtgagagaggggaggggaaggggaaaaagggaacaggatcaggtatgagagatatgaggctggggaaacagaagagaagcccccatttcacacaagtcaatcttactgagtattttggggttttgttgttattgttgttgttgttgttagaatatgttggacaaatttcaagttttattattttattttattttattttattgcaataagttaacaagatgtctgggtatccaatgcaataattaccttctaggcaaacagaaaattattctatgtaaataaggccatgcttattgtgtgttgtaaggaatggctcatgtgttaaataggaaaagatacaaccgaaggggacacacctgagaggaccttttccagaggcagctatcaggacagtttaaggtaagcacaagctgtgtgattttgaagcttattgatatttttaggagccttctgcacgtgtggtgctttggcaatatctcaggtccaagaaggaaaccctatggcagactccgggtcctcggatctaagtttgtcaatttgtttaactcagtcttctcaatctgttgagagagggccatgctggaaggctcttctaatattgagtgtagaatagagattttatttgttttaattttaattgtatgtgtatgggtgttttgcctgtatatatttcagtgcaccatgtgtatgcctggtgactacagaggccagaagtgggaattgggttacagatagtcgtgaaccaccatgtggatgctgggaattgaaacctggagagcagtcaaggctcttactcactaaaccatttctccagctatgtttctctatgttaacttggtactgtgatgcatatctgtatccttggaagactgaggtagtaaagattacacaatcaaggctagcttagactaaaatgtgagaccctgtctcaggagaaaaaaaatatatatatatatataaacaactacaaacaagcaaactgccaggcacctactctttccccaccaaacttaaccagtttgaaccactcctatatgaaggccatcttcatcagtttagatctgttttttatccttactgagaggcaatttaattacaaacacttctgctcccagagtgatgcctttggactcaaataatttcttaactggatggaataaaatggatatttaggcttttaaagaggatgtcctctaatgagacatttattttcctgggcttacatctataaatattcactttcaaaacatattttgaaatgtgctgttagtgagagactgtaaatcatcattagagggacactcctccattgttggtgggattgcaagctggtacaaccactctagaaatcagtctggcggttcctcagaaaatttgacatagtactaccggaagatccagcaattcctctcctgggcatatatccagaagaacttcaaacttgtaataaggacacatgctccactatgttcatagcagccttatttataatagccagaagctggaaagaacccagatgcccctcaacagaggaatggatacagaaaatgtggtacatttacacaatggagtactactcagcaattaaaaacaatgaattcatgaaattcttaggcaaatggatgcatctggaggatatcatcctgagtgaggtaacccaatcacaaaagaacacacatggtatgcactcactgataagcagatatttgcccagaaacttagaatatccaagatacaatttgcaaaacacatgaaacaagaaagaccaaagtgtggatactttgtttcttcttagaatggggaaacaaaatatccatgaaaggagttacagagacaaagtttggagctaagatggaaggaaagaccatccagagactggcccacccggggatccatcccatatataaccaccaaacccagacactagtgcatatgccagaaagattttgcttacaggaccctgacatagctctctcttgtgagtctatgccaatgcctggcaaatacagaagtggatgctcacaatcatctattggatggaacacagggcccctaatgaaggagctagagaaagtacccaaggagctaaaggggtctgcaaccctataggaggaacaacgatatgaactaactagtaccctccagaactgtgtctctagttgcaatgaggcagaggatggcctagtcggccatcattgggaggaaaggcccttagtattacgaagatcatatgccccagtacaggggaatgccagggccaggaagcagaagtgggtgggttggggagcagggcagggggaaggtatagggggctttggggatagcatttgaaatgcaaatgaaaatatctaataaaaaagaattttacttaaaagtttttctgatgttaaaagttatgtattaaaaaaatctgtccagaaatatttgtctgtgttcacaaaaatattgttaagagtttttctacttcggtcagaaaactagtaataagttatggttgatgcatctctttgccattggccttaccatttctaagacattaaataccagactgtgctcaaagtaaagacttagtataggactagctcattcaagatggctactcatatcctgaaggaagttaattaaggttgcttaaaatagaacattccgataacaatttcatgtagccaaaatgggtttatttattgttaatgttcaaagaatgatttactaaaaagtattttcatctatttcaaacagattttttatgctaatgtatgttaattttataggtctagattcttagagttggttattttgttttattttgttcttagaaaaataaatctactgaagaaaaagaaaaaaatttaagaagtgttagctttattgagctggaaaacaaagcaatagctttgaattactttatgtagtatatagagggatgtagtagaagatatagaaattatcagaattactaggcaaattttataggcatgtgggactatgtttgatcctggcagcatgtttaatcatgagtaaaatacataaatcacaacttgaagatgactacttttcttaaacacaaaaatgactgggtacctctctctgtctttgggtcagaacaacatgtatcttgcggtcattacagcaaataagtaaatggtttatttatttttaagaacaaaattctgactgttcaaagtagtttatgatgagaaacaaataactattttcacacaagtgtctcttagttggctacacttcccacaagttctacattttaatgactaggactaaaaaaaatatccagaaagacaatccacactcaaaaagtagctattaacctcctgcagagaaggatttataactttgaataagaagttctattaaaaatatctcattgtatgggctgacaggattttttttcctagaggatgactaaattaaatgttaatttgtatcttgctttttgggctgtagcttttctgatagctgagcctttcttcaacaatatattttaggttcaaaaacaagttagttggcaacagaaaataattttctaagtaataatgtagaaaaaaagagagagaaagaacatttattcccccaaattagctgttgttctttgcaatgaaaggtagtgcacaccttttgatgaagtaaggattttttaaagacagtgttgtatcatttctgatcaggagtgtgatggaatcttaccagtgtttctgataaaccagaccgaggaccatctgggaggcagagcccttgcccagtacctactgctcatggcctcatgacagtctgttctagaatggtagaagtctttgaggaatagaagagagactgatttaagaagtacaatgttaaggtagtagaaatctgaaggaactcatagacaggtcttcctgtgtatagaactggaagttgagtcctcaattgaatattgacattctctcctttctcatatattcctaccttggtgtcaattgctgtgaatttcattagacctatgatttcttgtctcactcataacacacaccctatggcactccatcatcattctgtgatctccaggtgacagcctattcttcatagtctggagatgtcccagcatttgttacctaacccaaagaaatgactccgtatgcatcctttacacatcacagtgagaggaataaattcaaaatctcaggttaggttggggacagggaatcaggtttcaggagtggttttgtgcttgatcataatgagacgtagcaagagtttgaatgtggaagattaaagaagacatgtgacttctgcagatgcatagtgttgaacatgggagactaagagggaggcctttcacacagcatgggacgagattagcataaggaagttgacatgttactgatttcttgggaagtctgaatgatgacagacaccatcttgttttagtctaatttcccctgcatacaaatactgaggggcatgaaatcattctgtctagagttggaacaattgacacactcccctcacctccaccatctctatccttacattgtactatgtcaaattaacgtcttcaaaactcagctttaactattccaagcttccacacagcacccaccagacttttctttacactagctttgattacatacattattctcctgtaggatttaaactctttgagaaagatggctagtctttatgttcccactagtagctaacattggacttttacatgtggtaggaatctaataaactccagctgaatgaataaacacattaagctaaagtatgtctcaacaagatgatggatgggtcatttctgtgagcagcacctaacctgcagataagcctcgtccaacctaacttggaagttccttggcctggctgtcatgtgatctacaaaacctggaagtcgtcttacaaggcaccctatttttctttcaagagaaatttacccaacttattctgacgcaagataaacttcatcaaacctaagttggaagctccctgccctggttgtcacgtgacccaccacatatttctgttgatttgatgtgtgatgtaaactaggacaccagttgagccctgtttgcaacctgcttgccatctttaacctatcctgtcttgctgtgttttccagagcttccatccgtcaacgatctaagtctcagctgtctcatctgtcacatgaacctccactggctataggtgatcacaagtcctcttacgaagacagaaaggtcagacaccccttgttctggggtggggtcagggcattgagaaatctttcccaggggtctcatttatctttaggcaaacatgcttttcagatgtatagtaatagattactaagtcagaccaaataggagagctttaggactggtgaaaactttatagtttacacccctccccccaaaagaacacagattcttttaattaccttgaagaaaataaattacattaaactggattattaagggatacctaccaattttaggtgaataattataataagcataggaaatatgcttcttaaacatgcatagcaaattatttgtttgtatggagataactttttaaagttttttttctttttaaaattttaaacaatactggaaatcttttttttttctcccactttaaaattttcttagttggtgaagttatttgataagactagaccttattatacaaattgccatacgttttaaattgcaaaggtacactatcctgctgtttgggacattatctttcttataagggaacatgtatcaagccacaagtatttcccagcctggatgtgctcatttttgatcccctacatggcgttcattgaaactccttcatggaattcttaagtttggaatccatgctctcttctcttattaaattttagactccttagactccctggcccttcatatctgtgttgagtcgccacaggattagcccagtgcctttattaagcagggcaacaagaggtttttgtttgcttgtttgatttggaatgaaaaaatggagtttctgtgattaaaatgaagctcacattcttctatgtatcaaatcaaataagccaaagaatactttaattacaagtacatctattatgcatgacgtaatttcaaaatgtcctcaataaaatcccaacttgcgaattcattaagacatcattacatgcactagtctacaaaggagaaatttgggacaaattcttgaatgataccctgtgaaagatgggtcattgagactctctcctgtcttgttctattaacatcaaatagaggtctcactgttgagtaaactcatttctgtaaatacctgagagccctctttctcagggtgaatcagaaagagggaacataagatgtaagcatgactcttacctgcatcttgacactagaaacacatctcctctttggggggccagaattaacggtttcatttatgttcatagaactaggaagaaaacaattgagatcatttgactgttgcctagtacagcttttaaaagtggccattttatatttttcctagtaaaagagataaaaataaaaaacagaaaaaaaggtgttgagaagctgatccattgttcaagccccaaaatgaaatgatctgccatttccctgatatttcttgggtatatagtaactatatcagaatccttttgagtggaattaaaaatttaaaagaaaacaatataatttggctaatggaatttccatttcttgctttttatagaaattttaactaaagagcactgaatgagagtatgtggcttggtttttgcttttcaaagtatcttaacaattaaatctacaaggtccagctgaattcctgctctttctcattctgatgtcatcttctgtggactgggaaatactctggctctgggcgttcctaaagtgtctactgctacaaagcaattacctccaccttgtggtctctcagagtatttacagaacatgtagaagagctgaggcttgttaggagtctgccctaaactctaggtgggatgactcattgaaagcatcagctattgacagagctaagctggttctccttctccaagctgtctgcatctttagctcttatgtgggatcagatggtaaatatcctatcaggcttagtattaaggggcatctacagagtagaaatttcagtctctaatatttatgagtctttttctttctttttaaaaagacttatttattcattttgtgtatatgaatgcactgtcactgtcacaccagaagacggcatcagatgccattacagatggttgtgagccaccatgtggttgctgggagttgaactggggacctctggaagagtagtcagtgctcttaaccactaagccatctctccagcccccatgaatcattttcagtaaacctagaaaacaaaagataaaatatatatacatcaagtcaagttgtgatatattagaatcttgtagttttaccacagctgacttgtggattaagtcctatcttagaacagagacaggatgcataaaaatgcctatcagtgttggctcatctgaagaagcttggcttttggcataaatattgtcttatcattaaatcttagaattattatccaggtaggagactcatattagagttagaatacagaaacaggtataagaaagtatagaaagaagataagattccagtaggaagtttgatctcccccaggcccacacaagagatcaaaggaaagacaaaatactagaaaagtcctgtcaaacatggaaccatctatatagtagataggagaccactgtattttctagaatgactttagttacacacatacatatatacatacacacacatatgtatatataatacatattttatttctctgctgctaatttatatataactaataaaatttaataaaataatccactatctgagggcaggttttcttaccactcaggccattctaggacagtagaatataactttctttaagatcatctttttcatttttagtggatgattacaaaattattcaggctaactatttttgtttattaatttgtcttgatatgaaaactacagggcaaaaaaatttcattattgcccttaattgtctcattgcgtatggttagggacactttgctacaagataaccaggaaaggttccatcttgtcaggctctgaatagttaccttcaggtaacggcattatcagggaacacgtagaattcagagaacattagcctggcatttacgagtctgtgagcaatcagatctggagtatcaagacctataaagagcaattctgccatatggaaagtcatctgatagtccaacacagtcccaagggtgtggtcagaatgcatctgagtcagagataagagctattcagagaggtgacggtatccaatcagacaagtgacagtacccatagcttggcatctttgcactgcttctctagctcaattcccaattcccacacagagatatcaagagggccagataacaccaccttgaagtaaattgtgctataggagaggactcatgggtaagaccgctgttttcaatgtgtaaatacacttagcggtggtatttttaagatgtgctattttcaaagatacaacacaatttttactgcttgagttagtctatatgctattatgagcactatctatttgccatttagggaacagtcctgccccagtcaggcagggtaaagtcccaaggaataccggaaacaagtcaccacatctcaggtgtctctgaagttacccataaccaatgtgtaaccactatcaccatcctatgatcacctaaaggtgtagacatgtttgaataactaatgtaaccctctctttccctaaggacaatgatgtgcttgtggaagaagttgaacctgccccagttaggaggattctaaaatacaacatctcagaatggccctacatactggtaggggctttgtgtgcagccattaatggggcagtcacacccatctactcccttttattcagccagatccttaaggtaagcaagcaactggactaacttaatttggttcgtacattctggtttgctatagtagtagttgctgttgttaaacggttggctagtattgtatctaatctaatgtctcttttctttaaacatacttggtgttttgtttgtttgtttgttgctagttctgttgcccattcctgtcccctcacccctagctctaaaagatgaacagttcatagactctccaccatacagaaaataaaaaagtgacagtggacataccttattcggggccggcaagggcttacagtccttgcactatggaaaatgaataaatgattgaggttgcaagagggatggatggtttttgtggatgaaaagcactggttgaataacaatacaaagggattttcaggcgcttcttagtcttgctggatcgctgtggtgcaaagcttaatttaaggagctggcaatagtgccagtgggcaagtgtttgccttgctactgactgcgtgcagccagggtcatgggaggaactgaggaaaaaaacaaaaggagtaaaaatacagctggggggctggcaagatggctcaatgggtaagagcactgactgctcttttgaaggtcctgagttctaatcccagaaaccacatggtggctcgcaaccacccataatgagatctgacgccctcttctagcacatctgaagacagctacagtgtacttatgtataataataaataagtctttgggcctgagcaagcacagttaaccgaagggagcagggttgaccagatagagcagtagtcataaaaattcaattaccaacaaccaaatgaaggctctcaaccatctgtacagctacagtgtactcatatacataaaataaataaatctaaaaaaaaatacagctgggagaaagagtaagctcatgttcagttttcagttcctgggagttttgttactttccatgtgacaattgctatggcgacgggggcggggcaaacactcattgggcatcatctttgtgcttcctaataaccactgatgcccaggttcttcggattgccattttatagaggaggacaataagactcagagaattcagaggagggagcatgtggcggagatgggattcacacccagccagggtgatatagacacagctctgtttataccttattaccacacatttagttattaaaaggctgttgtattttcacagatctctctctctccctctctctctctctctctctctctctctctctctctctctctcacacacacacacacctggtgagttcaacaaaaaatgacagccacacatgtaaggacattgtcaagtttctcaagggcttgccagcacaccacattgccagagtaatactttgaaaaactcacatttttgtttctttttctacatcccttccttctctcctctctggtagaaattaggaccacaaaaagtaaactgccctcatggttgacacttgtatagaaagatctgagtaatccagcaaaagaatggtctgggtagaaacatctctagccatttatttttaatttttatcttttcatgttttattaacatttattttgcataaagtgtcatatgcaaatatcagccattaacatcatcttttttattagatattttcttatttacatttcaaatgttatcccctttactggtttcccctctgaaaaccccctttcccttccccctccctctgctcaccaacccacccactcccccttcctggccctggcattcccctacactggggcatagagccttcacaagaccaagggcctctcctcccattgatgaccaacaaggcaatcctctgctacatatatgcatctggagccatgagtcccaccatgtgcactcatggttggttggtggtttagtccctgggagctctgagagtgctagttagttcatattgttgttcctcctatgcaaaccctttcagctccttgggtcctttctctagctcctttcattggagactctgttctcagtccagtggctgtgagcatccacttctgtatttgtcaggcactggcaggacctctcaggagacagctatatcaggctcctgtcagcaagcacttgttggcatccacaatagtgtctgggtttggtgattgtatatggaatggattccaggtggggcagactctggatggtcattccttcagtctctgctccatactttgtctctgtaactccttctgtcttagtcagggtttctattcctgcacaaacatcatgaccaagaagcaagttggggaggaaagggtttattcagcttacactgtccacattgctgttaatcaccaaaggatgtcaggactggaactcaggcaggtcaggaagcaggagctgatgcagaggccatagagggatgttccttactggcttgcttcccctggcttgctcagcctgctttcttatagaacccaagactaccaacccggagctggtcccacccacaagggacccttcccccttgatcactaattgagaaaatgccttgcagctggatctcatggaggcatttcctcagctgaagctcctttctctgtgataactccagcctgtgtcaagttgacacaaaactagccagtacatcttccatgggtattttgttcccccttctaagaaggatcgaagtatccacactttggtcttccttcttaagtcatctctctggtcctgtctctcgccatttttaatcacattgctttcaggaagccaggcaattgtaaacatagctctagttaattgagtttctgcttacatggtgccacaatcttttatgctgaaaatcttttaaaataattaatgtatatttctttatttcctaatagatactgcatccaaatataaacacatattcgtttatttgtccaacaagaatttgctgatggcctcccttaggcatcatgctagggacttgacaccactgtgtcacagtattggtacttttcctgtgaagtttccgggaagtgaggaagatgctcattagacagaaagataatagagagcacccaccattcaacaaatatgagtctatggcttgtttgctggccatccttctggtattggtctgggatggaggacaagatcaggctttactgacctctccagctgccattccatcagggagagggtctgggtgggaccttgctgagcaagaggaacatacgttagaagaaagagtagggatgagtctgaaatgtagaagctgagatgttgtggtataaaggacacctggaattttgacttcttcactgatttttctctttctaaacatattcattctttgacaaatccatgcatacagacagtagaggatggtcgtgtcttccccattaccctcttttagtctacccaaccccatgccctttggaatccttcacaacaaaaccccctcctacttaaatgttttgttaaagggcccactgaaattaattacggttgcttgcatgagcaggagtcgggagagctgttcattgaagcatggacatataccagaagctgtaacactaggaaaaattacttccccttccccgacagtcactaagtgccaatagttcatcaattagaagtgagattttatgaacctctctccccagtccatattcggatgttgacaagcttgatgtgttcaggttgacaaagctgtttgagaccatgactgcaatgggcatgcccattcagaagactgcatttcatagcacatctaatccttcagctcttatgttctttctgttccccgttccatgatgtactctgagcttatgtgtgtgtggaggggggggtgccatagctgaataaaattccgctgtgtatgtgaaccactccttcgttacccaggcaccagctcatggacatctgtttcctaactattggaaatagagctgcagtgagcatgaacatacaagtgtctctgcagcaggaagccaagtctttggagtatgccgagagaggggtgtctagacctgcttatctcattagacctcagcaaaagtggaaccaagaagatattcactcaatgttcctatgttagccactataggaggtttcttgggtcccaagaggcctttttcctaaaattggctctgctgcttactggcctttatgtcctagactttatcctgttctctgggacttggttccctcaattataaaatgggagttgacaaagatgaccttgaagacagcttctagctctagaactgtgaattggccgcatcaggaaatataataacgaagcaagaagatgtgtttctgaaccacagccagtctaagaacaggagttctaaggataggtaatcaatagccagctactctgtctggactacatagatactatccgctagacttgagtgttccctctgttagtgacaaagacttcattcctgtgaccttgtgagacttccatttagcactgggatggagttagactggacaataacacttttattgaaggttctacaacaacaaaatcaggatctagttgctggaacccaaccccggtttattgttaatgttctcggtgttacattcactaagaggaagaggatgaaaaaaatcacagtcttaaggttaaggaagattatttctatttgtcttagtataatcattacattctcgtcatgatactcaagatgatttcatctcacagggggtcatgagtctgtttctaatcgccctggttttatcctgacacacttaaagggtatattgcattaatgtgtggtatattagaccacacgtgtgtccattaaatgtgtgcaaataaaaccctgattgctaacctacctaagcctccatacacagctaaaatataacgtattggtttcactttccctgggtctgtttcgggtggaagatgtgccaagtgttcaaaccactgcaagtcagatgtggcaggctggaaaagcataggcacaaggagcagccagccctgggatggttttatatctctgtattatttgtgtatatttcattactatgaaacaagaaacctacttcctggattgctgtgaaaatcctaattttaaggaaatcctaatttaagattggttaagccacacatttgatatctgacacgtagcaagaatttcatggctgctttccatttaaacaagttttccaatgacaaaaatagaaagatgtgtttctgagccacagacagtctaagaacagagggttctagggtagtctattgggctgcatttcaaaactaagaatgtacaaagaactcatggaacaagattttatggctcttacacgcgttctcgtgaccggccaggaagatcgcaacaaaccggaatcttctgcagcaaaagctttattgcttacatcttcaggagcaagagagcaagagcaagagagagaatggcgaaaccccgtcccttttaaggagaattatcctccgcctaggacgtgtcactccctgattggctgcagcccatcggccgagttgtcgtcacggggaaggcagagcacatggagtggagaactacccttggcacatgcgcagattatttgtttaccacttagaacacaggatgtcagcgccatcttgcaacggtgaatgtgagggtggctccccacatatggcaaaaaagactatgggtaaagtcttaatccaatcaagagaaaggcttaatcttgaaataaacagtcatgtggattttaacattagtcaatttctctgtctggactatgtagatactcccataagccaaagggcatacccagaattaataaagaagccggaaactgggaacttccttttcatgaataactcttagatgaatggactcaggcaaatgtcttagtgtttgtgtccttgattttctatgagtgttaggtggactcatctgtaacccataggtacagtgggtagtctttgtagggagaggtcactgctgcatagcagttggaggtttcaagaatatctgtgtagatctgttttataatatcttgaattgtaaattctatgaactagttggttgcacaagtctgttaagaattactatggtgtcttagaacccagtttctagaaggtataaaagctgtagaaactgtcctagaaatagtaaaatctcattgatttagaaccaacctctctctctctctctctctctctctctctctctctctctctctctctctgtctctctctgctttgtagtttatgttcaacccagaacagcttttatttttttcactttcattttttaccttttctcattttacacaataaagtttaaaaattgtcattgcagttgccttagctgctctttaagacctggaattaaaatgaacaaacaaaaaactctttgagcacacaaacatcaggcagaaacaatgtcagtactgaaccatcactgtcaaatcattaaagattttttattaattaagatgagtgctgatgcaaaataaaatgaaaacttgttaaacttgtaaacttagccctgatggtgaagaaagagagatggttttgtttcccttttccagaatcaagtattattatccattaagcaattcgtgtcctgaaacctatattttctgttactatggagagacaagacacatgttaaaaaaaaaggaacagattgttttgtttcacaggaaagctttactaatgcaatactgtacatattgtttctgaggagatttatttggcacatagtaggtattcaccaaatatgtgttgaacaaatggttttcttagagcagctcaatgccggcattgttctagctgttcaaattatttcagaacaattggactggagtcaataaagtgcttacctcgcaaacatgcaagtctgacttcaattcctatgaaaagctgcacttggtgacgcacatgcagtccagctgcggggagaccagacgatcctcgttagggcacactggcaaaattgctaatcccaggtctgtgagagagcctgaagagaaaaagggaggtggggaggaacacagagagagacaacagagacagaaagacagaggcagagacagagagagaataaataagaacttattatacatctgcccaatccatacttttcctgagttctcctagttaatttagtctgaataacaacggttttgttgtgaggaaaagccattttagctttgccaccagaagacactgtttactcagtgtttactcagtttccttattgcaaaaacttgttcctcagctaggtgtttaagcaattgtcagtaaattcaccacgtattgaagaatatcatttagtaatcaaaatagtaaatagtagtgactctagtcacgatttccatggcctttgaggaaagaagaattccagtttactgtaggacaacagcagcaggctcagatttcacattcttttctttcctaggcctaggacagtacattgtacagtagtatatatatatactaaatgtaagactaaatatttagtatactatacatacatataataaaacacaggatatctgagtttaaaaaaataatctttattgtgtccattatttgagccaaataagagttgaaacaataaccatgtgtttccacagtctggcattctcaagttctcaataatgtctttgtgtccctcttcctccttttcttcccactcttccttcctctctctttgctcccttacttcttaaaggataactgtgatttggccatactttctttctttttcttctatatcggagaaaaaaaccaacaccactgcttaaatcaaaccaacttggtgatggggggtggggggcaacttctgtaattgttgggattggtttaaatcttccaggaaccctgccacagaaccaatttacaagtcatcacaatgttaatcacgaactttggtttaaaaactagtgtgtttaaagtgaagccgttttaaagggtttttgaacagacagtattagttttacagcaaaattaagaggacgttccagagatttcctgtgcatttcttgcttgcctccctcatcagcatccttgactccctccaacatgagcatctttgcctccctccctcctcagcatccttggctgcagtgctccattcagtacagctgatgttctacactgacacgtgatgatcccctcatcttgatattgacgttgaagttcactctcactgacattctatcagattgaacaaatgtgaaaatttgtttaaacattcaagtatatttattttgttattgtttatactaacaacctttcttccctacttatcttccaaagactttttcactcgttgataaagaacaacaaaggtcagagatttacagcatgtgcctgttttttgtcatcctgggctgtgtatcacttttcacacaatttctgcaggtaattttatctttcattaagttatttgcctatccatacccccatcttcatgtaaaaatctcaccaaagattccttcttttatgtttttagggttacaattttgccaaatctggagagctcctcacaaaaaggctgcgtaaatttggtttcaaggcaatgttaagacaagatattggctggttcgatgacctcaaaaataatcctggagtactaacaactaggcttgctacagatgcttcccaagttcaaggggtaagccttgggagtgtctttgtccatttgggattttgtaacaaaacatcttagatgaagcaatttacaaatagcagacacattttttttctcataggaagtaggttgggatgtttaagatcaagatagggataggttatgtctggtaagggtatggctcaaagatggtacctttgtattccatcttcctgtggcagaaggttagaggggctgctgccaccttcttttattctggttttattaacccaacttgggaagacagagttttacaatctaatcatgcccaaaggctctaacaataatacttctccagtggggaattagatttcaatatgaattttagagaaagacatttagccatagagtagggagcaggggtatattacatagatgttcgtactgtagaacactctgagaattacacaatagtgtcccttaggcatgcctagacttagtgttaagacacacatcaatctgctatgattggtggtttcatcttctgagtctagcaactgagatgtttttctcagacatttctaagacccaggaggttagatcttaccaacctcatatgtggcccctagaaggaaaaagtgtgtaggaacatcttcccttgagcatccagagttatgttgtgagcaaccttgcaatctttgaaagatttccattgggaaacagggaaaagaagagagatgcttactgtgtacacattctctctctctcttctctctctcttctctctctctctctctctctctctctctctctctttctctctctctttctccccctccccctccctctcctttccctctctttctctctctctctgtcacacacatgcacacacacacacaaacttcaaagagctacatttctgacccagggagtcaaagctgtggtttctaaatcccacaacctgcagccttgttcaagagacttaacacagctgtgtatgatcagtctggacctttataaagcccaggattagggttaaagtgctgagagtcaaatctacctcccaattctccacccactttctaaatgaaaagaaaacaagcatgatttatgaagcctgggaggaaaacctccccatagcaggggcactgtactgtatgaggtttgcctcaactctagccagtttaaccagagtgctaaaagtgttatgtgttacacagaacctggaaccatcttaaaggaaggtccctaaaacacatcccatttgattttctgctctttcataggtaaccatgttttccatagacaaagaagagttgtatatagggcatttctacttttctttactctcccccaaacttctgatgggagcatattttcatcattatgtattcttctacaagggtattttaaagataatctaatacataattttaatgcactaatcactttatattgtgattttcaacacaattgatcatgtccctccacctctcatctacataacccacaatcctcaacaactttcctattcctttgcaatacgaattgtgtgtgcatgtgtgtatctacacacatgccttttgtcacttccacatatgagaaagaatatgaaagtatgtcccatactttaactcttgtggctagttctaccataaacatagccatacagatttagatatataaccaagaaagggatggctggatcctctgaagagtgccattttttaattttttttttttttggaggaaattctagttgaagtatcttctagatagaagtatcctagctatttgtataatagttgttttacataatatattcttttcctccttttcctccttccttttcttcctcttcttcctcctcctcttctgtttcctcctccttttcctttttgtttgtttgcttgtttttaagacagaatctcactgtgtagctctgggtgtcctggaactcatatacagaccaggggaggaaggaagagagagaaagaaagagctcacatgcaagagaggggtccttatacatttatatgctgtcttgttaattatctttcttccacttctggatatacaactccatcaagcatcttttgtaaagctggtctggtagccataaatttctttagttttttttttttaattttttgatatttatttgtttgtatgtgtgttcatatgtgtgcctatgttgaagtcaaaggacaactttcaggaattggttcgctcattccactatgtgagacctggggtttgaactcaagttgccatacttgacatcaagcacttttaccagctgagacatcttgccagcccagaaaacccttagtttttgactaaggtagaaggtctttagtttgcctttgattctgaaggattgcatttttgggtgtggagatctactttggcagtaattttcttctggaatttacagtacaccgtcccatgctctcctattctataggggttcagctattagtctaatatggttgattttagctatgattttgtgcttttcttttggagagtttaaaaatcctatctttgtcctgattttttttttctaccagtctatgttagggtgaaaatcttttctgattgtatctttctgggcctctataggcatcctattctgggatgttatgtctttccccaggttaaagaattttcttgatttttgttttattaaatagatttttatacttttaacctttatttactttgtgtcaatcaatgatgtacagacttaatctttagtagtgtgtcttagagttttactgctgtgaacagacatcatgaccaaggcaactctgataaggacatttaattggggctggcttacaggttcggaggttcagtccatcatcatcaaggcagtaacatggcagcatccaggcaggcatggttcaggaggagctgagagttctacatattcatctggcagctagaagaagactagcttccaggcagctaggatgagggttttaaagcccatgcccacagtgacacacctattccagcaagaccacacttactccaatacctccaaataatgccactccctgggctaagcatatacaaaccatgacattgtgttccaaagatcttgtaaggtctctccattctatttatttttgtttgaatatgataatttaaaagaatcttcactcaatctgtgatattctttcttctacttggtgtagtctgttagtaactttccaaatatattttatataacttattgtctcttcattttcagaactcatctttcaaaattattattcacaatagtcaaaaggactctggtgaatagtcaaaagcccactggtgaataatagatagacaaaatgttgtttatatgtgcaacagaatgtttataccttcaaaaggaatgaaattgtaatatgtttcacaatgtaggcaagtcctgaaaaatcttatatttagcaaaatagcccagacacataagcataaatatcatataaccccacttttatgagttccctagaagagcagattcatacagacagagattagagcagttattgccagtggctcaagggagaaaggtgagagcgtcatccgatgggtaaagagtttcagagatggagaggatgagagagactgagcatagatgtgttggccacacaccactgggaggactttatacatgttggttttgtttttagtgtccctgagttatggacttaggaatggctaaaaagctaaatattgtcatggatattttatcacaataaaaaaaaaaaagaatctttcagtatgaaatagcttgtcacatactagtgtctggtaagagagactgtgtctgaaatgggttggtaccttttgatttgcaggctactggctctcaagttgggatgatggtcaattccttcactaacatctttgtggccgtgctcatcgccttcctctttaactggaagctcagtctggttatatcagtcttcttcccctttttggctttatcgggagctgtacagacaaaaatgctgacaggattcgcttctcaagacaaggaaattctggagaaggctggccaggtaatcttatagacctcatttcccttctaatgactaggtggttatcaagtaaactgttgaaaatgagaagtacaaagagacacccttgtctctacctggacactatgacaataaagctttgatgcattagcttgaccaggcaaggagaaagagtgctaaacttgatttcctcttggctattcattctacattttctatattctcacttacagaggtagacagttctactaaaggaggtgttgttgttgttgttgttgttgttgttttctcagctaaatgattaccctgaaaacatactttcaactttgacactttagcatttgctaagccaaaggcaaatgtctttctcaaatacaatcataaactacagtgtagaattcagggtttagatatgcattcagggtttagatatgaatttttagaaagtctgttgtaactaatatctgaacacaggaatgagtgaggggacgatgacacagatatttgtcaattgggaagataaaaaaacaaaaacaaaaaccccgatgtgccgggcttggcacagtctctactgatcttagaacttgggggcagaggcaaaagatcagaagttcaaggtgattctctgctacatagtgggttcgagtccagcctgtttacttgagatgctgtctcaagcaacaataacagagagggagggagggagggagggagggagggagggagggagggagggagggagggagggagggagggagggagggaggagttgaaggatcaatcatacgtaaaatgaattctttttgtttttgctttttgttgctagacactaaacacagagtttactgagcctagattttattattgtaagcactttaaaactgagctatttacttttttttttttttaatattgagacatggtcttatcaagttgcctagatggcactgaattcagacagaaggccaagtaggtcttgagctgggattctcctaccttagtttcccaagcctaggtattctgggcttttactgcctggcctgagtcatacactcatgcgtcataaacttactcataaatatgttctatcacttttcagttagagaatgtgatgctgtccaagtagcgggtgccagtgtagaaaatagcatctttaatgatggagtaccccaattcattaacagtggaccttaaactgcttttaaactcatggtcaccatgtaaactaaagatgaatgtatacttttaactagtgatatgcagttgtgtgcttttagaggagatggtttaccgggtagcaatcttggaaaatagtctttagtgcttcgaaattatattaagtaggtgttttgctcagaagacattcaaagaccacattgtagacatttcaaatggattagccgaacagttttaaagcttgtccaggacaagcatgggaggaccttgcctcacactgtctcttcccccagcaagtggaggtaatgaagccatgctagagactgagtataagtgacagataacccatggtctggttgagttgacccgcagcaacttctctgtgctattttctgtcatgtgtgacaaatctgggtggctgtggcaatggcatgaaaagagatagtcctatcttttgtctcctcagactctttcctttttcagatcaccaacgaagcccttagcaatatccgcaccgtggctggaattggagtggagggaagatttattaaagcatttgaggttgagctggagaagtcatacaagactgccattagaaaggcaaatgtctatggcctctgctatgccttttcccaggggatatcatttcttgccaattctgcagcctatagatatggaggttacttaatagtctacgaagatctgaacttcagctatgttttcaggtgaggaatatccaaatggtcatatgatatatgatattgacactcgggggagggggaggggcggcatggtgcccagttctgttactttgctttcttgctacccagcaaagaatcctcccttaaagcagctgggtttattctttttcaaggcttcacagggcatggaatatttcttctggacttggtttcctcacagacttctgtatgtttctctcctcaagcaaatgagatcattttctttatgactgatcttagagtttcaaatgcaacagaagaaacatgccctacgttgaaagcatgttcaagtctctccatattccatttattggggtctctttggcacagaaaactcatacaactacacctaggtttaaagatttaagaactgaaatccacatttgaactggaagagtaaaaaaatatgattacaagcagatggatcataggataaactattatgattatatttacacatgttaaagctgagactctcaaggtcttgaacaaggtggacccaagggctattatattttaacactattcctggcttgtaaaacaaactgatttctagccattttctctgaatagagacatgataggccaagaagggtatttttctgttcgtcaaggcagggtctgcttactctacagaagagggcctaagtaagggtgcacacgagggtggtagctgttggtagtaaaggcagagacaatcttaagtttggagggtttggaagcacgatcctctcatctgatattttaattctaatactttcctgctagcccactgtcttagttcggatttccattgctgtaaaggggtaccaagacccaggcaactctcataacatttaattatggctggcttacatgttcagaggtttagtccagtatcatcaaggcaggagcttggcggtgcccaggcaagcatggtgcaggaggagcagagagttctacatctttatctgaaggcctctagaagactggcttctaggcagctaggaggaaggtcttaaagcccactcccacaatagcacactttctccaccaaggccacacattcttcaacaaggccacatctcctaatagtaccacttccttgtccaaacatattcaaaccaccatacccactatacccactaaacccttgcatatttaaagctatacccaaaacgacagaccagccactgttgagttctttctgtccgtttatataaggtgtgtaacaaattatttgccagcatgtaagaatcaagagcctataggaaacttccagtttctcctttaagaactagaaagtcatctcctgtcatttcctctcctacctccaacatttcaatctcaaaccttatcttgggctcctgggggatgtggatttctagctccacccttgaaataaacactgattccaagatgagcagtaacatacatgtttgcacatcccttatctatcatcccaccccacgaaggtgtgaaagatgccttctgggaaagatgacactgatgggcagccttacgggctgccatgcacattcaaggacaggcatcagcaaggctgtctctcataactaatttattcatttgctcactcattcctgaagtccatgttgatatagttagtagctgggacaaacagaaggatacaggcaactgcattttccttctcctgcctgaaggacggcttgtaagcatgctcagcacagagtagatgcttctgttgctcatcgttatcttttacatacttatcaatggctcgtgaaatgttacaatggaaagaaaagtcaaaccagtttgttcatcttttaaatttctttccaaaagaactccactcctcaaaaacaaacaaacaaacaaacaaacaaacaaacaaaaaatagtttttagtatggaagatctagggtttgaaggtctgaaccctatcttgcttgttcagtctacccttcaacccttttacagaaagcacaatttgaaaactactaacttctctatatcctacaactccagacatgactgaagagacttgctcaagctctttgggcctaccacttacaactcttaggccttcattttaccgataccccacctcctaatacccgggtatttgtttgtctggttacagggtggtctcttccattgcaatgagcgcaacggctgttggaagaacattctcttacacaccgagctatgccaaagctaaaatatcagctgcacgcttttttcaactgctagacagaaaacctccaattgatgtgtacagtggagcaggtgaaaaatgggtaagtactgggctggtgtgtgtgtgtttgtgtgtgtgtgctcacacttgtgcatgtgtacatttttatacaaaaagccatcgaagatagtcagataattccagtttagagtctaaagtttagcagcctgtgttcatccatttacactcagaatggacagacaatatatttataagtgtaaaggaaggaaataattgacgtggaaaatcaagtgttacatttgcgttttgagtaagaaaacaacgtgtacttgtaacagtttcttttccatgactacaactcaaggatgctccatgtatacagaagttttctggcctgttggtatgtatacccctgcaatccttgaagtcggaaggccaaggcaggataattgcaagcctggggtcaacctgctcttcataacagaaaagaagtttatttatttatggcacagtttggaaactgcaagcacatgatctgatggttccatcatttagtctgtttttagaactccaggactacagtgtacagtgggtggtgtcctgacagaaaggcattatgggggaaagatcacatagtgaaacagaaagcttcagtgtggagaggaacggtctcgttttcatgagcaccctcttattttgatttgagaattacagacatgagcatgcgtacataccaccttttactccaattccatccatgtccttctaaccacttcctctggaactcacgatctcttcttctgcactagtcacacacacacacacacacacaccacccactaagtcccattagtctttatttgcatgtgtttaaggctgaccccttgggattagggtcttgtttctgaggaaaaagaagcaggggttgctggtttcccctttctcagtagctgataggggcgagagcttgtggaattttcttctcttcaggttagtatgtcatctggtgtagtttttgcaggtcttgcacaacattcctgtactatccataacaaactcctataaagccttcctcctggtcttcagacacttatctctccagcttctctgtgaagatgtctcctgagccttaggtgcaggggttatgttatagatgcctcctttggggccgaacagttcatggttacttaactttctgcattttggctagttgtggacttttgtaatagtctctatctgctgcaaaacaagatgcaataattttttttttttatgaaatgtgaaagctgggctatagatctatatctaaagatataaagatgagtatttggagagcagttggaaaactaaattactttagaaataaaggagcacctccttctaaggcatgggcccccaaaacttgaagcttttttttccttttctttctttctttctttctttctttctttctttctttctttcttctttctttctttctttctttctttctttctttctttctttctttctttctctctctctttctctctctctttctttctttctttctttctttctttctttctttctttctttcttttttttgtttttggctaggtttataataccaggaatgaattccttccaattgagcacatttcaggtacaatttagatagctgttgatttcccccaagtcacaagtcccactattgtgccaaggggggaatcttgctgattctgtctctgtggtggttctccggctttacagctggctagggctgtagataactccacccttggtacctagaatactatcttccattaaatagcatgagagcccttagagaggaggttttttaggtgagtactggtttgatctctcctagtcttgcaacagaaaaatatggtgtcttcagcagtagagttttgtcttcatgttctgataggtaaccaagagcagtgacaataactatattgtctgggggctgggggtgagggtggttcttggaaacccctggacaacaactcataggcaaatatcccatacttagttctggaatttctgatagatagatagatagatagatagatagatagatagatagatagatagtctatggcttctaaagggagcattatcccaccatatgggttaactgcatttaaactatagagatagagatagagataatgtaatttaaagtatgctataaaatagtggtttcctagcttctatagttactgcagtataattacctccttttaagaacaattcaggtctcccaaaatgagattaatcaattctgagaggaatgacagcaataatcaagtcaccatgtaccaagcctatcctttttcctcttaaatgtaccataccacttcttaatatcaccaagccagggtccacatatcaacccttgtgaaacacatcccatataaatcacagccttagcaaatgctgaatttatgtaacataaatcacatagttctataatgaatgaagatacatgtcttttcccacccatctggtcatgctttccattgatattttggtatgaaatagaaaggctaggtctttttgtccaccaatactgatttgattcatgtttatctaggtttaagtttagttcatgtgaattaccaaaaattagttaatattcaacaagatttttttttcatttatttagtctccaagggggttttaatcttcacagccaatttaaaaacaaaaaacaaaaaactctagggctggagagatggctcaactgttaaaagcactgactgctcttccagagggcctgagttcaattcccagtaaccacatgatagctcacagccatctgtaatgggatctgaggtgctcttcttgtatgtctgaagagagtgacagtactcacatgaaataaataaataaatctttaaaaaaatccatatgttcaaaagagcaaaacactagtaaagctaagctaaattatgaaagttctggtcaagtgtcctgtgatagaaatagtctctgtaaatttttccccattttagagtacataattcagatggtattttaaacagatttttttttacattatcctgtaaagtaatagcatttgtcatggcatttacgtacatgtgtatcattatactttatgattatttgtgcctttctctctctccctcctatagctctccatgcttccagaatccccttagctggttccctttctttacctagacagtttcccttctgcttctgatcataggtataatattcctctctccctacacactgccttaagatctcttccttacttcttgtttgtagtttcatgagagacatacacacatatacacaattttatttgttttattttatttttatgtgtacatgtctatatctgggtttatgcacatgaatgcagtgcccacagaggccatgggagggtgtcagattccttggagctagagttacaagcggttagctacccaacctgagtgctgggaagagaactcaggtgttctggaagaatggtacaggctttcatcccgtgagccatctctctggcttccacaaacataggttttttgcatataagaaaaaatacagtgtttagcattctgaatctggtttatttttctccatgcagtgttttatagttctctccatttttctgaaagaaagtcacaatttcattttttaagggccacataaaattccactatttatgtactctttatgaaattatttattgatggatatctactctagtatagtaaacccaaaaattgaaaaatagaattacatgacattaaaaagcttctgcacggttcccggatccctcagagatttagtctgcacaggtgagagtgcagactacagaagctacacagcttctgggacaggcaggagcaacacagcttctgaagcagaccctatttcaggctccagacatccgggcactttccctgccagagaaaaggtgtccaccccacctgggagggctttgccagagcacctggaggagccatcttgggtctcagatccccagagattagtctgagcaggtgagagtgtggactacagaagctacacagcttctgggacaggcagaatcgaaatagcttctgaggcaggccctgtttctggacttcatcttctgagaggaggcaggtccgaacgtcaaatatctgtgcatctcccctgcaagaggagagcttgcctgtagagagtactctgaccactgaaactcaggagagagctagactcccaggtctgctgacagaggctaacagaatcatgggaggaacaagctccgaccagagacaacgataacaactaactccagagattaccagatggtgaaaggcaaatgtaagaatcttactaacagaaaccaagaccactcaccatcatcagaacccagtacttccacctcagccagtcctggacaccccaacatacccgaaaagctagactcgaatttaaaagcatatctcatgatgatggtagaggacatcaagaaggactttaataactcatttaaagaaatacaggagaacactgctaaagaggtaaaagtccttaaagaaaaacaggaaaacacaaccaaaaaggtgatggaattgaacaaaaccatacaagacctaaaaagggaagtagaaacaataaagaaaacccaaagtgagacaatgctggagatagaaaccctaggaaagaaatctggaaccatagatgtgagcatcagcaacagaatacaagagatggaagagagaatctcaggtgcagaagattccatagagagcatgggcacaacaatcaaagaaaatgcaaaatgcaaaaagatcctaagtcaaaacatccaggaaatccaggacaaaatgagaagaccaaacctatggataataggagtagatgagaatgaagattttcaactcaaagggccagcaagtatcttcaacaaaattatagaagaaaacttcccaaacctaaagaaagacataccaatgaacataaaagaaacctacagaactccaaatagactggaccggaaaagaaattcctcctgacacataataatcagaaaacaacaaatgcactaaataaagatagaatattaaaagcagtaagggaaaaaggtcaagtaacatataaaggcaggcctaatagagttacaccagacttctcaccagagactatgaaagccataagatcctggagagatgttatatagaccctaagagaacacaaatgccagcccaggctactatacccagccaaactctcaattaccagagatgaagaaaccaaagtattccatgacaaaaccaaattcacacaatatcttttcatgaatccagcccttcaaaagataataacagaaaaaaaaatacaaggacagaaactacaccctagaaaaagcaagataggaatccttcaacaaacttaaaagaagacagccacaagaacagaatgccatttctaaccacaaaaataataggaagcaaaaattacttttccttaatatcttttaatatcaatggactgaactctccaataaaaagacatagactaacagactggctacacaaacaggacccaacattttgctgcttacaggaaacccatctcagggaaaagacagacactacctcagagtgaaaggatggaaaacaattttccaagcaaatggtctgaataaacaagctggactagccattctaatatcgaataaaatcgacttccaacccaaagctatcaaaaaagtcaaggacgggcacttcatactcatcaaaggtaaaatcttccaagaggaactctcagttctaaatatctatcctccaaatgcaagggcagccacattcattaaagaaacttcagtaaagctcaaagcacacattgcacctcacacaataatagtgggaaacttcaacacccactttcatcagtggacagatcatggaaacagaaactaaacagggacacagtgaaactaacataagttatgaaacaaatgaatttaacagatatctacagaacattttatcctaaaacaaaaggatataccttcttcttagcacctcatggtaccttctccaaaattgaccatataactggtcacaaacaggcctcaacccattgttggtgggattgcaagcttgtacaaccactctggaaatcattctggcggttcctcataaaattggacatagtactatcggagggtcccacaatatctttcctgggcatatatccagaagatgttctaactggtaagaaggacacatgctccactatgttcatagcagccttatttataatagccagaagctggaaagaacccagatgcccctcaacagaggaatggatacagaaaatgtggtacatttacacaatggagtactactcagctattaaaaagaatgaatttatggaattcttaggcaaatggatgaacctggagggtatcatcctgagtgaggtaacccaattacaaaagaactcacatgatatgtactcactgataagtgcatattaacccagatactttggatacccatgatacaagatacaatttgcaaaacacatgaaactcaaaaagaacaaagaccaaagtgtgggcactttgccccttcttagaattgggaacaaaacacccatggaaggagttacagagacaaagtttggagctgagacaaaaggatggaccatctagagactgccacacccgggaatccatcccataatcagcctccaaatgcagacactattgcatatgtcagcaagattttgctgaaaggaccctgatatagctgtctcttgtgaggctatgctggggcctggcaaacacagaagtggatgctcacagtcatctataggatagaccacagggaccccaatggaggagctagagaaagcacccaagagctgaagggatctgcaaccctataggtggaacaacaatatgaactaactagtacccccagtgctcgtgtctctagctgcatatgtagcagaagatggcctagtcggccataattgggaagagaggtcccttggtattgcaaactttatatgcctcagtacaggggaacatcagggccaagaagtgggagtgggcgggtaggggagtggggtgggggtatgggggacttttgggatagcatttgaaatgtaaatgaagaaaatacctaataaaagaaaaaagaaaaaaaagaaagcttctgcacaaaagggagcactcccagagaggagaaactatagagtgggcagagaaagtttcccacgtatccatccgataaagaaataatagctaggatataaaaagaactgtaaaaaatcaatctacccaaaccaaatcatctaaacgataaatgagctaaagtctccatttatcaacagtccccaaagaagaaatgtaaatggcaaaacacacttgaaatatacatttgacacccctaggtaggagagaaaggcaaattaaagatgctctgaaagaccgtattacccagtcagaacgtccaacattgagagcatacatgacatcataggctagagaggctgtagggaaagaagaatcctttttcactgctggtaagaatgtaaattgggcacccactatggaaatcagcatagaatttccttttcaaaaaggaagagagagagagagagagagagagagagagagagagagagagagagagagagagtcagcagcaccattctttggtgtctccataactgaagtcagcatactacaagagagtctttcgtggctatgtttactgtggtactagtcatagtagctaggaaatagaaactaatttagttgtccaccagatagtttgaaccgcactgaaatattcatctttgtggcacagactccaagcaactttgtttttaactcattattttaaagagcaatgtgaaaacattcaaagactagctggtttccatgatgccttatccgttgctattctcttccattcttttgtttaatataagaaataggtggtaaggaaagtttcagaagaggatttaaaaaaaaaagaggacaaatgtctttaattcccttatctgtcttatttctgcacctgccagcactggaaagaaaatgccattttgtggtgttatttgtttgcctgtttgttttgagacagactctccctatgtagcccaggctggcctccagtgaacttactatctgcctgcctcaacttcctcagtgttgggattacaggtgtgaaccactatgcctgactgaaatgtcacccactgagttgctgtcccgatattgcatattttctttttgtttaatgcatatcctgtattcagttaggtgcaccttctgtgtcctaggctcctgtagggacatgtgtaattccagtcttctcatccacaggacaacttccaagggaagattgattttatcgactgtaaatttacatatccttctcgacctgatatacaagttctgaatggactgtcggtatctgtggatcctgggcagacgctggcattcgttgggagcagtgggtgtggtaaaagcaccagcatccagctgttggaacggttctacgatcccgatcagggaacggtggtaagtggggcaagacttctgagaacaaggagagcgttgttttctacgtaagatctgcccccaagtggtctcccaggccacaccttgccagactaaaaaaaaacgtttgcgttggacacttacccctgtggctattttcctttcggtcacctgctgagtgacctcattctaccccgcagcttctaacagcatattcttcccagttccagatgtcctgctgaccagttaggcaagaaaactgggcacatggcaaagctggagttgagagtatttgagagacggtcacttacccgtaaatggagcagaaagtgcagactaatcaggaaactaatggctagggatggaaaaagtggggtgacaggggacacaatgagaaggaagcaagacaaggaagcaggcatgaacggcttgacacaatcctggtcggagaagctcacggttgactgatagataaactcaacttgacaaagccttggcagggatagttgacgcactggtgatagaattcattgtttactcttctaagtccttctttctctcttttcctgttttatttttttcccctttcttcttaggtaatatgttcacaaggctgtataatcaaataacaaagacttttaattaaaaaagtatgatttctctggagttctttgctcaaaggctcttaaccacttcatgttttgaactctcccagtaaataggagtaaaaataggagtaaaaaataggagtaaaaaaaaacctcctatgtcccgaaatctgtttttctgttctcctgatttaactggactctctgctgatttgtttttaagaagtaaaaagtcggccattgagactcttctctcttctacctgcttccccccacataccccagtccctttacaataataccctgtctgaatttcctgaatagtgtgaacttcactgcaagagacatgctgagagaaaggtgaggttctcctgcatagagcaaagaaaaagaagcaggcagatatcagtagaatccaggagggtatgcaaaggaggggtagggattgatctgcctgtggtccattgccattgctgttattgattgtaggtgtgaagattttaaagtgcttgaaaggtcttggtgatgggtaaacctaggaagtgcattgtcctagagatctgacccattcaaaggagagggctcaggttctcaaagccatcagctctgtcatgtctattgtccagggtgattgtaacctgctgcaagaccaacccaccatgttggatctttccagcatcatcatgtctgctaagtgtgtttctctgaatgcacacactgaatgctccggtgaccagaagaaagcaatcattctatgatgtcttgcatttaagagcacagtacactttgtaagctcattgtaaaatggatctgtgaatactataaataggaaaatgctgatttcatcaattttttaaaaatcctctttgctttttgacaggatactgaatgcaggtattgtaagtctgatatttaattaggtatctatggtgtgtccagtactgtctatgggagatgcttcaggaacatggaacatattttgtttcctagatggttattatatagcacatatacaagaattagaaaaaattcagcttctgggtaactattaggttgtattttgcagaaataggtattatgggaaatacttcaggctggatatgatctaactctaagtgacctctgctttacccctaccccttaaaaatagtgtttggttatccattgtttagaaagtatctaaaaatacgtcctgatcacattatttaaaatagccttttttttttttcctgaactcatacaaatactttacagcaaataagttagatttactttatgtttgagatggactcaggaattttttttgggggggggggaggtttggttttggttttggttttggttttttcgagacagggtttctctgtatagccctggctgtcctggaactcactttgtagaccaggctgtcctcaaactcagaaatccacctgcctctgcctcccaagtgctgggattaaaggtgtgtgccaccaccgcccggcactcttagaaatcttaagtgaaccaacttgaatggtcctgattttgtgactaagcttccctgacttctggactgtgagtccccaggaaacagacagtgttctcatcatacagtggacagaaaacgtttgtacggtgcctcctggcagatggtttcatgtgtgattgtgactaagtggccaaatatattttcccctggacttattatctcagctgtccagagaataatgtcaatagaaccaagggcacacgtttgatcctcatgtcataatcccatctgtctgtcactgtccctgattccaacttcctttcctctccttcttctctgggtggctcccaaagtctcagaaaacaaaaagcctgcatatccatacagattaggctatgctaagccacaaggagaattctgttcttaactaaacactgtcccaagattctctctcatttacataatacccatagagctgcagttaggggggaaaaaaataaaaaacaacgtccaaacagcaaagtaatcagtgccaagtttaatggcatagctgttagaaacaagttccacaggcagtgtgattgatgtcccggggctttggggatgttcattcttaaacagatgcacctaacgccacagcaagaacttcagtcactgcgggagtgctaaaacgttgtgtcctcccttgtcatctctattggcagatgatagatggtcacgacagcaaaaaagtcaatgttcagttcctccgttcaaacattgggattgtctcccaggagcccgtgttatttgactgtagcataatggacaacatcaagtatggggacaacaccaaagagatctccgtggagagagctatagctgccgcaaagcaggctcagctgcatgacttcgtcatgtcactcccagaggtaagcaccaaggttgtttgttgttctttacagaacaacacagggctgtggaggcgtgggatactaaaacgcatcaggactgtggttcagacagaggttcaaagacaacacggtttatttcccagtgccttgtattaccttggtcttttaagtaaaacaaatgtcctttatccccatatgtcacaaagtattatattgccaaacaaaacagaagctgtggaattcgctacatagaaaacaatacccatagagcattaatgcggcctggtagaaacaaatccagaggtttaaacctgggtttgaatgcaagcttatctatttagtaccttagtgcttagtttggggatacctacttatccaacttgatattgcctattccatctgcaaaagacaaagaaaccccaaaactttaaagtgagggcatggaggtcaaaggttagggatatagcttactggtagatctcttgccgagcatgcatgaaaccctggggtcagaaaataaatagccacacaaaggaagctgctgctgcaactctcagcgtgtgtgctggagatatgttgcatctgccttgatgcctttcacttttccagagccaagtctgaatttggcaggctctgctatgcatttttcccattcactgagaatctcccttggtggttgtttaatgacaagaaaaattaaaatgtgatgcctcagctaaaggctatagccttttccactctattttttttaaaataccacttggaaatcccctttcattgtaaatggttatgtctgcaaactctggacttggggtatccttgtttgtttgctggcttgctctttcataggtttcattgagcctgaagctcaactgccacttctaagctggccagcctaactagcaagggtactgaagttcctaaaccgaaaaacaaaagaatattttgaatacctgtgcttgccagcgttgcctaaaacagcaaagaagatttcctaaaagtcatcaaagcagcattttcctactgaaagcacccttagacattttacaatgtgataataaaatgtacggtacctatgaaattcgagaaatcatgatttttctaaggttctcctggcttagttgaactttttcagaaggcaaggaagggaaatgcaggcaggcacgttacagcaatggacaaggacagagaaccatcaactagatcaagtctgttgttaactttctcatgtgctgtttactgcttatctgcctttgtgcaattgtcttgcttctccatgcctcagctttacagtgtataaaatctaaagaatatcatgtttgtgactatgaaaagatcacccttagaataattaactagctgtggtggagcacacttttaatcctagcacttgggaggcagaggcaggcggatctccacaagtttgcagccatcctgttctgtgtagagaattccagacacacagggctacacagtgaaaccttgtcactctgtcttaaaaataaaaaaggaggaggaggagttcaattcctgatgcaaactaaatactgtatgaatgttaattatttttaacttagccatgctaggcatctagctagacattttatttactaattttgtcaacaacaacaacaaaaaaaatccacagcgaatatatatgctgggtactaacactgaattttgcaggtcagtttgtagctcaaagacgtttaacaagctgctgatgttcagatgttcagtaagcaacagagtataacttcaaaccaagactggtatcccagaaagttctttcaagggaagaagccaaccaaagaggtgttgaaggcctctcttcccctgggattagcctatcttgtaaaagatctttgggtaaaagtctagaaatcagagaatttcaaaccaaagatctcctatgtgggatcttagttggatacaggaagagatcaaaaatataacccttaaaggaatgcagagatgggaataacttccctcattgcccagcacacacttcattattgaatatttgtagctagatttgttatattttacaggagccaatcattctttctaagttcaaaaaaaaaaaaaaaaaaaaaaaagaaaagaaaagaaaaaaatgtaaattcgtagaagagttcttgatgtgggctccaaacagcagtgactgtctgtagctctcaaacttgttatgctttttctagaaatatgaaactaatgttgggatccagggctctcaactctctcgcggggagaaacaacgcattgctattgctcgggccattgtacgagatcctaaaatcttgctactggatgaagctacatctgccttagacacagaaagtgaaaaggtctgtgttaattttttctttcttttttaactaatcattttatttgtttacatttcaaatgatatcctccttcctggttcccccatctcatctctccctccccctgcctctatgaaggtgctcctctacccacttacccactcaccacctcactgccctggcagccccttaggctggggcatcaagttcccacaggaccaagggcctcccctcccattgatgccaaatgaggccatcctctgttacatatgtatctggagccatgggtccctccatgtatactctttggttggtggtttagtccctgggaactctgggtggtccagttagctgatattgttcttcctatagagttgcaatccccttcatctccttcagtcacttccctagcttttccactggaatcgttgggctcagtccaatggttggttatgaatatctgcaatgtattagtcagatgctggcagaacctctcaggaaacagccataccaggctcctgtcagcaaatgcttcttttgcatcagtgttggggtttggtgtctacaggtggaatggttccctaggtggggcagtctctggatggcctttccttcagtctctgatcaattttttgtccctgtctttcctttaaacaggaacaattctgggttaaaatttttgagatgggtgggtggccccatccctcaactgggggccatacctatctactggaggtggtctcttcagggtctctccccccctttgttgggtattttgactaaagacatccccattgggtcctgggagcctctctcttccctggcatctgggactttctagtggctaaccccacttccccatccctcattgctacatatttctattcaatttcctgaccctctctgtacttctctcctgtcccttcccatacctgatcctgcctccctcctttccccctccccctaatttctccctcctaggtccctccctccctctactttctgtgattatcttgttcccccttctatgtaggattaaagcatccacactttggtcttccttcttaagctccatatggtttgtgggttataatatgggtattctgagcttttgggctgatatccacttatcagtgaatacataccatgtgtgtacttttgtgtctggattatctcattcagggtgatattttctagttccatccatttgcttgcaaatttcatcaagtcattgttttcatagctgagtagtactcctctgtgtaaaagtactacattttctgtatccattcttctgtcaagggacatctgggttgtttccagcttctggctattataaagagagttgctataaacatagtaaagcatgtgttcttgttatatgttggggcatcttttgggtatatgtccagtagtgatatagctggctcttcaggtagaactatatccaattatctggggaaccgccagattgttttccaaagtgtttttaccagcttgcaatcccaccggcaatggagggaatgttcgtctttctacacatccttgccagcatctgctgtcccctgagtttttgaccttagccattctgactggtatgaggtagaatctcagggtcattttgatttacatttccttgatgactaaggatgttaaacatttctttaggtgcttcttggccattcgagattccttagttaagaattctttgtttagctctgtaccccattttaaagtagagttatttagttgtctggagtctagcttctacagttctttgtatatattggatattagccctctatcagatgtaggattggtaaagagcacacattgaacctcacataggaatagtgggagacttcaacaccccactctcaccaatggacagatcatggaaacagaaactaaccagacacagtgaaactaacagaagttatgaaccaaatggatttaacagatatctatagaacatttcaccctaaaacaaaagaatataccttcttctcagcacctcatggtaccttctccaaaattgaccatataatcaggcacaaagcaagtctcaatagatacaagaagattgaaataatcccacacaccctatcagatcaccacagtcaaagactgactggtcttcaatagcaacaaaaacaacagaaagcccacatacacatggaagctgaacaatgctctactcagtgataacttggtcaaggaaggaataaagaaagaaattaaagactttttagaatttagtgaaaatgaaggcacaacatactcaaaagtatgggacaaaatgaaagcagacctgagagaaaaactcatagctctgagtgcctccaaaaataaactggagagagcttacactagcagcctaaccgcacacccgaaagctctagaacaagaaacaaacacacccaagaggagtagacaggaaataattaagctcggggctaaaatcaactgagtagaaacaaagagaactatacaaagagtcaacaaaactaggagctggttctttgaaaaaaatcaacaagatagataaactcttagccaaactaactagagagcacagagacagtatccaaatcaacaaaatcataaatgaaaagggagccataaaaacaaaaactgaggaaattaaaaaaaaaatcatcagatcctactacaaaagcctatacgcaacaaactagaaaatctagatgaagtgggtggttttctagacagataccaggtaccagagttaaatcatgatcagacaaaccatctacacagtcccataacccctaaggaaatagaagcagtcattaaaagttttccaaccaaaaaaagcccagggccagatcattttagttcagaattctatcagactgccttagttaaggttttactgctgtgaacagacatcatgatcaatgcaagtcttataaaggacaacatttaattgggcttggcttacaggtgagaggctcagtccattatcatcaaggtaggagcatagcagcatctaggtaagcctggtgcaggcagagctgagagttctacatctttatctgaaagctgctagtggaagactgacttccaggcagctgggatgagggtcttaagcccatgcccacagtgacacacctactccaccaaggccacatctcctaatagtgccactcccttggccaagcatatacaaaccatcatacagaccttcaaagaagacctagtaccaatacttctcaaactattccacaaaatagaaacagaaggaacactacctgtgttaattttctaaactccctggttattagatgagtctttgctggaacctttgtacatacaagatgacacaaattttcatttgtcttattcatttatagtagaaacagacagcattttagaagcaaaagacatgatctaaaataatagactaatgggccactccaataaaaaaaattttaataattgttctataaaattctttaggttagggggttggtgatttagctcagtggtagagcttgcctagcaagcgcaaggccctgggttcggtcctcagctctgggaaaaaaaaagattctttaggttaaatgatacttttcaaaggtaaataattagttttctcaaattatgacagtttagatcacctgtaaaacataacatgttttatagtgttcaggttttatgacagaataagcagtctgtatacaagacctagaaggaggtgggagccaagtggagtttccaatgtagaacatgtaattgggagaacaactaaggaattcagaatttatgatctacgtctttaagcacgagaatccactctggcgagagctaaagtgcccttggtgaggaggggtgtcacaaatgattaaccgtcccctgctttgttccttggtgttatcttagtaaacaagacaatccggtgttgtagaactgcgtagtgacatgatattcggctcagtcttgcttcacggaactttctcagcccatgggctgcaatttcaataaagcatggttgtactgtatgagcggccactctttcagagttatcaccaagtacacaattactcaggtggtatttgcaatagcctctcccaggggtgggctgggaacaaccctgtgtctgggttgacgttccatctttttttccacagacagtgcagcttgctctggacaaagccagagagggtcggacctgtattgtcattgctcatcgcttgtctactatccagaactcagatatcatcgccgtcatgtcacaaggagtggtgattgaaaaggggacccataagaaactgatggaccagaagggggcctactacaagctggtcatcactggagcccccatcagttgaccctgactggagacctttacatacagataatgatgtgccaagcacaggagggctgcgggttgtcatagctctacagagaattattaatgctttacagacagaagtatccactggcatccaaactaatcttgagtggctttcagtaataatttcagtttgaaatgtctatgtaggaaggagagaacccagagtcactgtgagttcaagtccaagggcaagcagctgcttatctatcactcagtgctgctctcggtaggagctggtccctgtctccatcaaggacttggtgacagagagcatggagtcctccttagggcagagggttgtcttttgcatttgggaaagctccttgtacagagtctgctctgtaatctggactcaactgtttgagccagctcaaggtcaagagctaagaacttaaggctactggtagtttttaatttaaaaagtttgcttgttttctatagggaagcaaatgtctttacctctgacacccgtgagtagggagaggaacacgtttccattctggaatctcccaggctcagggaggccaaaggtgagctaaggagaagtagaggttgacagtcaggggtactgatttgctcagggtgctattgtcacgatacactacagtggatctgccagtgtggagcagggactctttaccagggcttctacttttcattccctgccaccatgtcacctgatgtcccttactcctaggaaatctatgcaagcaatggaaatgcatcggaatcttaagttgttacattaaaatctagtaaaacatagtagaaaaacatttatgtttgtcattttcttcagaataccacttcttatggtatcacagaaggcatgcagcctcaggaataaagaaaaagttcaaaataccgtagaaaaaaatatgaactaaatttgtagcaatagatttcgaagacaagagaaaatttctatgtaatctgttagccaggcaaagcctgcaggcttcctatttcctaccatagacccctgaaaaggctatgatgcaaaagtctctgggactttctggaaggagggggcagagggtcagatgggcccaaagttagaagaatgggctgaaaacctgtgtagatttttcagatgcacagcctactcctgcagccggctggcagccctttcctagctccagaagaacactagctaccgcttctcttgcccacaggcaggtttgaccgaagggatacaaaatacgctgaaggggtgagtcatatacaagcgtcgaaggactgggtataaaactagagatgaagggaaaatctcacagccaccttcatctggctcaagcaattggacccatggaatgaaaatacattagcttcttaagttgttacatagaaacccaggccgggcggtggtggcgcacacctttaatcccagcatttgggaggcagaggcaggtggatttctgagttcgaggccagcctggtctacagagtgagttccaggacagccagggctatactgagaaaccctgtctcaaaaaaacaaaaaaacaaaaaacaaaacagaaatccagtaaaacatagtagaaaaacatttatgtttgttattttcttcagaataccactacatactgaaggcttagggtcttagtgtcacaaaacaatacaaaatacagcagtctaaaatgagatatcatctgatgcttaggaaatagcaaggaaaatttcccagccacacaccatcatatcataaagctcgatgacatgtacccagtcagtctctctacaaaaatgaacacacacacatatacacacatgcacactcacacacatacacacatacacacacacatacacacatctatacacacatgcacacacacatctacacgcacacacacatatacacacatgcacacactcacacatacacacatctgcaaacacacatacacactaacacacacacacatacacacatatacacacatgcttgaaccaaaaaagctcaggataaaagaaatttaaaaaattgaatctcagaatggcttggggcctggttcacacagaccatactgagcatctcccctccttccatctctcaccaccaccaccaccaccaccaccaccacgtccatcctgcttgtcacttcatctttcatgttcaacaaatgaatatccacctaccgaggaagactgagctgagatattttggaatatactattgttgctgtttttatttgtctttcagggtttcctggtaaataactacaaaggtgagttagcaggtcaacctgcaaggaccggagctgctgaaagctgccgagggtggggaagtctgcagagggtggggggatgcctcaaattatgggaaagaacagggagaaagaactgccggaataagtgacacatgctcgtccttaactcttgaaccaggaaggatgcaactcacttgcttaggcttgtatctttcgaggtcaggctgtttgctgggaggctgcctgtttcttagaaaggtatttgtggagcgttcaagagtggatcaaggctgtctttttgtttgtttgtttgtttgtttgttttgttttgtttttcaagacagggtttctctgtgtagccctggctgtcctggaactcactctgtagaccaggctggcttcaaactcagaaatctgcctgcctctgcctcccgagtgctggaattaaaggcgtgcgccaccacgccgggctaaggctgtctttttaaatagagtaattctaagtaatcaataagagtgaatggacagactgaatgagttgcttctggatgtggtgtttatcacacagcagtagaagaaacctaaagatacaattgacttgcagattcttttgtccaaaaacctttccgactctaactgctctgtgtctgctctgcatgtgcatgggagaaagtgtctcagccagagaacacctgcaatttagagctgcccacaaacatgcagctttcagcaatggggtcatcatttacaagtgggagcctggaatatttgatattgtgccctagtacaggaaaatacattgggccccaattaagaatcgtttgccatttattattgaagggttgaatttaagctttctatcagtaataccaatggatctgtgagatgggttagtgggtgaagccacttgctgccaagctgacaacatgaattggatcttcagatcccatatagtagaagaagagaaccataatttatttccacaagttgttctctgacctccattcacatgccatggtacatgcatatgtgcacaagggtgatcatgggtatgcatgtacaaatgtgcgtgcacacacggacatatatgcacactaaagaaatacatataatttttttaaaaaaaggttatttttttttaaaaaaagaaaaataatcagaacattctcccagggttggctttggatctaatctcatacatttacctaagggtttggttgattctatatgcacatattgcattcttatgcatgcaaatctctcagtaatcaggccacaggaagatgtcagcagagattttaaaaagaactgtgaatctcattgctgtttccatgcacactttgagatcaatttgcatagacacaggcaccgctgtaaaacaggcattatatttatttctatttttttcctgaatttttgagaacaagtgagtaatctcacctgcatgagatggcaagtgaaaggaacttcaataaacaactaaacccaatttcaatttctttcaaactgtgttcaagtaaatgcccaattaatttaaatggatagactgtaaataaaataatgcacatgattatcatctaattagcactggccagcattaaaatgtgctcattagtgagttgtatggtatcctaaggctcataattagtaatcagggtgtacgtgattggcatgggtagctgctgggatgcagctactcaaccgaataaatcagagttaggacgaaatgtgcctgataaaggaaagaggaatacatagggggctggggaattgagagttttctcctttctataactccggtgcaattcttactctcagacacaaagagataaatctaagagcaacagaatatctgtagaaaaagagacatttccactcaagatgaaacaggaaaaaaaatcccaatagttactaatgtggaaatttttgccatgaaagaatacaaaaaggaaaaggaaaaagaaaagaaaagaaaaacaaaacaaagacaaaacaacaacaacaaaaacattgtgttcattaactgagagtatagggttcaactctatgaggtatagaatcaaagtacagataagcaaggtcttaaattttcataaaagttgaaaaatccaataattatttcaatatgactgtaaagtattttgtaaattacagagcctctgcctttataatttcagtatgttagcgtgagctcagcaggttgtagaggacagatacagtagttacattccttgttagatatgaaggcatcatggcaggtgctgttcattggctacattgtttttctctattccagagtctagaatggctttaccttttcagaatctcttgcagctagagaaggtcgggtaatcctgtctggtttatgaaacacaggcactattctctctgtgtgggttttctcttcctaaataaaatttagtctaggcagggaaaacagctgtctcccttcttgcgtggacaaaggctatggtacacgtccacagcagaacatgaagactgagcctgattcctgtatagtcaccagctagttcatcagccttggctccttatctcaacctcttcactaaaggggaaaaaggcacatttcactttatagaaggccccggagcagttttttgtcattgttaagaatgaataaacacagttttaaaatagaattttattaataataatattgaagaataaatatgcagaaaactaattgattttatcctaaaatgaccttgagatagacatttatatcaagaggtattctaaaatgagttttacatttatttgtgaatttggagataggttctagctatttaactgagtctcccaggaactgtctccatatctcagattgcctagaactcatgatcctcttgccttaatctcaaagtcctgagattattcgcatgagctgtcatgtctgatttttagagagatcgcaaagttactaatttaaatgaagaaccagttcacctgtttgcagatttctactatggagaggatgatggacgttcccggagcttattttagtggtttttcaaaaaacatttcacctcccttgctttaaataaaagaagttgttaattaagtacttcacatgatatcctggaactatgactgttatgttctctagccctcattaagtatattgggcgtaccttgagaacatctgaagtctatctaaaggttataaacaattgaaagtatacgaaggagaggacagaattgagaggctagcctactacaaagatgggcagtcatgtcaccaatcaacttacagccagctatggtctcaattcagttctctcaagtccacaagctagaggtatccctaggatctatttagagctacagcagataaccaggagccaatgggaccctcctcagggcacggggcatgccctcagccctatacctctagcacccaaaggcacttgattaatgtcaagtggatggttgacaagttagaaaagagaagctcaattagaccctcaagtgattgttgagcagtttttgaaactagtttctaatattcccttacttggtcatactcaaatatcttggcatcatgcaattaactggtagagctgtgatacattcaagaagcacatttcaatagcatgaaaaatcaaaatacgactttgtttttcatttttcaggtataatcacatcacttctctcctctctttccttcatctaaaccctcccatatatctccccaactttctttcaaattcaaggactttttaaaattaattgttgatatatacatatatagacatatgtacatatatgtgtgtgtgtatatatatatatatatacatatatatatgtatatatatatatatatatatatacacacacataaatgcaccctgcctagtctatattttgatacttgtatgtatgtatgtgttcaggcctgaccaattgatatttgataaccagtggttgagagatgtatgtgtagtctgtaaacttaatgaaaacactagttcaagaacagtcactttcctcacacagcaaacatctctaaccccacttcctacaaaatgtcccctcttctcgctcagcctagcattttctgtgtctgctaagtatcccttccagcaagaatttccaacttaaggagtctaagaagaatggaattgggaatttaattataagaacaatcagtgagtgtgaatatggatagtctcatgttaataatcttgcctcgttatatcagctgaattatttcacattttcacgtatttccttttatagccataaaacttgaattttaattggcatagagtgttttaaaggccaaaatgtattttattgatccaaaattgtttaacaaaggagcaaattccaaattggattacagtcctctttagaatttatagctttgttcatctcattaagtaaaattaaaacagtatctatgatttaatatatttgctacagccattcataccatctttcttcttcccttttatagagaaatgaacaacagttcccctttaagtcttccaccaagagggtacttcacaagaacaaaaaaaaggaggaaattgaggaagtgttacagtttgaatctaaaatgtccctgtaagctcagtttgtagattgggtgtgtgtgtgtgtggggggggggggggttatagaactcttagaagatgggccctagctggagaaagtggataatggggggtgggttgggataagcttgaaggttataaccaggcctcatttgctatcaccttgctgcttcttgactcaagttcagagaacaagtggctgtagagtgcttagatacaaatgggacatctacagcaagctgcccgtcccccacagctcaggggccatcgaggaggaagaggtagatagactctaaggttcagatgttgatgaggattgggacaaaagctgtttgtttcctggacatggcatgaccactgtattcaagaagtcaagctggtgtggttgtctgtacatgatcaagccagtcaacatcctagcatgggggagaattaggtgtggttcacggactccacccacaactgaggaactatgaacagtttattgcttttaagtgaagaaaagtcatttttcctttatggccgtgaaccactaagcaggctccaatggatggccccacaattaagagtagaggaggagcagaaattggattcactcaatgagtgtcggaatttgttttctgtcaccgtgataaaccgttgaccaaaaccagcttggggctggaggaggatttatgtggcttgcaggttatggtccattattgagggaagccaggcagaaggtcaaggtaggtgagggtggatctggaagagcttaggggaagaagtgaataagatcaatgtggtttgaatgagaatggccccccataggattaactttgaatgcttggtccaaagttggggggattgtttgggaagggttaggtgtggccttgatggtatatgatgagggtcagctttgaagtgtccaaagccaatggcattctcagttagtgttttttctcttcccacctctccccccccccatctctcactgtctctccatctctgctttgtctcccacccctctgcctcatgactgtgggatcagatggaacttgtcagctgctgtctggcctgctgccatactctcccctgcgcccctggcccccttcccccacataatggccacagagtctcagcctctggaactatgggcccgaaaatgaaaatgttttataagttgccttggtcatgctatctcttcacagcaagagaaaaataccttaagcctgaggaccctaatccagcagaactccagatgccacatttattcatctccctgccttgtcctggctgcctctctgaggaagcaacacagtctttgaactgaagacagattctcttcagagatcacatggcaagatgttgcaggacaaagagaaaatactaagttaaaaacttgtaacagaacaagattaattggtttcacactaacctttgtagcttccctcgttgagttttctccctactttagagagatctcctctctgctgcataaagaaatgagacgtggtttcttttaaatcgttactgtgatttaggacagcaaagacagtaattagtactctttacaaaccagcctcacattcgacataaactgcacttgtcttttgcagagcccaaaatgaagcatttatttttagaattttctcatgagttgtggtttgcttctagatctttctaccattcatgttcctttaacggaaacagggtggggacattaaaatattaacagagtagcataacctgacctttatgggggaatcatcagttgatacattaaagataagggaaacgttaaggatggctctctagttcctaggcaacattagattcaggtattcatctaaaaaagctatttatgatttacaaagagacaaaggccatcagtgagggcaaagtcttcaaggcagctggatatgtggagagcttttgtaactagtttctgaatgaccacagaagtgctgctatcagacatacgtatatgctaaattgggaaaacatggtcagtaagtcttccagttatcctgagtacagccatgaattgtgggtaaaacacacagttttgttgccactagatttccaagacatgatgtaggaaggatgaacccagcctcctcaatttggagcaggaaagctgagttcaaggagaccggtatggccagagctcccagggtggagtcaaggagacaggatttgcactgatggaaatatctattgaaaatgccgcaaagcccagtgataacctgctataggctctcggcctcacctacagcagtttgagataggagacagtataaattttgttttgctttgttttcaagaaaacaacaacaacaacactgcagggttgtacttgtaaaacccagttctgcagccattggacacctatttaagttaattaagaataagtaacatttgccgggcaatggtggcgcacatctttaatcccagcacttaggaggcagaggcaggaggacttctgagttcaaggtcagcctggtctacaaagtgagttccaggacagtcagggctatacagagaaaccctgtctcaaaaaaaacaaaaaccaaccaaacaaaaaaagaataagtaacattttataattctcttctttggttgtattagctgctgccttttaagagcataatggtcaatacagaacaaatatctttatcactccaaagagtttaattaaaaattgctggagaaagtagtttgaatatatttaatgaattaaaatgtttaaaatgttttttatgttaaaaatttggatctgtagtattttgagcaatgctcttggatttcaaaaatgtcctatagcatttctgagctctctgttacagggccaaacccacagagatggcaccaactcagccttctaagggagaagttcaattaataggctgcccaaaggaagggactcaacagtcttcctggtagctagttttaaaaagcagtaataaattcccctgcgtttcttttcaaatgcgggtttgattggaacagcttcccaagtcacttgtctagattttatcatcctggcagctcatgatactggcattttttttctcttgaatatgcagatgtgtagacgctttgattagattgatatccgtaagtcaaatgagctcattttgcttatttcttgtgaataaattggaagccgaagtcttctccatcatgatttaaatcaggcatttttctccaaggccatacaacactgtttctcttgctgcctaagcaattccaatcacaaaagcaaattgcctccatgtggattcctccaggagacatcagcgagagagaaagaaaaatctcctcactagggactctgaggcttcatggtagacaggggtagagttgttggagattaattattgaaaatacgccgtgcctcatcccatttcccttctgaggatcacatgccatctaacagacagctgtgtggagtagctgaagaaagctcctcgatgggcgggaagctacagggagtgtgtggcagagccgggcacagcaacagaatctcctagctattgatggcacagccccctcagtcccagcccaggcaaaagcaggctcagaatgtactgggatagaggattcaagattattgactccacaggaagttttgaaaaaaggctcagagggaagcaggcctcttacatttgcagatgggactgggcagaaagaacacaatgtgctgagaactacggaagccttatggggacaatggcaaagagcactgaagaaatgaacaagaatcatcctgttctatttcttttgctccagtgctccaacaaacatgggatagatttattctgaagtaaaagcttttttttttttcaccctgttttgttttgcttagggaatccattgcctgttaaaaaagagaaccttagttaaagtgtcttggaaaagcaatagttcattttctataattacacttggaaagctgccaataattagctgttagatatattattttccatgactactatcaaatagcctttccttcaactggtgtgttttcatacacattgatgacctatttaatcgatcatcacctaaaagcagctaactcatcaatagtattcttgagaagttacctacggcattgcagtagatcacaggccaatcagactcatgatctttgaacttgatcagaaagacacagttatcaaatgagtctagaatttcaatgagggaaggaaaaaaccaatctcactgagaagttggtgtatattaatagcccataaataacacttttctgaagtaaagcacagagattagtccgatgcactagtatttaatcatttttttctgaggtagaagaatttgattatcctcatttttgacagacttgactcttagaagtaaaacatggggatgccccagtgaagagatgaggcttttctggtgaacagtaatccagtgggttgttttcagcagcgtttattgaaatatatacagccattgctagcctggaaaagacactgtactctgagcataagtcaagcagaatgtagcattccaatgccatttctgaaaacatgggtgttttagatggcaaacatagattttaaatacatgcatttgctctttttttttaactccctaaaaagaaagaaagaaagcattcttatagagatatatgtatcagaagccttgtgttccaactctggtttcaaccctgcactattacagtcaagttacttgatctgaacaaacctctatttccttatctgatacatgagaattttgaaagaattgactcctaaaagtaaaagtagaccgtggtcacttctaagtggtccacaggagcctgaagtagccagactttaagatgatagaaacatcagctcctgggggttttgttgactgctaaatactatgattagaaggagtctttctgctaactggaatgtaagcatccagcccctgtcaactgtctttacatgggttataccatctctcatatgttaccgtattgtcagttttgtcaagaaaatatggactttctggttaaatactgttattttttaaatgccacttggaaagcagactaaacatgtctgtgggtggagcaggacctttggtcatcatggtgtgacctctgtagagacgctcccagtctctgtgctgtggctctattgaggaaaacagaaagtaggtgatcctcagaccacagggcactgcagctctatttagtcttcttgtcaccgggtctcattaacatatgtacacagtagggaattagagccaccaccatcagggggatggacgcacttttacagaaagacaacaggtaaaataaaggttccgcgtgagtcgggatcttgatgaagcgataaagttgcattgtggtcagtgaggtcagagcacagagcaagcggaagctcggcttggtgccattttctccctggcagctccgaaggaacatttctgagttgatggcgaaacccaagccaaagaggaccccgaggtttctcacgagtccagcaaaaggcgtgctgtcaatgtggatccagtctgggttggcacaccactttttggcgatgggcacggaccacagcaggtcaataccgaacagtcggagaagcaggtaaaagccgagggcaaacaggaagaggaagacgttggtcttcaggtacacactcaagctggccatgtggactcctggagtgtgttcaaaggcctcggctactagcatccctggggattggaaagagatactgacatgagcttgtgaccctgagcccttcagaaacccctcctctctgcacctgggagggtttaagacacccaggttctaacaatttcctaaagtgttttaagacataaactgaaaacagattagtcccatagtctttcaactacctacactggccaagaaggataaatcaaaagtcagaaacactgagtgacaactcattttgcaggcaaaacactaagcaatacaaagctgccacctggtgaggttaagccatgcgtgcaataa

SEQ ID NO: 8 - DNA, 128335 bp, Mus musculus
ttattgcacgcatggcttaacctcaccaggtggcagctttgtattgcttagtgttttgcctgcaaaatgagttgtcactcagtgtttctgacttttgatttatccttcttggccagtgtaggtagttgaaagactatgggactaatctgttttcagtttatgtcttaaaacactttaggaaattgttagaacctgggtgtcttaaaccctcccaggtgcagagaggaggggtttctgaagggctcagggtcacaagctcatgtcagtatctctttccaatccccagggatgctagtagccgaggcctttgaacacactccaggagtccacatggccagcttgagtgtgtacctgaagaccaacgtcttcctcttcctgtttgccctcggcttttacctgcttctccgactgttcggtattgacctgctgtggtccgtgcccatcgccaaaaagtggtgtgccaacccagactggatccacattgacagcacgccttttgctggactcgtgagaaacctcggggtcctctttggcttgggtttcgccatcaactcagaaatgttccttcggagctgccagggagaaaatggcaccaagccgagcttccgcttgctctgtgctctgacctcactgaccacaatgcaactttatcgcttcatcaagatcccgactcacgcggaacctttattttacctgttgtctttctgtaaaagtgcgtccatccccctgatggtggtggctctaattccctactgtgtacatatgttaatgagacccggtgacaagaagactaaatagagctgcagtgccctgtggtctgaggatcacctactttctgttttcctcaatagagccacagcacagagactgggagcgtctctacagaggtcacaccatgatgaccaaaggtcctgctccacccacagacatgtttagtctgctttccaagtggcatttaaaaaataacagtatttaaccagaaagtccatattttcttgacaaaactgacaatacggtaacatatgagagatggtataacccatgtaaagacagttgacaggggctggatgcttacattccagttagcagaaagactccttctaatcatagtatttagcagtcaacaaaacccccaggagctgatgtttctatcatcttaaagtctggctacttcaggctcctgtggaccacttagaagtgaccacggtctacttttacttttaggagtcaattctttcaaaattctcatgtatcagataaggaaatagaggtttgttcagatcaagtaacttgactgtaatagtgcagggttgaaaccagagttggaacacaaggcttctgatacatatatctctataagaatgctttctttctttctttttagggagttaaaaaaaaagagcaaatgcatgtatttaaaatctatgtttgccatctaaaacacccatgttttcagaaatggcattggaatgctacattctgcttgacttatgctcagagtacagtgtcttttccaggctagcaatggctgtatatatttcaataaacgctgctgaaaacaacccactggattactgttcaccagaaaagcctcatctcttcactggggcatccccatgttttacttctaagagtcaagtctgtcaaaaatgaggataatcaaattcttctacctcagaaaaaaatgattaaatactagtgcatcggactaatctctgtgctttacttcagaaaagtgttatttatgggctattaatatacaccaacttctcagtgagattggttttttccttccctcattgaaattctagactcatttgataactgtgtctttctgatcaagttcaaagatcatgagtctgattggcctgtgatctactgcaatgccgtaggtaacttctcaagaatactattgatgagttagctgcttttaggtgatgatcgattaaataggtcatcaatgtgtatgaaaacacaccagttgaaggaaaggctatttgatagtagtcatggaaaataatatatctaacagctaattattggcagctttccaagtgtaattatagaaaatgaactattgcttttccaagacactttaactaaggttctcttttttaacaggcaatggattccctaagcaaaacaaaacagggtgaaaaaaaaaaaagcttttacttcagaataaatctatcccatgtttgttggagcactggagcaaaagaaatagaacaggatgattcttgttcatttcttcagtgctctttgccattgtccccataaggcttccgtagttctcagcacattgtgttctttctgcccagtcccatctgcaaatgtaagaggcctgcttccctctgagccttttttcaaaacttcctgtggagtcaataatcttgaatcctctatcccagtacattctgagcctgcttttgcctgggctgggactgagggggctgtgccatcaatagctaggagattctgttgctgtgcccggctctgccacacactccctgtagcttcccgcccatcgaggagctttcttcagctactccacacagctgtctgttagatggcatgtgatcctcagaagggaaatgggatgaggcacggcgtattttcaataattaatctccaacaactctacccctgtctaccatgaagcctcagagtccctagtgaggagatttttctttctctctcgctgatgtctcctggaggaatccacatggaggcaatttgcttttgtgattggaattgcttaggcagcaagagaaacagtgttgtatggccttggagaaaaatgcctgatttaaatcatgatggagaagacttcggcttccaatttattcacaagaaataagcaaaatgagctcatttgacttacggatatcaatctaatcaaagcgtctacacatctgcatattcaagagaaaaaaaatgccagtatcatgagctgccaggatgataaaatctagacaagtgacttgggaagctgttccaatcaaacccgcatttgaaaagaaacgcaggggaatttattactgctttttaaaactagctaccaggaagactgttgagtcccttcctttgggcagcctattaattgaacttctcccttagaaggctgagttggtgccatctctgtgggtttggccctgtaacagagagctcagaaatgctataggacatttttgaaatccaagagcattgctcaaaatactacagatccaaatttttaacataaaaaacattttaaacattttaattcattaaatatattcaaactactttctccagcaatttttaattaaactctttggagtgataaagatatttgttctgtattgaccattatgctcttaaaaggcagcagctaatacaaccaaagaagagaattataaaatgttacttattctttttttgtttggttggtttttgttttttttgagacagggtttctctgtatagccctgactgtcctggaactcactttgtagaccaggctgaccttgaactcagaagtcctcctgcctctgcctcctaagtgctgggattaaagatgtgcgccaccattgcccggcaaatgttacttattcttaattaacttaaataggtgtccaatggctgcagaactgggttttacaagtacaaccctgcagtgttgttgttgttgttttcttgaaaacaaagcaaaacaaaatttatactgtctcctatctcaaactgctgtaggtgaggccgagagcctatagcaggttatcactgggctttgcggcattttcaatagatatttccatcagtgcaaatcctgtctccttgactccaccctgggagctctggccataccggtctccttgaactcagctttcctgctccaaattgaggaggctgggttcatccttcctacatcatgtcttggaaatctagtggcaacaaaactgtgtgttttacccacaattcatggctgtactcaggataactggaagacttactgaccatgttttcccaatttagcatatacgtatgtctgatagcagcacttctgtggtcattcagaaactagttacaaaagctctccacatatccagctgccttgaagactttgccctcactgatggcctttgtctctttgtaaatcataaatagcttttttagatgaatacctgaatctaatgttgcctaggaactagagagccatccttaacgtttcccttatctttaatgtatcaactgatgattcccccataaaggtcaggttatgctactctgttaatattttaatgtccccaccctgtttccgttaaaggaacatgaatggtagaaagatctagaagcaaaccacaactcatgagaaaattctaaaaataaatgcttcattttgggctctgcaaaagacaagtgcagtttatgtcgaatgtgaggctggtttgtaaagagtactaattactgtctttgctgtcctaaatcacagtaacgatttaaaagaaaccacgtctcatttctttatgcagcagagaggagatctctctaaagtagggagaaaactcaacgagggaagctacaaaggttagtgtgaaaccaattaatcttgttctgttacaagtttttaacttagtattttctctttgtcctgcaacatcttgccatgtgatctctgaagagaatctgtcttcagttcaaagactgtgttgcttcctcagagaggcagccaggacaaggcagggagatgaataaatgtggcatctggagttctgctggattagggtcctcaggcttaaggtatttttctcttgctgtgaagagatagcatgaccaaggcaacttataaaacattttcattttcgggcccatagttccagaggctgagactctgtggccattatgtgggggaagggggccaggggcgcaggggagagtatggcagcaggccagacagcagctgacaagttccatctgatcccacagtcatgaggcagaggggtgggagacaaagcagagatggagagacagtgagagatggggggggggagaggtgggaagagaaaaaacactaactgagaatgccattggctttggacacttcaaagctgaccctcatcatataccatcaaggccacacctaacccttcccaaacaatccccccaactttggaccaagcattcaaagttaatcctatggggggccattctcattcaaaccacattgatcttattcacttcttcccctaagctcttccagatccaccctcacctaccttgaccttctgcctggcttccctcaataatggaccataacctgcaagccacataaatcctcctccagccccaagctggttttggtcaacggtttatcacggtgacagaaaacaaattccgacactcattgagtgaatccaatttctgctcctcctctactcttaattgtggggccatccattggagcctgcttagtggttcacggccataaaggaaaaatgacttttcttcacttaaaagcaataaactgttcatagttcctcagttgtgggtggagtccgtgaaccacacctaattctcccccatgctaggatgttgactggcttgatcatgtacagacaaccacaccagcttgacttcttgaatacagtggtcatgccatgtccaggaaacaaacagcttttgtcccaatcctcatcaacatctgaaccttagagtctatctacctcttcctcctcgatggcccctgagctgtgggggacgggcagcttgctgtagatgtcccatttgtatctaagcactctacagccacttgttctctgaacttgagtcaagaagcagcaaggtgatagcaaatgaggcctggttataaccttcaagcttatcccaacccaccccccattatccactttctccagctagggcccatcttctaagagttctataaccccccccccccccacacacacacacacccaatctacaaactgagcttacagggacattttagattcaaactgtaacacttcctcaatttcctccttttttttgttcttgtgaagtaccctcttggtggaagacttaaaggggaactgttgttcatttctctataaaagggaagaagaaagatggtatgaatggctgtagcaaatatattaaatcatagatactgttttaattttacttaatgagatgaacaaagctataaattctaaagaggactgtaatccaatttggaatttgctcctttgttaaacaattttggatcaataaaatacattttggcctttaaaacactctatgccaattaaaattcaagttttatggctataaaaggaaatacgtgaaaatgtgaaataattcagctgatataacgaggcaagattattaacatgagactatccatattcacactcactgattgttcttataattaaattcccaattccattcttcttagactccttaagttggaaattcttgctggaagggatacttagcagacacagaaaatgctaggctgagcgagaagaggggacattttgtaggaagtggggttagagatgtttgctgtgtgaggaaagtgactgttcttgaactagtgttttcattaagtttacagactacacatacatctctcaaccactggttatcaaatatcaattggtcaggcctgaacacatacatacatacaagtatcaaaatatagactaggcagggtgcatttatgtgtgtgtatatatatatatatatatatatacatatatatatgtatatatatatatatatacacacacacatatatgtacatatgtctatatatgtatatatcaacaattaattttaaaaagtccttgaatttgaaagaaagttggggagatatatgggagggtttagatgaaggaaagagaggagagaagtgatgtgattatacctgaaaaatgaaaaacaaagtcgtattttgatttttcatgctattgaaatgtgcttcttgaatgtatcacagctctaccagttaattgcatgatgccaagatatttgagtatgaccaagtaagggaatattagaaactagtttcaaaaactgctcaacaatcacttgagggtctaattgagcttctcttttctaacttgtcaaccatccacttgacattaatcaagtgcctttgggtgctagaggtatagggctgagggcatgccccgtgccctgaggagggtcccattggctcctggttatctgctgtagctctaaatagatcctagggatacctctagcttgtggacttgagagaactgaattgagaccatagctggctgtaagttgattggtgacatgactgcccatctttgtagtaggctagcctctcaattctgtcctctccttcgtatactttcaattgtttataacctttagatagacttcagatgttctcaaggtacgcccaatatacttaatgagggctagagaacataacagtcatagttccaggatatcatgtgaagtacttaattaacaacttcttttatttaaagcaagggaggtgaaatgttttttgaaaaaccactaaaataagctccgggaacgtccatcatcctctccatagtagaaatctgcaaacaggtgaactggttcttcatttaaattagtaactttgcgatctctctaaaaatcagacatgacagctcatgcgaataatctcaggactttgagattaaggcaagaggatcatgagttctaggcaatctgagatatggagacagttcctgggagactcagttaaatagctagaacctatctccaaattcacaaataaatgtaaaactcattttagaatacctcttgatataaatgtctatctcaaggtcattttaggataaaatcaattagttttctgcatatttattcttcaatattattattaataaaattctattttaaaactgtgtttattcattcttaacaatgacaaaaaactgctccggggccttctataaagtgaaatgtgcctttttcccctttagtgaagaggttgagataaggagccaaggctgatgaactagctggtgactatacaggaatcaggctcagtcttcatgttctgctgtggacgtgtaccatagcctttgtccacgcaagaagggagacagctgttttccctgcctagactaaattttatttaggaagagaaaacccacacagagagaatagtgcctgtgtttcataaaccagacaggattacccgaccttctctagctgcaagagattctgaaaaggtaaagccattctagactctggaatagagaaaaacaatgtagccaatgaacagcacctgccatgatgccttcatatctaacaaggaatgtaactactgtatctgtcctctacaacctgctgagctcacgctaacatactgaaattataaaggcagaggctctgtaatttacaaaatactttacagtcatattgaaataattattggatttttcaacttttatgaaaatttaagaccttgcttatctgtactttgattctatacctcatagagttgaaccctatactctcagttaatgaacacaatgtttttgttgttgttgttttgtctttgttttgtttttcttttcttttctttttccttttcctttttgtattctttcatggcaaaaatttccacattagtaactattgggattttttttcctgtttcatcttgagtggaaatgtctctttttctacagatattctgttgctcttagatttatctctttgtgtctgagagtaagaattgcaccggagttatagaaaggagaaaactctcaattccccagccccctatgtattcctctttcctttatcaggcacatttcgtcctaactctgatttattcggttgagtagctgcatcccagcagctacccatgccaatcacgtacaccctgattactaattatgagccttaggataccatacaactcactaatgagcacattttaatgctggccagtgctaattagatgataatcatgtgcattattttatttacagtctatccatttaaattaattgggcatttacttgaacacagtttgaaagaaattgaaattgggtttagttgtttattgaagttcctttcacttgccatctcatgcaggtgagattactcacttgttctcaaaaattcaggaaaaaaatagaaataaatataatgcctgttttacagcggtgcctgtgtctatgcaaattgatctcaaagtgtgcatggaaacagcaatgagattcacagttctttttaaaatctctgctgacatcttcctgtggcctgattactgagagatttgcatgcataagaatgcaatatgtgcatatagaatcaaccaaacccttaggtaaatgtatgagattagatccaaagccaaccctgggagaatgttctgattatttttctttttttaaaaaaaaataacctttttttaaaaaaattatatgtatttctttagtgtgcatatatgtccgtgtgtgcacgcacatttgtacatgcatacccatgatcacccttgtgcacatatgcatgtaccatggcatgtgaatggaggtcagagaacaacttgtggaaataaattatggttctcttcttctactatatgggatctgaagatccaattcatgttgtcagcttggcagcaagtggcttcacccactaacccatctcacagatccattggtattactgatagaaagcttaaattcaacccttcaataataaatggcaaacgattcttaattggggcccaatgtattttcctgtactagggcacaatatcaaatattccaggctcccacttgtaaatgatgaccccattgctgaaagctgcatgtttgtgggcagctctaaattgcaggtgttctctggctgagacactttctcccatgcacatgcagagcagacacagagcagttagagtcggaaaggtttttggacaaaagaatctgcaagtcaattgtatctttaggtttcttctactgctgtgtgataaacaccacatccagaagcaactcattcagtctgtccattcactcttattgattacttagaattactctatttaaaaagacagccttagcccggcgtggtggcgcacgcctttaattccagcactcgggaggcagaggcaggcagatttctgagtttgaagccagcctggtctacagagtgagttccaggacagccagggctacacagagaaaccctgtcttgaaaaacaaaacaaaacaaacaaacaaacaaacaaacaaaaagacagccttgatccactcttgaacgctccacaaatacctttctaagaaacaggcagcctcccagcaaacagcctgacctcgaaagatacaagcctaagcaagtgagttgcatccttcctggttcaagagttaaggacgagcatgtgtcacttattccggcagttctttctccctgttctttcccataatttgaggcatccccccaccctctgcagacttccccaccctcggcagctttcagcagctccggtccttgcaggttgacctgctaactcacctttgtagttatttaccaggaaaccctgaaagacaaataaaaacagcaacaatagtatattccaaaatatctcagctcagtcttcctcggtaggtggatattcatttgttgaacatgaaagatgaagtgacaagcaggatggacgtggtggtggtggtggtggtggtggtggtgagagatggaaggaggggagatgctcagtatggtctgtgtgaaccaggccccaagccattctgagattcaattttttaaatttcttttatcctgagcttttttggttcaagcatgtgtgtatatgtgtgtatgtgtgtgtgtgttagtgtgtatgtgtgtttgcagatgtgtgtatgtgtgagtgtgtgcatgtgtgtatatgtgtgtgtgcgtgtagatgtgtgtgtgcatgtgtgtatagatgtgtgtatgtgtgtgtgtatgtgtgtatgtgtgtgagtgtgcatgtgtgtatatgtgtgtgtgttcatttttgtagagagactgactgggtacatgtcatcgagctttatgatatgatggtgtgtggctgggaaattttccttgctatttcctaagcatcagatgatatctcattttagactgctgtattttgtattgttttgtgacactaagaccctaagccttcagtatgtagtggtattctgaagaaaataacaaacataaatgtttttctactatgttttactggatttctgttttgttttttgtttttttgtttttttgagacagggtttctcagtatagccctggctgtcctggaactcactctgtagaccaggctggcctcgaactcagaaatccacctgcctctgcctcccaaatgctgggattaaaggtgtgcgccaccaccgcccggcctgggtttctatgtaacaacttaagaagctaatgtattttcattccatgggtccaattgcttgagccagatgaaggtggctgtgagattttcccttcatctctagttttatacccagtccttcgacgcttgtatatgactcaccccttcagcgtattttgtatcccttcggtcaaacctgcctgtgggcaagagaagcggtagctagtgttcttctggagctaggaaagggctgccagccggctgcaggagtaggctgtgcatctgaaaaatctacacaggttttcagcccattcttctaactttgggcccatctgaccctctgccccctccttccagaaagtcccagagacttttgcatcatagccttttcaggggtctatggtaggaaataggaagcctgcaggctttgcctggctaacagattacatagaaattttctcttgtcttcgaaatctattgctacaaatttagttcatatttttttctacggtattttgaactttttctttattcctgaggctgcatgccttctgtgataccataagaagtggtattctgaagaaaatgacaaacataaatgtttttctactatgttttactagattttaatgtaacaacttaagattccgatgcatttccattgcttgcatagatttcctaggagtaagggacatcaggtgacatggtggcagggaatgaaaagtagaagccctggtaaagagtccctgctccacactggcagatccactgtagtgtatcgtgacaatagcaccctgagcaaatcagtacccctgactgtcaacctctacttctccttagctcacctttggcctccctgagcctgggagattccagaatggaaacgtgttcctctccctactcacgggtgtcagaggtaaagacatttgcttccctatagaaaacaagcaaactttttaaattaaaaactaccagtagccttaagttcttagctcttgaccttgagctggctcaaacagttgagtccagattacagagcagactctgtacaaggagctttcccaaatgcaaaagacaaccctctgccctaaggaggactccatgctctctgtcaccaagtccttgatggagacagggaccagctcctaccgagagcagcactgagtgatagataagcagctgcttgcccttggacttgaactcacagtgactctgggttctctccttcctacatagacatttcaaactgaaattattactgaaagccactcaagattagtttggatgccagtggatacttctgtctgtaaagcattaataattctctgtagagctatgacaacccgcagccctcctgtgcttggcacatcattatctgtatgtaaaggtctccagtcagggtcaactgatgggggctccagtgatgaccagcttgtagtaggcccccttctggtccatcagtttcttatgggtccccttttcaatcaccactccttgtgacatgacggcgatgatatctgagttctggatagtagacaagcgatgagcaatgacaatacaggtccgaccctctctggctttgtccagagcaagctgcactgtctgtggaaaaaaagatggaacgtcaacccagacacagggttgttcccagcccacccctgggagaggctattgcaaataccacctgagtaattgtgtacttggtgataactctgaaagagtggccgctcatacagtacaaccatgctttattgaaattgcagcccatgggctgagaaagttccgtgaagcaagactgagccgaatatcatgtcactacgcagttctacaacaccggattgtcttgtttactaagataacaccaaggaacaaagcaggggacggttaatcatttgtgacacccctcctcaccaagggcactttagctctcgccagagtggattctcgtgcttaaagacgtagatcataaattctgaattccttagttgttctcccaattacatgttctacattggaaactccacttggctcccacctccttctaggtcttgtatacagactgcttattctgtcataaaacctgaacactataaaacatgttatgttttacaggtgatctaaactgtcataatttgagaaaactaattatttacctttgaaaagtatcatttaacctaaagaatctttttttttcccagagctgaggaccgaacccagggccttgcgcttgctaggcaagctctaccactgagctaaatcaccaaccccctaacctaaagaattttatagaacaattattaaaattttttttattggagtggcccattagtctattattttagatcatgtcttttgcttctaaaatgctgtctgtttctactataaatgaataagacaaatgaaaatttgtgtcatcttgtatgtacaaaggttccagcaaagactcatctaataaccagggagtttagaaaattaacacaggtagtgttccttctgtttctattttgtggaatagtttgagaagtattggtactaggtcttctttgaaggtctgtatgatggtttgtatatgcttggccaagggagtggcactattaggagatgtggccttggtggagtaggtgtgtcactgtgggcatgggcttaagaccctcatcccagctgcctggaagtcagtcttccactagcagctttcagataaagatgtagaactctcagctctgcctgcaccaggcttacctagatgctgctatgctcctaccttgatgataatggactgagcctctcacctgtaagccaagcccaattaaatgttgtcctttataagacttgcattgatcatgatgtctgttcacagcagtaaaaccttaactaaggcagtctgatagaattctgaactaaaatgatctggccctgggctttttttggttggaaaacttttaatgactgcttctatttccttaggggttatgggactgtgtagatggtttgtctgatcatgatttaactctggtacctggtatctgtctagaaaaccacccacttcatctagattttctagtttgttgcgtataggcttttgtagtaggatctgatgattttttttttaatttcctcagtttttgtttttatggctcccttttcatttatgattttgttgatttggatactgtctctgtgctctctagttagtttggctaagagtttatctatcttgttgatttttttcaaagaaccagctcctagttttgttgactctttgtatagttctctttgtttctactcagttgattttagccccgagcttaattatttcctgtctactcctcttgggtgtgtttgtttcttgttctagagctttcgggtgtgcggttaggctgctagtgtaagctctctccagtttatttttggaggcactcagagctatgagtttttctctcaggtctgctttcattttgtcccatacttttgagtatgttgtgccttcattttcactaaattctaaaaagtctttaatttctttctttattccttccttgaccaagttatcactgagtagagcattgttcagcttccatgtgtatgtgggctttctgttgtttttgttgctattgaagaccagtcagtctttgactgtggtgatctgatagggtgtgtgggattatttcaatcttcttgtatctattgagacttgctttgtgcctgattatatggtcaattttggagaaggtaccatgaggtgctgagaagaaggtatattcttttgttttagggtgaaatgttctatagatatctgttaaatccatttggttcataacttctgttagtttcactgtgtctggttagtttctgtttccatgatctgtccattggtgagagtggggtgttgaagtctcccactattcctatgtgaggttcaatgtgtgctctttaccaatcctacatctgatagagggctaatatccaatatatacaaagaactgtagaagctagactccagacaactaaataactctactttaaaatggggtacagagctaaacaaagaattcttaactaaggaatctcgaatggccaagaagcacctaaagaaatgtttaacatccttagtcatcaaggaaatgtaaatcaaaatgaccctgagattctacctcataccagtcagaatggctaaggtcaaaaactcaggggacagcagatgctggcaaggatgtgtagaaagacgaacattccctccattgccggtgggattgcaagctggtaaaaacactttggaaaacaatctggcggttccccagataattggatatagttctacctgaagagccagctatatcactactggacatatacccaaaagatgccccaacatataacaagaacacatgctttactatgtttatagcaactctctttataatagccagaagctggaaacaacccagatgtcccttgacagaagaatggatacagaaaatgtagtacttttacacagaggagtactactcagctatgaaaacaatgacttgatgaaatttgcaagcaaatggatggaactagaaaatatcaccctgaatgagataatccagacacaaaagtacacacatggtatgtattcactgataagtggatatcagcccaaaagctcagaatacccatattataacccacaaaccatatggagcttaagaaggaagaccaaagtgtggatgctttaatcctacatagaagggggaacaagataatcacagaaagtagagggagggagggacctaggagggagaaattagggggagggggaaaggagggaggcaggatcaggtatgggaagggacaggagagaagtacagagagggtcaggaaattgaatagaaatatgtagcaatgagggatggggaagtggggttagccactagaaagtcccagatgccagggaagagagaggctcccaggacccaatggggatgtctttagtcaaaatacccaacaaagggggggagagaccctgaagagaccacctccagtagataggtatggcccccagttgagggatggggccacccacccatctcaaaaattttaacccagaattgttcctgtttaaaggaaagacagggacaaaaaattgatcagagactgaaggaaaggccatccagagactgccccacctagggaaccattccacctgtagacaccaaaccccaacactgatgcaaaagaagcatttgctgacaggagcctggtatggctgtttcctgagaggttctgccagcatctgactaatacattgcagatattcataaccaaccattggactgagcccaacgattccagtggaaaagctagggaagtgactgaaggagatgaaggggattgcaactctataggaagaacaatatcagctaactggaccacccagagttcccagggactaaaccaccaaccaaagagtatacatggagggacccatggctccagatacatatgtaacagaggatggcctcatttggcatcaatgggaggggaggcccttggtcctgtgggaacttgatgccccagcctaaggggctgccagggcagtgaggtggtgagtgggtaagtgggtagaggagcaccttcatagaggcagggggagggagagatgagatgggggaaccaggaaggaggatatcatttgaaatgtaaacaaataaaatgattagttaaaaaagaaagaaaaaattaacacagaccttttcactttctgtgtctaaggcagatgtagcttcatccagtagcaagattttaggatctcgtacaatggcccgagcaatagcaatgcgttgtttctccccgcgagagagttgagagccctggatcccaacattagtttcatatttctagaaaaagcataacaagtttgagagctacagacagtcactgctgtttggagcccacatcaagaactcttctacgaatttacatttttttcttttcttttcttttttttttttttttttttttttgaacttagaaagaatgattggctcctgtaaaatataacaaatctagctacaaatattcaataatgaagtgtgtgctgggcaatgagggaagttattcccatctctgcattcctttaagggttatatttttgatctcttcctgtatccaactaagatcccacataggagatctttggtttgaaattctctgatttctagacttttacccaaagatcttttacaagataggctaatcccaggggaagagaggccttcaacacctctttggttggcttcttcccttgaaagaactttctgggataccagtcttggtttgaagttatactctgttgcttactgaacatctgaacatcagcagcttgttaaacgtctttgagctacaaactgacctgcaaaattcagtgttagtacccagcatatatattcgctgtggattttttttgttgttgttgttgacaaaattagtaaataaaatgtctagctagatgcctagcatggctaagttaaaaataattaacattcatacagtatttagtttgcatcaggaattgaactcctcctcctccttttttatttttaagacagagtgacaaggtttcactgtgtagccctgtgtgtctggaattctctacacagaacaggatggctgcaaacttgtggagatccgcctgcctctgcctcccaagtgctaggattaaaagtgtgctccaccacagctagttaattattctaagggtgatcttttcatagtcacaaacatgatattctttagattttatacactgtaaagctgaggcatggagaagcaagacaattgcacaaaggcagataagcagtaaacagcacatgagaaagttaacaacagacttgatctagttgatggttctctgtccttgtccattgctgtaacgtgcctgcctgcatttcccttccttgccttctgaaaaagttcaactaagccaggagaaccttagaaaaatcatgatttctcgaatttcataggtaccgtacattttattatcacattgtaaaatgtctaagggtgctttcagtaggaaaatgctgctttgatgacttttaggaaatcttctttgctgttttaggcaacgctggcaagcacaggtattcaaaatattcttttgtttttcggtttaggaacttcagtacccttgctagttaggctggccagcttagaagtggcagttgagcttcaggctcaatgaaacctatgaaagagcaagccagcaaacaaacaaggataccccaagtccagagtttgcagacataaccatttacaatgaaaggggatttccaagtggtattttaaaaaaaatagagtggaaaaggctatagcctttagctgaggcatcacattttaatttttcttgtcattaaacaaccaccaagggagattctcagtgaatgggaaaaatgcatagcagagcctgccaaattcagacttggctctggaaaagtgaaaggcatcaaggcagatgcaacatatctccagcacacacgctgagagttgcagcagcagcttcctttgtgtggctatttattttctgaccccagggtttcatgcatgctcggcaagagatctaccagtaagctatatccctaacctttgacctccatgccctcactttaaagttttggggtttctttgtcttttgcagatggaataggcaatatcaagttggataagtaggtatccccaaactaagcactaaggtactaaatagataagcttgcattcaaacccaggtttaaacctctggatttgtttctaccaggccgcattaatgctctatgggtattgttttctatgtagcgaattccacagcttctgttttgtttggcaatataatactttgtgacatatggggataaaggacatttgttttacttaaaagaccaaggtaatacaaggcactgggaaataaaccgtgttgtctttgaacctctgtctgaaccacagtcctgatgcgttttagtatcccacgcctccacagccctgtgttgttctgtaaagaacaacaaacaaccttggtgcttacctctgggagtgacatgacgaagtcatgcagctgagcctgctttgcggcagctatagctctctccacggagatctctttggtgttgtccccatacttgatgttgtccattatgctacagtcaaataacacgggctcctgggagacaatcccaatgtttgaacggaggaactgaacattgacttttttgctgtcgtgaccatctatcatctgccaatagagatgacaagggaggacacaacgttttagcactcccgcagtgactgaagttcttgctgtggcgttaggtgcatctgtttaagaatgaacatccccaaagccccgggacatcaatcacactgcctgtggaacttgtttctaacagctatgccattaaacttggcactgattactttgctgtttggacgttgttttttatttttttcccccctaactgcagctctatgggtattatgtaaatgagagagaatcttgggacagtgtttagttaagaacagaattctccttgtggcttagcatagcctaatctgtatggatatgcaggctttttgttttctgagactttgggagccacccagagaagaaggagaggaaaggaagttggaatcagggacagtgacagacagatgggattatgacatgaggatcaaacgtgtgcccttggttctattgacattattctctggacagctgagataataagtccaggggaaaatatatttggccacttagtcacaatcacacatgaaaccatctgccaggaggcaccgtacaaacgttttctgtccactgtatgatgagaacactgtctgtttcctggggactcacagtccagaagtcagggaagcttagtcacaaaatcaggaccattcaagttggttcacttaagatttctaagagtgccgggcggtggtggcacacacctttaatcccagcacttgggaggcagaggcaggtggatttctgagtttgaggacagcctggtctacaaagtgagttccaggacagccagggctatacagagaaaccctgtctcgaaaaaaccaaaaccaaaaccaaaaccaaacctcccccccccccaaaaaaaattcctgagtccatctcaaacataaagtaaatctaacttatttgctgtaaagtatttgtatgagttcaggaaaaaaaaaaaaggctattttaaataatgtgatcaggacgtatttttagatactttctaaacaatggataaccaaacactatttttaaggggtaggggtaaagcagaggtcacttagagttagatcatatccagcctgaagtatttcccataatacctatttctgcaaaatacaacctaatagttacccagaagctgaattttttctaattcttgtatatgtgctatataataaccatctaggaaacaaaatatgttccatgttcctgaagcatctcccatagacagtactggacacaccatagatacctaattaaatatcagacttacaatacctgcattcagtatcctgtcaaaaagcaaagaggatttttaaaaaattgatgaaatcagcattttcctatttatagtattcacagatccattttacaatgagcttacaaagtgtactgtgctcttaaatgcaagacatcatagaatgattgctttcttctggtcaccggagcattcagtgtgtgcattcagagaaacacacttagcagacatgatgatgctggaaagatccaacatggtgggttggtcttgcagcaggttacaatcaccctggacaatagacatgacagagctgatggctttgagaacctgagccctctcctttgaatgggtcagatctctaggacaatgcacttcctaggtttacccatcaccaagacctttcaagcactttaaaatcttcacacctacaatcaataacagcaatggcaatggaccacaggcagatcaatccctacccctcctttgcataccctcctggattctactgatatctgcctgcttctttttctttgctctatgcaggagaacctcacctttctctcagcatgtctcttgcagtgaagttcacactattcaggaaattcagacagggtattattgtaaagggactggggtatgtggggggaagcaggtagaagagagaagagtctcaatggccgactttttacttcttaaaaacaaatcagcagagagtccagttaaatcaggagaacagaaaaacagatttcgggacataggaggtttttttttactcctattttttactcctatttttactcctatttactgggagagttcaaaacatgaagtggttaagagcctttgagcaaagaactccagagaaatcatacttttttaattaaaagtctttgttatttgattatacagccttgtgaacatattacctaagaagaaaggggaaaaaaataaaacaggaaaagagagaaagaaggacttagaagagtaaacaatgaattctatcaccagtgcgtcaactatccctgccaaggctttgtcaagttgagtttatctatcagtcaaccgtgagcttctccgaccaggattgtgtcaagccgttcatgcctgcttccttgtcttgcttccttctcattgtgtcccctgtcaccccactttttccatccctagccattagtttcctgattagtctgcactttctgctccatttacgggtaagtgaccgtctctcaaatactctcaactccagctttgccatgtgcccagttttcttgcctaactggtcagcaggacatctggaactgggaagaatatgctgttagaagctgcggggtagaatgaggtcactcagcaggtgaccgaaaggaaaatagccacaggggtaagtgtccaacgcaaacgtttttttttagtctggcaaggtgtggcctgggagaccacttgggggcagatcttacgtagaaaacaacgctctccttgttctcagaagtcttgccccacttaccaccgttccctgatcgggatcgtagaaccgttccaacagctggatgctggtgcttttaccacacccactgctcccaacgaatgccagcgtctgcccaggatccacagataccgacagtccattcagaacttgtatatcaggtcgagaaggatatgtaaatttacagtcgataaaatcaatcttcccttggaagttgtcctgtggatgagaagactggaattacacatgtccctacaggagcctaggacacagaaggtgcacctaactgaatacaggatatgcattaaacaaaaagaaaatatgcaatatcgggacagcaactcagtgggtgacatttcagtcaggcatagtggttcacacctgtaatcccaacactgaggaagttgaggcaggcagatagtaagttcactggaggccagcctgggctacatagggagagtctgtctcaaaacaaacaggcaaacaaataacaccacaaaatggcattttctttccagtgctggcaggtgcagaaataagacagataagggaattaaagacatttgtcctcttttttttttaaatcctcttctgaaactttccttaccacctatttcttatattaaacaaaagaatggaagagaatagcaacggataaggcatcatggaaaccagctagtctttgaatgttttcacattgctctttaaaataatgagttaaaaacaaagttgcttggagtctgtgccacaaagatgaatatttcagtgcggttcaaactatctggtggacaactaaattagtttctatttcctagctactatgactagtaccacagtaaacatagccacgaaagactctcttgtagtatgctgacttcagttatggagacaccaaagaatggtgctgctgactctctctctctctctctctctctctctctctctctctctctctctctctctcttcctttttgaaaaggaaattctatgctgatttccatagtgggtgcccaatttacattcttaccagcagtgaaaaaggattcttctttccctacagcctctctagcctatgatgtcatgtatgctctcaatgttggacgttctgactgggtaatacggtctttcagagcatctttaatttgcctttctctcctacctaggggtgtcaaatgtatatttcaagtgtgttttgccatttacatttcttctttggggactgttgataaatggagactttagctcatttatcgtttagatgatttggtttgggtagattgattttttacagttctttttatatcctagctattatttctttatcggatggatacgtgggaaactttctctgcccactctatagtttctcctctctgggagtgctcccttttgtgcagaagctttcttttttttcttttttcttttattaggtattttcttcatttacatttcaaatgctatcccaaaagtcccccatacccccaccccactcccctacccgcccactcccacttcttggccctgatgttcccctgtactgaggcatataaagtttgcaataccaagggacctctcttcccaattatggccgactaggccatcttctgctacatatgcagctagagacacgagcactgggggtactagttagttcatattgttgttccacctatagggttgcagatcccttcagctcttgggtgctttctctagctcctccattggggtccctgtggtctatcctatagatgactgtgagcatccacttctgtgtttgccaggccccagcatagcctcacaagagacagctatatcagggtcctttcagcaaaatcttgctgacatatgcaatagtgtctgcatttggaggctgattatgggatggattcccgggtgtggcagtctctagatggtccatccttttgtctcagctccaaactttgtctctgtaactccttccatgggtgttttgttcccaattctaagaaggggcaaagtgcccacactttggtctttgttctttttgagtttcatgtgttttgcaaattgtatcttgtatcatgggtatccaaagtatctgggttaatatgcacttatcagtgagtacatatcatgtgagttcttttgtaattgggttacctcactcaggatgataccctccaggttcatccatttgcctaagaattccataaattcattctttttaatagctgagtagtactccattgtgtaaatgtaccacattttctgtatccattcctctgttgaggggcatctgggttctttccagcttctggctattataaataaggctgctatgaacatagtggagcatgtgtccttcttaccagttagaacatcttctggatatatgcccaggaaagatattgtgggaccctccgatagtactatgtccaattttatgaggaaccgccagaatgatttccagagtggttgtacaagcttgcaatcccaccaacaatgggttgaggcctgtttgtgaccagttatatggtcaattttggagaaggtaccatgaggtgctaagaagaaggtatatccttttgttttaggataaaatgttctgtagatatctgttaaattcatttgtttcataacttatgttagtttcactgtgtccctgtttagtttctgtttccatgatctgtccactgatgaaagtgggtgttgaagtttcccactattattgtgtgaggtgcaatgtgtgctttgagctttactgaagtttctttaatgaatgtggctgcccttgcatttggaggatagatatttagaactgagagttcctcttggaagattttacctttgatgagtatgaagtgcccgtccttgacttttttgatagctttgggttggaagtcgattttattcgatattagaatggctagtccagcttgtttattcagaccatttgcttggaaaattgttttccatcctttcactctgaggtagtgtctgtcttttccctgagatgggtttcctgtaagcagcaaaatgttgggtcctgtttgtgtagccagtctgttagtctatgtctttttattggagagttcagtccattgatattaaaagatattaaggaaaagtaatttttgcttcctattatttttgtggttagaaatggcattctgttcttgtggctgtcttcttttaagtttgttgaaggattcctatcttgctttttctagggtgtagtttctgtccttgtatttttttttctgttattatcttttgaagggctggattcatgaaaagatattgtgtgaatttggttttgtcatggaatactttggtttcttcatctctggtaattgagagtttggctgggtatagtagcctgggctggcatttgtgttctcttagggtctatataacatctctccaggatcttatggctttcatagtctctggtgagaagtctggtgtaactctattaggcctgcctttatatgttacttgacctttttcccttactgcttttaatattctatctttatttagtgcatttgttgttttctgattattatgtgtcaggaggaatttcttttccggtccagtctatttggagttctgtaggtttcttttatgttcattggtatgtctttctttaggtttgggaagttttcttctataattttgttgaagatacttgctggccctttgagttgaaaatcttcattctcatctactcctattatccataggtttggtcttctcattttgtcctggatttcctggatgttttgacttaggatctttttgcattttgcattttctttgattgttgtgcccatgctctctatggaatcttctgcacctgagattctctcttccatctcttgtattctgttgctgatgctcacatctatggttccagatttctttcctagggtttctatctccagcattgtctcactttgggttttctttattgtttctacttccctttttaggtcttgtatggttttgttcaattccatcacctttttggttgtgttttcctgtttttctttaaggacttttacctctttagcagtgttctcctgtatttctttaaatgagttattaaagtccttcttgatgtcctctaccatcatcatgagatatgcttttaaattcgagtctagcttttcgggtatgttggggtgtccaggactggctgaggtggaagtactgggttctgatgatggtgagtggtcttggtttctgttagtaagattcttacatttgcctttcaccatctggtaatctctggagttagttgttatcgttgtctctggtcggagcttgttcctcccatgattctgttagcctctgtcagcagacctgggagtctagctctctcctgagtttcagtggtcagagtactctctacaggcaagctctcctcttgcaggggagatgcacagatatttgacgttcggacctgcctcctctcagaagatgaagtccagaaacagggcctgcctcagaagctatttcgattctgcctgtcccagaagctgtgtagcttctgtagtccacactctcacctgctcagactaatctctggggatctgagacccaagatggctcctccaggtgctctggcaaagccctcccaggtggggtggacaccttttctctggcagggaaagtgcccggatgtctggagcctgaaatagggtctgcttcagaagctgtgttgctcctgcctgtcccagaagctgtgtagcttctgtagtctgcactctcacctgtgcagactaaatctctgagggatccgggaaccgtgcagaagctttttaatgtcatgtaattctatttttcaatttttgggtttactatactagagtagatatccatcaataaataatttcataaagagtacataaatagtggaattttatgtggcccttaaaaaatgaaattgtgactttctttcagaaaaatggagagaactataaaacactgcatggagaaaaataaaccagattcagaatgctaaacactgtattttttcttatatgcaaaaaacctatgtttgtggaagccagagagatggctcacgggatgaaagcctgtaccattcttccagaacacctgagttctcttcccagcactcaggttgggtagctaaccgcttgtaactctagctccaaggaatctgacaccctcccatggcctctgtgggcactgcattcatgtgcataaacccagatatagacatgtacacataaaaataaaataaaacaaataaaattgtgtatatgtgtgtatgtctctcatgaaactacaaacaagaagtaaggaagagatcttaaggcagtgtgtagggagagaggaatattatacctatgatcagaagcagaagggaaactgtctaggtaaagaaagggaaccagctaaggggattctggaagcatggagagctataggagggagagagagaaaggcacaaataatcataaagtataatgatacacatgtacgtaaatgccatgacaaatgctattactttacaggataatgtaaaaaaaaatctgtttaaaataccatctgaattatgtactctaaaatggggaaaaatttacagagactatttctatcacaggacacttgaccagaactttcataatttagcttagctttactagtgttttgctcttttgaacatatggatttttttaaagatttatttatttatttcatgtgagtactgtcactctcttcagacatacaagaagagcacctcagatcccattacagatggctgtgagctatcatgtggttactgggaattgaactcaggccctctggaagagcagtcagtgcttttaacagttgagccatctctccagccctagagttttttgttttttgtttttaaattggctgtgaagattaaaacccccttggagactaaataaatgaaaaaaaaatcttgttgaatattaactaatttttggtaattcacatgaactaaacttaaacctagataaacatgaatcaaatcagtattggtggacaaaaagacctagcctttctatttcataccaaaatatcaatggaaagcatgaccagatgggtgggaaaagacatgtatcttcattcattatagaactatgtgatttatgttacataaattcagcatttgctaaggctgtgatttatatgggatgtgtttcacaagggttgatatgtggaccctggcttggtgatattaagaagtggtatggtacatttaagaggaaaaaggataggcttggtacatggtgacttgattattgctgtcattcctctcagaattgattaatctcattttgggagacctgaattgttcttaaaaggaggtaattatactgcagtaactatagaagctaggaaaccactattttatagcatactttaaattacattatctctatctctatctctatagtttaaatgcagttaacccatatggtgggataatgctccctttagaagccatagactatctatctatctatctatctatctatctatctatctatctatctatcagaaattccagaactaagtatgggatatttgcctatgagttgttgtccaggggtttccaagaaccaccctcacccccagcccccagacaatatagttattgtcactgctcttggttacctatcagaacatgaagacaaaactctactgctgaagacaccatatttttctgttgcaagactaggagagatcaaaccagtactcacctaaaaaacctcctctctaagggctctcatgctatttaatggaagatagtattctaggtaccaagggtggagttatctacagccctagccagctgtaaagccggagaaccaccacagagacagaatcagcaagattccccccttggcacaatagtgggacttgtgacttgggggaaatcaacagctatctaaattgtacctgaaatgtgctcaattggaaggaattcattcctggtattataaacctagccaaaaacaaaaaaaagaaagaaagaaagaaagaaagaaagaaagaaagaaagaaagaaagagagagagaaagagagagagaaagaaagaaagaaagaaagaaagaaagaaagaaagaaagaaagaaagaagaaagaaagaaagaaagaaagaaagaaagaaagaaagaaagaaaaggaaaaaaaagcttcaagttttgggggcccatgccttagaaggaggtgctcctttatttctaaagtaatttagttttccaactgctctccaaatactcatctttatatctttagatatagatctatagcccagctttcacatttcataaaaaaaaaaaattattgcatcttgttttgcagcagatagagactattacaaaagtccacaactagccaaaatgcagaaagttaagtaaccatgaactgttcggccccaaaggaggcatctataacataacccctgcacctaaggctcaggagacatcttcacagagaagctggagagataagtgtctgaagaccaggaggaaggctttataggagtttgttatggatagtacaggaatgttgtgcaagacctgcaaaaactacaccagatgacatactaacctgaagagaagaaaattccacaagctctcgcccctatcagctactgagaaaggggaaaccagcaacccctgcttctttttcctcagaaacaagaccctaatcccaaggggtcagccttaaacacatgcaaataaagactaatgggacttagtgggtggtgtgtgtgtgtgtgtgtgtgtgactagtgcagaagaagagatcgtgagttccagaggaagtggttagaaggacatggatggaattggagtaaaaggtggtatgtacgcatgctcatgtctgtaattctcaaatcaaaataagagggtgctcatgaaaacgagaccgttcctctccacactgaagctttctgtttcactatgtgatctttcccccataatgcctttctgtcaggacaccacccactgtacactgtagtcctggagttctaaaaacagactaaatgatggaaccatcagatcatgtgcttgcagtttccaaactgtgccataaataaataaacttcttttctgttatgaagagcaggttgaccccaggcttgcaattatcctgccttggccttccgacttcaaggattgcaggggtatacataccaacaggccagaaaacttctgtatacatggagcatccttgagttgtagtcatggaaaagaaactgttacaagtacacgttgttttcttactcaaaacgcaaatgtaacacttgattttccacgtcaattatttccttcctttacacttataaatatattgtctgtccattctgagtgtaaatggatgaacacaggctgctaaactttagactctaaactggaattatctgactatcttcgatggctttttgtataaaaatgtacacatgcacaagtgtgagcacacacacacaaacacacacacaccagcccagtacttacccatttttcacctgctccactgtacacatcaattggaggttttctgtctagcagttgaaaaaagcgtgcagctgatattttagctttggcatagctcggtgtgtaagagaatgttcttccaacagccgttgcgctcattgcaatggaagagaccaccctgtaaccagacaaacaaatacccgggtattaggaggtggggtatcggtaaaatgaaggcctaagagttgtaagtggtaggcccaaagagcttgagcaagtctcttcagtcatgtctggagttgtaggatatagagaagttagtagttttcaaattgtgctttctgtaaaagggttgaagggtagactgaacaagcaagatagggttcagaccttcaaaccctagatcttccatactaaaaactattttttgtttgtttgtttgtttgtttgtttgtttgtttttgaggagtggagttcttttggaaagaaatttaaaagatgaacaaactggtttgacttttctttccattgtaacatttcacgagccattgataagtatgtaaaagataacgatgagcaacagaagcatctactctgtgctgagcatgcttacaagccgtccttcaggcaggagaaggaaaatgcagttgcctgtatccttctgtttgtcccagctactaactatatcaacatggacttcaggaatgagtgagcaaatgaataaattagttatgagagacagccttgctgatgcctgtccttgaatgtgcatggcagcccgtaaggctgcccatcagtgtcatctttcccagaaggcatctttcacaccttcgtggggtgggatgatagataagggatgtgcaaacatgtatgttactgctcatcttggaatcagtgtttatttcaagggtggagctagaaatccacatcccccaggagcccaagataaggtttgagattgaaatgttggaggtaggagaggaaatgacaggagatgactttctagttcttaaaggagaaactggaagtttcctataggctcttgattcttacatgctggcaaataatttgttacacaccttatataaacggacagaaagaactcaacagtggctggtctgtcgttttgggtatagctttaaatatgcaagggtttagtgggtatagtgggtatggtggtttgaatatgtttggacaaggaagtggtactattaggagatgtggccttgttgaagaatgtgtggccttggtggagaaagtgtgctattgtgggagtgggctttaagaccttcctcctagctgcctagaagccagtcttctagaggccttcagataaagatgtagaactctctgctcctcctgcaccatgcttgcctgggcaccgccaagctcctgccttgatgatactggactaaacctctgaacatgtaagccagccataattaaatgttatgagagttgcctgggtcttggtacccctttacagcaatggaaatccgaactaagacagtgggctagcaggaaagtattagaattaaaatatcagatgagaggatcgtgcttccaaaccctccaaacttaagattgtctctgcctttactaccaacagctaccaccctcgtgtgcacccttacttaggccctcttctgtagagtaagcagaccctgccttgacgaacagaaaaatacccttcttggcctatcatgtctctattcagagaaaatggctagaaatcagtttgttttacaagccaggaatagtgttaaaatataatagcccttgggtccaccttgttcaagaccttgagagtctcagctttaacatgtgtaaatataatcataatagtttatcctatgatccatctgcttgtaatcatatttttttactcttccagttcaaatgtggatttcagttcttaaatctttaaacctaggtgtagttgtatgagttttctgtgccaaagagaccccaataaatggaatatggagagacttgaacatgctttcaacgtagggcatgtttcttctgttgcatttgaaactctaagatcagtcataaagaaaatgatctcatttgcttgaggagagaaacatacagaagtctgtgaggaaaccaagtccagaagaaatattccatgccctgtgaagccttgaaaaagaataaacccagctgctttaagggaggattctttgctgggtagcaagaaagcaaagtaacagaactgggcaccatgccgcccctccccctcccccgagtgtcaatatcatatatcatatgaccatttggatattcctcacctgaaaacatagctgaagttcagatcttcgtagactattaagtaacctccatatctataggctgcagaattggcaagaaatgatatcccctgggaaaaggcatagcagaggccatagacatttgcctttctaatggcagtcttgtatgacttctccagctcaacctcaaatgctttaataaatcttccctccactccaattccagccacggtgcggatattgctaagggcttcgttggtgatctgaaaaaggaaagagtctgaggagacaaaagataggactatctcttttcatgccattgccacagccacccagatttgtcacacatgacagaaaatagcacagagaagttgctgcgggtcaactcaaccagaccatgggttatctgtcacttatactcagtctctagcatggcttcattacctccacttgctgggggaagagacagtgtgaggcaaggtcctcccatgcttgtcctggacaagctttaaaactgttcggctaatccatttgaaatgtctacaatgtggtctttgaatgtcttctgagcaaaacacctacttaatataatttcgaagcactaaagactattttccaagattgctacccggtaaaccatctcctctaaaagcacacaactgcatatcactagttaaaagtatacattcatctttagtttacatggtgaccatgagtttaaaagcagtttaaggtccactgttaatgaattggggtactccatcattaaagatgctattttctacactggcacccgctacttggacagcatcacattctctaactgaaaagtgatagaacatatttatgagtaagtttatgacgcatgagtgtatgactcaggccaggcagtaaaagcccagaatacctaggcttgggaaactaaggtaggagaatcccagctcaagacctacttggccttctgtctgaattcagtgccatctaggcaacttgataagaccatgtctcaatattaaaaaaaaaaaaaagtaaatagctcagttttaaagtgcttacaataataaaatctaggctcagtaaactctgtgtttagtgtctagcaacaaaaagcaaaaacaaaaagaattcattttacgtatgattgatccttcaactcctccctccctccctccctccctccctccctccctccctccctccctccctccctccctccctccctccctccctctctgttattgttgcttgagacagcatctcaagtaaacaggctggactcgaacccactatgtagcagagaatcaccttgaacttctgatcttttgcctctgcccccaagttctaagatcagtagagactgtgccaagcccggcacatcggggtttttgtttttgtttttttatcttcccaattgacaaatatctgtgtcatcgtcccctcactcattcctgtgttcagatattagttacaacagactttctaaaaattcatatctaaaccctgaatgcatatctaaaccctgaattctacactgtagtttatgattgtatttgagaaagacatttgcctttggcttagcaaatgctaaagtgtcaaagttgaaagtatgttttcagggtaatcatttagctgagaaaacaacaacaacaacaacaacaacaacacctcctttagtagaactgtctacctctgtaagtgagaatatagaaaatgtagaatgaatagccaagaggaaatcaagtttagcactctttctccttgcctggtcaagctaatgcatcaaagctttattgtcatagtgtccaggtagagacaagggtgtctctttgtacttctcattttcaacagtttacttgataaccacctagtcattagaagggaaatgaggtctataagattacctggccagccttctccagaatttccttgtcttgagaagcgaatcctgtcagcatttttgtctgtacagctcccgataaagccaaaaaggggaagaagactgatataaccagactgagcttccagttaaagaggaaggcgatgagcacggccacaaagatgttagtgaaggaattgaccatcatcccaacttgagagccagtagcctgcaaatcaaaaggtaccaacccatttcagacacagtctctcttaccagacactagtatgtgacaagctatttcatactgaaagattcttttttttttttattgtgataaaatatccatgacaatatttagctttttagccattcctaagtccataactcagggacactaaaaacaaaaccaacatgtataaagtcctcccagtggtgtgtggccaacacatctatgctcagtctctctcatcctctccatctctgaaactctttacccatcggatgacgctctcacctttctcccttgagccactggcaataactgctctaatctctgtctgtatgaatctgctcttctagggaactcataaaagtggggttatatgatatttatgcttatgtgtctgggctattttgctaaatataagatttttcaggacttgcctacattgtgaaacatattacaatttcattccttttgaaggtataaacattctgttgcacatataaacaacattttgtctatctattattcaccagtgggcttttgactattcaccagagtccttttgactattgtgaataataattttgaaagatgagttctgaaaatgaagagacaataagttatataaaatatatttggaaagttactaacagactacaccaagtagaagaaagaatatcacagattgagtgaagattcttttaaattatcatattcaaacaaaaataaatagaatggagagaccttacaagatctttggaacacaatgtcatggtttgtatatgcttagcccagggagtggcattatttggaggtattggagtaagtgtggtcttgctggaataggtgtgtcactgtgggcatgggctttaaaaccctcatcctagctgcctggaagctagtcttcttctagctgccagatgaatatgtagaactctcagctcctcctgaaccatgcctgcctggatgctgccatgttactgccttgatgatgatggactgaacctccgaacctgtaagccagccccaattaaatgtccttatcagagttgccttggtcatgatgtctgttcacagcagtaaaactctaagacacactactaaagattaagtctgtacatcattgattgacacaaagtaaataaaggttaaaagtataaaaatctatttaataaaacaaaaatcaagaaaattctttaacctggggaaagacataacatcccagaataggatgcctatagaggcccagaaagatacaatcagaaaagattttcaccctaacatagactggtagaaaaaaaaaatcaggacaaagataggatttttaaactctccaaaagaaaagcacaaaatcatagctaaaatcaaccatattagactaatagctgaacccctatagaataggagagcatgggacggtgtactgtaaattccagaagaaaattactgccaaagtagatctccacacccaaaaatgcaatccttcagaatcaaaggcaaactaaagaccttctaccttagtcaaaaactaagggttttctgggctggcaagatgtctcagctggtaaaagtgcttgatgtcaagtatggcaacttgagttcaaaccccaggtctcacatagtggaatgagcgaaccaattcctgaaagttgtcctttgacttcaacataggcacacatatgaacacacatacaaacaaataaatatcaaaaaattaaaaaaaaaaaactaaagaaatttatggctaccagaccagctttacaaaagatgcttgatggagttgtatatccagaagtggaagaaagataattaacaagacagcatataaatgtataaggacccctctcttgcatgtgagctctttctttctctctcttccttcctcccctggtctgtatatgagttccaggacacccagagctacacagtgagattctgtcttaaaaacaagcaaacaaacaaaaaggaaaaggaggaggaaacagaagaggaggaggaagaagaggaagaaaaggaaggaggaaaaggaggaaaagaatatattatgtaaaacaactattatacaaatagctaggatacttctatctagaagatacttcaactagaatttcctccaaaaaaaaaaaaaattaaaaaatggcactcttcagaggatccagccatccctttcttggttatatatctaaatctgtatggctatgtttatggtagaactagccacaagagttaaagtatgggacatactttcatattctttctcatatgtggaagtgacaaaaggcatgtgtgtagatacacacatgcacacacaattcgtattgcaaaggaataggaaagttgttgaggattgtgggttatgtagatgagaggtggagggacatgatcaattgtgttgaaaatcacaatataaagtgattagtgcattaaaattatgtattagattatctttaaaatacccttgtagaagaatacataatgatgaaaatatgctcccatcagaagtttgggggagagtaaagaaaagtagaaatgccctatatacaactcttctttgtctatggaaaacatggttacctatgaaagagcagaaaatcaaatgggatgtgttttagggaccttcctttaagatggttccaggttctgtgtaacacataacacttttagcactctggttaaactggctagagttgaggcaaacctcatacagtacagtgcccctgctatggggaggttttcctcccaggcttcataaatcatgcttgttttcttttcatttagaaagtgggtggagaattgggaggtagatttgactctcagcactttaaccctaatcctgggctttataaaggtccagactgatcatacacagctgtgttaagtctcttgaacaaggctgcaggttgtgggatttagaaaccacagctttgactccctgggtcagaaatgtagctctttgaagtttgtgtgtgtgtgtgcatgtgtgtgacagagagagagagaaagagagggaaaggagagggagggggagggggagaaagagagagagaaagagagagagagagagagagagagagagagagagaagagagagagaagagagagagagaatgtgtacacagtaagcatctctcttcttttccctgtttcccaatggaaatctttcaaagattgcaaggttgctcacaacataactctggatgctcaagggaagatgttcctacacactttttccttctaggggccacatatgaggttggtaagatctaacctcctgggtcttagaaatgtctgagaaaaacatctcagttgctagactcagaagatgaaaccaccaatcatagcagattgatgtgtgtcttaacactaagtctaggcatgcctaagggacactattgtgtaattctcagagtgttctacagtacgaacatctatgtaatatacccctgctccctactctatggctaaatgtctttctctaaaattcatattgaaatctaattccccactggagaagtattattgttagagcctttgggcatgattagattgtaaaactctgtcttcccaagttgggttaataaaaccagaataaaagaaggtggcagcagcccctctaaccttctgccacaggaagatggaatacaaaggtaccatctttgagccatacccttaccagacataacctatccctatcttgatcttaaacatcccaacctacttcctatgagaaaaaaaatgtgtctgctatttgtaaattgcttcatctaagatgttttgttacaaaatcccaaatggacaaagacactcccaaggcttaccccttgaacttgggaagcatctgtagcaagcctagttgttagtactccaggattatttttgaggtcatcgaaccagccaatatcttgtcttaacattgccttgaaaccaaatttacgcagcctttttgtgaggagctctccagatttggcaaaattgtaaccctaaaaacataaaagaaggaatctttggtgagatttttacatgaagatgggggtatggataggcaaataacttaatgaaagataaaattacctgcagaaattgtgtgaaaagtgatacacagcccaggatgacaaaaaacaggcacatgctgtaaatctctgacctttgttgttctttatcaacgagtgaaaaagtctttggaagataagtagggaagaaaggttgttagtataaacaataacaaaataaatatacttgaatgtttaaacaaattttcacatttgttcaatctgatagaatgtcagtgagagtgaacttcaacgtcaatatcaagatgaggggatcatcacgtgtcagtgtagaacatcagctgtactgaatggagcactgcagccaaggatgctgaggagggagggaggcaaagatgctcatgttggagggagtcaaggatgctgatgagggaggcaagcaagaaatgcacaggaaatctctggaacgtcctcttaattttgctgtaaaactaatactgtctgttcaaaaaccctttaaaacggcttcactttaaacacactagtttttaaaccaaagttcgtgattaacattgtgatgacttgtaaattggttctgtggcagggttcctggaagatttaaaccaatcccaacaattacagaagttgccccccaccccccatcaccaagttggtttgatttaagcagtggtgttggtttttttctccgatatagaagaaaaagaaagaaagtatggccaaatcacagttatcctttaagaagtaagggagcaaagagagaggaaggaagagtgggaagaaaaggaggaagagggacacaaagacattattgagaacttgagaatgccagactgtggaaacacatggttattgtttcaactcttatttggctcaaataatggacacaataaagattatttttttaaactcagatatcctgtgttttattatatgtatgtatagtatactaaatatttagtcttacatttagtatatatatatactactgtacaatgtactgtcctaggcctaggaaagaaaagaatgtgaaatctgagcctgctgctgttgtcctacagtaaactggaattcttctttcctcaaaggccatggaaatcgtgactagagtcactactatttactattttgattactaaatgatattcttcaatacgtggtgaatttactgacaattgcttaaacacctagctgaggaacaagtttttgcaataaggaaactgagtaaacactgagtaaacagtgtcttctggtggcaaagctaaaatggcttttcctcacaacaaaaccgttgttattcagactaaattaactaggagaactcaggaaaagtatggattgggcagatgtataataagttcttatttattctctctctgtctctgcctctgtctttctgtctctgttgtctctctctgtgttcctccccacctccctttttctcttcaggctctctcacagacctgggattagcaattttgccagtgtgccctaacgaggatcgtctggtctccccgcagctggactgcatgtgcgtcaccaagtgcagcttttcataggaattgaagtcagacttgcatgtttgcgaggtaagcactttattgactccagtccaattgttctgaaataatttgaacagctagaacaatgccggcattgagctgctctaagaaaaccatttgttcaacacatatttggtgaatacctactatgtgccaaataaatctcctcagaaacaatatgtacagtattgcattagtaaagctttcctgtgaaacaaaacaatctgttcctttttttttaacatgtgtcttgtctctccatagtaacagaaaatataggtttcaggacacgaattgcttaatggataataatacttgattctggaaaagggaaacaaaaccatctctctttcttcaccatcagggctaagtttacaagtttaacaagttttcattttattttgcatcagcactcatcttaattaataaaaaatctttaatgatttgacagtgatggttcagtactgacattgtttctgcctgatgtttgtgtgctcaaagagttttttgtttgttcattttaattccaggtcttaaagagcagctaaggcaactgcaatgacaatttttaaactttattgtgtaaaatgagaaaaggtaaaaaatgaaagtgaaaaaaataaaagctgttctgggttgaacataaactacaaagcagagagagacagagagagagagagagagagagagagagagagagagagagagagagagaggttggttctaaatcaatgagattttactatttctaggacagtttctacagcttttataccttctagaaactgggttctaagacaccatagtaattcttaacagacttgtgcaaccaactagttcatagaatttacaattcaagatattataaaacagatctacacagatattcttgaaacctccaactgctatgcagcagtgacctctccctacaaagactacccactgtacctatgggttacagatgagtccacctaacactcatagaaaatcaaggacacaaacactaagacatttgcctgagtccattcatctaagagttattcatgaaaaggaagttcccagtttccggcttctttattaattctgggtatgccctttggcttatgggagtatctacatagtccagacagagaaattgactaatgttaaaatccacatgactgtttatttcaagattaagcctttctcttgattggattaagactttacccatagtcttttttgccatatgtggggagccaccctcacattcaccgttgcaagatggcgctgacatcctgtgttctaagtggtaaacaaataatctgcgcatgtgccaagggtagttctccactccatgtgctctgccttccccgtgacgacaactcggccgatgggctgcagccaatcagggagtgacacgtcctaggcggaggataattctccttaaaagggacggggtttcgccattctctctcttgctcttgctctcttgctcctgaagatgtaagcaataaagcttttgctgcagaagattccggtttgttgcgatcttcctggccggtcacgagaacgcgtgtaagagccataaaatcttgttccatgagttctttgtacattcttagttttgaaatgcagcccaatagactaccctagaaccctctgttcttagactgtctgtggctcagaaacacatctttctatttttgtcattggaaaacttgtttaaatggaaagcagccatgaaattcttgctacgtgtcagatatcaaatgtgtggcttaaccaatcttaaattaggatttccttaaaattaggattttcacagcaatccaggaagtaggtttcttgtttcatagtaatgaaatatacacaaataatacagagatataaaaccatcccagggctggctgctccttgtgcctatgcttttccagcctgccacatctgacttgcagtggtttgaacacttggcacatcttccacccgaaacagacccagggaaagtgaaaccaatacgttatattttagctgtgtatggaggcttaggtaggttagcaatcagggttttatttgcacacatttaatggacacacgtgtggtctaatataccacacattaatgcaatataccctttaagtgtgtcaggataaaaccagggcgattagaaacagactcatgaccccctgtgagatgaaatcatcttgagtatcatgacgagaatgtaatgattatactaagacaaatagaaataatcttccttaaccttaagactgtgatttttttcatcctcttcctcttagtgaatgtaacaccgagaacattaacaataaaccggggttgggttccagcaactagatcctgattttgttgttgtagaaccttcaataaaagtgttattgtccagtctaactccatcccagtgctaaatggaagtctcacaaggtcacaggaatgaagtctttgtcactaacagagggaacactcaagtctagcggatagtatctatgtagtccagacagagtagctggctattgattacctatccttagaactcctgttcttagactggctgtggttcagaaacacatcttcttgcttcgttattatatttcctgatgcggccaattcacagttctagagctagaagctgtcttcaaggtcatctttgtcaactcccattttataattgagggaaccaagtcccagagaacaggataaagtctaggacataaaggccagtaagcagcagagccaattttaggaaaaaggcctcttgggacccaagaaacctcctatagtggctaacataggaacattgagtgaatatcttcttggttccacttttgctgaggtctaatgagataagcaggtctagacacccctctctcggcatactccaaagacttggcttcctgctgcagagacacttgtatgttcatgctcactgcagctctatttccaatagttaggaaacagatgtccatgagctggtgcctgggtaacgaaggagtggttcacatacacagcggaattttattcagctatggcacccccccctccacacacacataagctcagagtacatcatggaacggggaacagaaagaacataagagctgaaggattagatgtgctatgaaatgcagtcttctgaatgggcatgcccattgcagtcatggtctcaaacagctttgtcaacctgaacacatcaagcttgtcaacatccgaatatggactggggagagaggttcataaaatctcacttctaattgatgaactattggcacttagtgactgtcggggaaggggaagtaatttttcctagtgttacagcttctggtatatgtccatgcttcaatgaacagctctcccgactcctgctcatgcaagcaaccgtaattaatttcagtgggccctttaacaaaacatttaagtaggagggggttttgttgtgaaggattccaaagggcatggggttgggtagactaaaagagggtaatggggaagacacgaccatcctctactgtctgtatgcatggatttgtcaaagaatgaatatgtttagaaagagaaaaatcagtgaagaagtcaaaattccaggtgtcctttataccacaacatctcagcttctacatttcagactcatccctactctttcttctaacgtatgttcctcttgctcagcaaggtcccacccagaccctctccctgatggaatggcagctggagaggtcagtaaagcctgatcttgtcctccatcccagaccaataccagaaggatggccagcaaacaagccatagactcatatttgttgaatggtgggtgctctctattatctttctgtctaatgagcatcttcctcacttcccggaaacttcacaggaaaagtaccaatactgtgacacagtggtgtcaagtccctagcatgatgcctaagggaggccatcagcaaattcttgttggacaaataaacgaatatgtgtttatatttggatgcagtatctattaggaaataaagaaatatacattaattattttaaaagattttcagcataaaagattgtggcaccatgtaagcagaaactcaattaactagagctatgtttacaattgcctggcttcctgaaagcaatgtgattaaaaatggcgagagacaggaccagagagatgacttaagaaggaagaccaaagtgtggatacttcgatccttcttagaagggggaacaaaatacccatggaagatgtactggctagttttgtgtcaacttgacacaggctggagttatcacagagaaaggagcttcagctgaggaaatgcctccatgagatccagctgcaaggcattttctcaattagtgatcaagggggaagggtcccttgtgggtgggaccagctccgggttggtagtcttgggttctataagaaagcaggctgagcaagccaggggaagcaagccagtaaggaacatccctctatggcctctgcatcagctcctgcttcctgacctgcctgagttccagtcctgacatcctttggtgattaacagcaatgtggacagtgtaagctgaataaaccctttcctccccaacttgcttcttggtcatgatgtttgtgcaggaatagaaaccctgactaagacagaaggagttacagagacaaagtatggagcagagactgaaggaatgaccatccagagtctgccccacctggaatccattccatatacaatcaccaaacccagacactattgtggatgccaacaagtgcttgctgacaggagcctgatatagctgtctcctgagaggtcctgccagtgcctgacaaatacagaagtggatgctcacagccactggactgagaacagagtctccaatgaaaggagctagagaaaggacccaaggagctgaaagggtttgcataggaggaacaacaatatgaactaactagcactctcagagctcccagggactaaaccaccaaccaaccatgagtgcacatggtgggactcatggctccagatgcatatatgtagcagaggattgccttgttggtcatcaatgggaggagaggcccttggtcttgtgaaggctctatgccccagtgtaggggaatgccagggccaggaagggggagtgggtgggttggtgagcagagggagggggaagggaaagggggttttcagaggggaaaccagtaaaggggataacatttgaaatgtaaataagaaaatatctaataaaaaagatgatgttaatggctgatatttgcatatgacactttatgcaaaataaatgttaataaaacatgaaaagataaaaattaaaaataaatggctagagatgtttctacccagaccattcttttgctggattactcagatctttctatacaagtgtcaaccatgagggcagtttactttttgtggtcctaatttctaccagagaggagagaaggaagggatgtagaaaaagaaacaaaaatgtgagtttttcaaagtattactctggcaatgtggtgtgctggcaagcccttgagaaacttgacaatgtccttacatgtgtggctgtcattttttgttgaactcaccaggtgtgtgtgtgtgtgagagagagagagagagagagagagagagagagagagagagagggagagagagagatctgtgaaaatacaacagccttttaataactaaatgtgtggtaataaggtataaacagagctgtgtctatatcaccctggctgggtgtgaatcccatctccgccacatgctccctcctctgaattctctgagtcttattgtcctcctctataaaatggcaatccgaagaacctgggcatcagtggttattaggaagcacaaagatgatgcccaatgagtgtttgccccgcccccgtcgccatagcaattgtcacatggaaagtaacaaaactcccaggaactgaaaactgaacatgagcttactctttctcccagctgtatttttttttagatttatttattttatgtatatgagtacactgtagctgtacagatggttgagagccttcatttggttgttggtaattgaatttttatgactactgctctatctggtcaaccctgctcccttcggttaactgtgcttgctcaggcccaaagacttatttattattatacataagtacactgtagctgtcttcagatgtgctagaagagggcgtcagatctcattatgggtggttgcgagccaccatgtggtttctgggattagaactcaggaccttcaaaagagcagtcagtgctcttacccattgagccatcttgccagccccccagctgtatttttactccttttgtttttttcctcagttcctcccatgaccctggctgcacgcagtcagtagcaaggcaaacacttgcccactggcactattgccagctccttaaattaagctttgcaccacagcgatccagcaagactaagaagcgcctgaaaatccctttgtattgttattcaaccagtgcttttcatccacaaaaaccatccatccctcttgcaacctcaatcatttattcattttccatagtgcaaggactgtaagcccttgccggccccgaataaggtatgtccactgtcacttttttattttctgtatggtggagagtctatgaactgttcatcttttagagctaggggtgaggggacaggaatgggcaacagaactagcaacaaacaaacaaacaaaacaccaagtatgtttaaagaaaagagacattagattagatacaatactagccaaccgtttaacaacagcaactactactatagcaaaccagaatgtacgaaccaaattaagttagtccagttgcttgcttaccttaaggatctggctgaataaaagggagtagatgggtgtgactgccccattaatggctgcacacaaagcccctaccagtatgtagggccattctgagatgttgtattttagaatcctcctaactggggcaggttcaacttcttccacaagcacatcattgtccttagggaaagagagggttacattagttattcaaacatgtctacacctttaggtgatcataggatggtgatagtggttacacattggttatgggtaacttcagagacacctgagatgtggtgacttgtttccggtattccttgggactttaccctgcctgactggggcaggactgttccctaaatggcaaatagatagtgctcataatagcatatagactaactcaagcagtaaaaattgtgttgtatctttgaaaatagcacatcttaaaaataccaccgctaagtgtatttacacattgaaaacagcggtcttacccatgagtcctctcctatagcacaatttacttcaaggtggtgttatctggccctcttgatatctctgtgtgggaattgggaattgagctagagaagcagtgcaaagatgccaagctatgggtactgtcacttgtctgattggataccgtcacctctctgaatagctcttatctctgactcagatgcattctgaccacacccttgggactgtgttggactatcagatgactttccatatggcagaattgctctttataggtcttgatactccagatctgattgctcacagactcgtaaatgccaggctaatgttctctgaattctacgtgttccctgataatgccgttacctgaaggtaactattcagagcctgacaagatggaacctttcctggttatcttgtagcaaagtgtccctaaccatacgcaatgagacaattaagggcaataatgaaatttttttgccctgtagttttcatatcaagacaaattaataaacaaaaatagttagcctgaataattttgtaatcatccactaaaaatgaaaaagatgatcttaaagaaagttatattctactgtcctagaatggcctgagtggtaagaaaacctgccctcagatagtggattattttattaaattttattagttatatataaattagcagcagagaaataaaatatgtattatatatacatatgtgtgtgtatgtatatatgtatgtgtgtaactaaagtcattctagaaaatacagtggtctcctatctactatatagatggttccatgtttgacaggacttttctagtattttgtctttcctttgatctcttgtgtgggcctgggggagatcaaacttcctactggaatcttatcttctttctatactttcttatacctgtttctgtattctaactctaatatgagtctcctacctggataataattctaagatttaatgataagacaatatttatgccaaaagccaagcttcttcagatgagccaacactgataggcatttttatgcatcctgtctctgttctaagataggacttaatccacaagtcagctgtggtaaaactacaagattctaatatatcacaacttgacttgatgtatatatattttatcttttgttttctaggtttactgaaaatgattcatgggggctggagagatggcttagtggttaagagcactgactactcttccagaggtccccagttcaactcccagcaaccacatggtggctcacaaccatctgtaatggcatctgatgccgtcttctggtgtgacagtgacagtgcattcatatacacaaaatgaataaataagtctttttaaaaagaaagaaaaagactcataaatattagagactgaaatttctactctgtagatgccccttaatactaagcctgataggatatttaccatctgatcccacataagagctaaagatgcagacagcttggagaaggagaaccagcttagctctgtcaatagctgatgctttcaatgagtcatcccacctagagtttagggcagactcctaacaagcctcagctcttctacatgttctgtaaatactctgagagaccacaaggtggaggtaattgctttgtagcagtagacactttaggaacgcccagagccagagtatttcccagtccacagaagatgacatcagaatgagaaagagcaggaattcagctggaccttgtagatttaattgttaagatactttgaaaagcaaaaaccaagccacatactctcattcagtgctctttagttaaaatttctataaaaagcaagaaatggaaattccattagccaaattatattgttttcttttaaatttttaattccactcaaaaggattctgatatagttactatatacccaagaaatatcagggaaatggcagatcatttcattttggggcttgaacaatggatcagcttctcaacacctttttttctgttttttatttttatctcttttactaggaaaaatataaaatggccacttttaaaagctgtactaggcaacagtcaaatgatctcaattgttttcttcctagttctatgaacataaatgaaaccgttaattctggccccccaaagaggagatgtgtttctagtgtcaagatgcaggtaagagtcatgcttacatcttatgttccctctttctgattcaccctgagaaagagggctctcaggtatttacagaaatgagtttactcaacagtgagacctctatttgatgttaatagaacaagacaggagagagtctcaatgacccatctttcacagggtatcattcaagaatttgtcccaaatttctcctttgtagactagtgcatgtaatgatgtcttaatgaattcgcaagttgggattttattgaggacattttgaaattacgtcatgcataatagatgtacttgtaattaaagtattctttggcttatttgatttgatacatagaagaatgtgagcttcattttaatcacagaaactccattttttcattccaaatcaaacaagcaaacaaaaacctcttgttgccctgcttaataaaggcactgggctaatcctgtggcgactcaacacagatatgaagggccagggagtctaaggagtctaaaatttaataagagaagagagcatggattccaaacttaagaattccatgaaggagtttcaatgaacgccatgtaggggatcaaaaatgagcacatccaggctgggaaatacttgtggcttgatacatgttcccttataagaaagataatgtcccaaacagcaggatagtgtacctttgcaatttaaaacgtatggcaatttgtataataaggtctagtcttatcaaataacttcaccaactaagaaaattttaaagtgggagaaaaaaaaaagatttccagtattgtttaaaattttaaaaagaaaaaaaactttaaaaagttatctccatacaaacaaataatttgctatgcatgtttaagaagcatatttcctatgcttattataattattcacctaaaattggtaggtatcccttaataatccagtttaatgtaatttattttcttcaaggtaattaaaagaatctgtgttcttttggggggaggggtgtaaactataaagttttcaccagtcctaaagctctcctatttggtctgacttagtaatctattactatacatctgaaaagcatgtttgcctaaagataaatgagacccctgggaaagatttctcaatgccctgaccccaccccagaacaaggggtgtctgacctttctgtcttcgtaagaggacttgtgatcacctatagccagtggaggttcatgtgacagatgagacagctgagacttagatcgttgacggatggaagctctggaaaacacagcaagacaggataggttaaagatggcaagcaggttgcaaacagggctcaactggtgtcctagtttacatcacacatcaaatcaacagaaatatgtggtgggtcacgtgacaaccagggcagggagcttccaacttaggtttgatgaagtttatcttgcgtcagaataagttgggtaaatttctcttgaaagaaaaatagggtgccttgtaagacgacttccaggttttgtagatcacatgacagccaggccaaggaacttccaagttaggttggacgaggcttatctgcaggttaggtgctgctcacagaaatgacccatccatcatcttgttgagacatactttagcttaatgtgtttattcattcagctggagtttattagattcctaccacatgtaaaagtccaatgttagctactagtgggaacataaagactagccatctttctcaaagagtttaaatcctacaggagaataatgtatgtaatcaaagctagtgtaaagaaaagtctggtgggtgctgtgtggaagcttggaatagttaaagctgagttttgaagacgttaatttgacatagtacaatgtaaggatagagatggtggaggtgaggggagtgtgtcaattgttccaactctagacagaatgatttcatgcccctcagtatttgtatgcaggggaaattagactaaaacaagatggtgtctgtcatcattcagacttcccaagaaatcagtaacatgtcaacttccttatgctaatctcgtcccatgctgtgtgaaaggcctccctcttagtctcccatgttcaacactatgcatctgcagaagtcacatgtcttctttaatcttccacattcaaactcttgctacgtctcattatgatcaagcacaaaaccactcctgaaacctgattccctgtccccaacctaacctgagattttgaatttattcctctcactgtgatgtgtaaaggatgcatacggagtcatttctttgggttaggtaacaaatgctgggacatctccagactatgaagaataggctgtcacctggagatcacagaatgatgatggagtgccatagggtgtgtgttatgagtgagacaagaaatcataggtctaatgaaattcacagcaattgacaccaaggtaggaatatatgagaaaggagagaatgtcaatattcaattgaggactcaacttccagttctatacacaggaagacctgtctatgagttccttcagatttctactaccttaacattgtacttcttaaatcagtctctcttctattcctcaaagacttctaccattctagaacagactgtcatgaggccatgagcagtaggtactgggcaagggctctgcctcccagatggtcctcggtctggtttatcagaaacactggtaagattccatcacactcctgatcagaaatgatacaacactgtctttaaaaaatccttacttcatcaaaaggtgtgcactacctttcattgcaaagaacaacagctaatttgggggaataaatgttctttctctctctttttttctacattattacttagaaaattattttctgttgccaactaacttgtttttgaacctaaaatatattgttgaagaaaggctcagctatcagaaaagctacagcccaaaaagcaagatacaaattaacatttaatttagtcatcctctaggaaaaaaaatcctgtcagcccatacaatgagatatttttaatagaacttcttattcaaagttataaatccttctctgcaggaggttaatagctactttttgagtgtggattgtctttctggatattttttttagtcctagtcattaaaatgtagaacttgtgggaagtgtagccaactaagagacacttgtgtgaaaatagttatttgtttctcatcataaactactttgaacagtcagaattttgttcttaaaaataaataaaccatttacttatttgctgtaatgaccgcaagatacatgttgttctgacccaaagacagagagaggtacccagtcatttttgtgtttaagaaaagtagtcatcttcaagttgtgatttatgtattttactcatgattaaacatgctgccaggatcaaacatagtcccacatgcctataaaatttgcctagtaattctgataatttctatatcttctactacatccctctatatactacataaagtaattcaaagctattgctttgttttccagctcaataaagctaacacttcttaaatttttttctttttcttcagtagatttatttttctaagaacaaaataaaacaaaataaccaactctaagaatctagacctataaaattaacatacattagcataaaaaatctgtttgaaatagatgaaaatactttttagtaaatcattctttgaacattaacaataaataaacccattttggctacatgaaattgttatcggaatgttctattttaagcaaccttaattaacttccttcaggatatgagtagccatcttgaatgagctagtcctatactaagtctttactttgagcacagtctggtatttaatgtcttagaaatggtaaggccaatggcaaagagatgcatcaaccataacttattactagttttctgaccgaagtagaaaaactcttaacaatatttttgtgaacacagacaaatatttctggacagatttttttaatacataacttttaacatcagaaaaacttttaagtaaaattcttttttattagatattttcatttgcatttcaaatgctatccccaaagccccctataccttccccctgccctgctccccaacccacccacttctgcttcctggccctggcattcccctgtactggggcatatgatcttcgtaatactaagggcctttcctcccaatgatggccgactaggccatcctctgcctcattgcaactagagacacagttctggagggtactagttagttcatatcgttgttcctcctatagggttgcagacccctttagctccttgggtactttctctagctccttcattaggggccctgtgttccatccaatagatgattgtgagcatccacttctgtatttgccaggcattggcatagactcacaagagagagctatgtcagggtcctgtaagcaaaatctttctggcatatgcactagtgtctgggtttggtggttatatatgggatggatccccgggtgggccagtctctggatggtctttccttccatcttagctccaaactttgtctctgtaactcctttcatggatattttgtttccccattctaagaagaaacaaagtatccacactttggtctttcttgtttcatgtgttttgcaaattgtatcttggatattctaagtttctgggcaaatatctgcttatcagtgagtgcataccatgtgtgttcttttgtgattgggttacctcactcaggatgatatcctccagatgcatccatttgcctaagaatttcatgaattcattgtttttaattgctgagtagtactccattgtgtaaatgtaccacattttctgtatccattcctctgttgaggggcatctgggttctttccagcttctggctattataaataaggctgctatgaacatagtggagcatgtgtccttattacaagtttgaagttcttctggatatatgcccaggagaggaattgctggatcttccggtagtactatgtcaaattttctgaggaaccgccagactgatttctagagtggttgtaccagcttgcaatcccaccaacaatggaggagtgtccctctaatgatgatttacagtctctcactaacagcacatttcaaaatatgttttgaaagtgaatatttatagatgtaagcccaggaaaataaatgtctcattagaggacatcctctttaaaagcctaaatatccattttattccatccagttaagaaattatttgagtccaaaggcatcactctgggagcagaagtgtttgtaattaaattgcctctcagtaaggataaaaaacagatctaaactgatgaagatggccttcatataggagtggttcaaactggttaagtttggtggggaaagagtaggtgcctggcagtttgcttgtttgtagttgtttatatatatatatatattttttttctcctgagacagggtctcacattttagtctaagctagccttgattgtgtaatctttactacctcagtcttccaaggatacagatatgcatcacagtaccaagttaacatagagaaacatagctggagaaatggtttagtgagtaagagccttgactgctctccaggtttcaattcccagcatccacatggtggttcacgactatctgtaacccaattcccacttctggcctctgtagtcaccaggcatacacatggtgcactgaaatatatacaggcaaaacacccatacacatacaattaaaattaaaacaaataaaatctctattctacactcaatattagaagagccttccagcatggccctctctcaacagattgagaagactgagttaaacaaattgacaaacttagatccgaggacccggagtctgccatagggtttccttcttggacctgagatattgccaaagcaccacacgtgcagaaggctcctaaaaatatcaataagcttcaaaatcacacagcttgtgcttaccttaaactgtcctgatagctgcctctggaaaaggtcctctcaggtgtgtccccttcggttgtatcttttcctatttaacacatgagccattccttacaacacacaataagcatggccttatttacatagaataattttctgtttgcctagaaggtaattattgcattggatacccagacatcttgttaacttattgcaataaaataaaataaaataaaataataaaacttgaaatttgtccaacatattctaacaacaacaacaacaataacaacaaaaccccaaaatactcagtaagattgacttgtgtgaaatgggggcttctcttctgtttccccagcctcatatctctcatacctgatcctgttccctttttccccttcccctcccctctctcacccaggtccctccctccctcttcccccttctaagtgtgattgaagcatcctcacttggactgcttgttacacttgttatggtctgtggattctatcctaggttttctatacttcttggctaataccccactcttcagtgactgcataccatgtatgtccttttgggtctaggttaggaaaggagcccagagggccaggagaatgaatagaaatacacagcctcagaggaagaggggtggagggaccctctagaaagtaccagagacctgggaggtgagagacctcaggactcaatgagaatgaccttagctaaactgcccaacaatggggagagggaactcggagagtcctccttcagtagatagacagggcctcaagtggaaggacagggttactaacccacagtcaaaatttctgacctagaattgttcctgtctagaagaactgcaaggacaaaaatggagaagagactgaaggaaaggcagttcaatgaccagcccaacctgggctccatctcatggggtgggggtgtcaccaaggcctgacactattactgatgctataatgtgcttacaaatgagagcctggcacgactgccctctaagaggccctaccaacagctggactgagacagatgaagatacctacacccaaccattggactgaagtctgggacttctatatcgttgaattaggggaaggattgaagaagctgaaggggagggtgactgcataggaagactagcaatctcaactaacctggtctccagggagctcccagagactaagccaccaaccaggcagcatacaaaagctggtctgaggcacccagcacatatatagaagaggactgcctgacctggtctcagtgggagaagatgtgcttaatccctaagagaactgaggccctagggaagggacaggcctagtgaagaggactctcagaggtaagagggaggaagaatgggatgaggaactgtggaacaggggaccaggaagggggagcaacagctagaatgcaaatcaataaaataaaataaataaaattaatggaaaaaacagcaaattttcaaaacttcttagatttcaagtattaaacatatacgatagttatgcttaatgctgttcatgaggttcccatgggagatggtggagaaagtcaaaagtggttgattaattagctcagtataaacactaagtctgaaagttcagatggaaaaaaataagccatctccatttgaaaataagtgcaaaacatttagtcattgtttaattcatgcaataataatgagaatccttcatatgcctgactcatctaggcagcctgtcctgcttaaaaaatggtaaaattgaaagcaaaaaaccttggatttagttagctctatgacttgatcaggtaacttagccttctttgttttttttttttgtttgtttgttttgttttgttttgtttttttgtttttccttatcaactgcataatgtttgctgggctttgtaggaataataagaataatgcatattcacaaacataagttgaaccagcagcataaatgttaattatttagtataatattcaggccaaagagaaagaggtacttgccctttatgcctgtttctttgtgagtattatcttcttggctttgcagggtcacaagcatgaagtagacaccttttctttctaacagttcttcatgggtgcctctttccacagctgttccatgctcaaagccaatgatcacatctgcagatctgactgttgataggcgatgggcaactgagatgattgtgtgtccatgttggatctgtaagaagacaagatgtatctttaaacaagactacacgacagagccaatgctaacctttgtactatccatgagtccacaaggaagtcagctttggaccctagaaatatccttacacaggctgtgcatatatcagaaatagccaacagtgtcttgtagccataaatcatatcacagattgaccttattgtcataattcatcaatagtttaataaaatgaggataaattatgttgcacttcatatgaattttaattttatgttgcatctttggtgagtgaatcacaactatgtcctattcaacactaaatagatggtaattgaccaatgttttacacattttcaggctgaatatattgacctgttagtattactcccttctcgaagaggctattaaaatgaattgactcttcacaaaccttattcagtgctccctgtactttggcctcactctcattgtccagtgctgaggtagccatgtccagaagcaggatcttgggtttccgtatgagggcgcgggcgatggctaccctttgcttctgcccaccactcatctggcctcctccttctccaactagggtgtcaaattgctagaaatcatgaggaagacacatttgatggcatcagacagcgattcagtatcccttctaactttcttctccagtgtgaatttttacgggtccaacttttactgaaagaaacatcctttactgaaagaactaaccaatcaatatttgtatgtgagataattaatacattgaactgtgtgaatgttccttttttttttttttttagttcatggtgaaataaaaatggttagccaaaatgaaaattgatcggtcttgaaaatccatcctagaggactaagttacatgccacagtcttgtctcttttctcatgctgaacacaaagcaaacacaatgctaaatctgtctttatgttgtgaacaaaaaatgaagctgatgttatactcctgctgtcacagcaagtcctgactgaggataagccacagaactaagtccacactgaagtttaacaatggagtgttagaagtcagattcttgactttctcagtatcagccaagaagggctaagctcctcaccactgacaaaaaagcatggtgttgaaattctacatatagaatatgtatggatatgcatctatatatctcatgtagtcctcatagaaccccaggaggcaagtaaccattatttgccttaatggttgaacaaggacattctgaacccaaagggttaaactagcctgcctgaagctcataaagctagaaggtggagatgttggcgttatgtcgaggcagggtagttctaaagcattattctcattagctactaggctatagcatcctcatggtggcaatgctattcaaaacagtgatttagaagatgtgacatttgaatgaaaatggcctccataaactcatagggagtagcattatttaaaaggaaatgtgtgtgaccttgttggagtgggcgtggccttattggaggaagtgtgttactgggagggcaggctttgagaagctcaagccagaccccagtggctatcttcctgctgcctgcagatccatatatatatatatatatatatgtatatatacacatatatctatctatctatatatatatatatgagacctctccagcaaaagggacatttttaaaagatagagctccactttcacagatgctaaccgtatagacagtgtatttttacatgaaaggaaaagcattgggcgtttccaggcataaatctagagcatgccattaagaatttaaggactgaagtttcaaatgaaaaggactaattcttcctttgatgacttctgcactcccctggactgtaggtagggtacctgtggcagggccataatgaagttgtatgcattagcatccttggcagcttggactatgtcttccattgtcgcctcttctctaccaaggcggatgttttctgcgatagtggtggagaacagaactggctcctgttccacgatcccaatttgatctctcagccaccggatgttaagagaacgaatgtcatggccatccagagtcacctagagagcagaagagcatcacacagcttagtgtccttcaagattcggaatcgtgaagttaggtgatacttggtgcctggggagaataaccagagcctaagaataccataatagaagcaatttccatggaactgtgcctgttgtatgaggatgccagtgtgcaattgagctgagtttccctgcacagaaattcattgtagaaacacgggtagtatgaaagttacttaagttctcactgctagcatcagaatgggtacatttttaatttctcaggagagtaaccagttgttcaccagactctgaatatatctattgccttttggcttgtgtccaaaattgtatcaaaggatataataaaagtaaacagtagcctctatcttgtatatgtgctttatggtatatcttgctttgaaatctggatcgtcaaataacactttgctgctcaaagcagttgaaattacaaatgtgagccaaagaaaaaaaaggaaggaaggaaggaaggaagaaggaaggaaggaaggaaggaaggaggaaggaaggaaggaaggaaggaaggaaggaaggaaggaaggaaggaaagaaagaaagaaagaaagaaagaaagaaagaaagaaagaaagaaaatgttaaatgttattacttttttttcaaaaaaaaaaatcaaactggcaccaccaccactggttttcccttacccctccatgttgagaagtttctagaagatacgcaccatgccttcgcaggggtcatagaatctctgaatgagctgtagtgctgtgctcttccctgccccactggatcccacgaacgccgtcgtttcccctggcttaatgaccatgctgaggttatttaaaatctgacaagggaagaacattctttagaaagttcataatgtcactgtgcacctaaccaagcaatgaggccatacatagggtgcttcatgaggactggtgtcctgtatctatgcctcccacataagtgcaaatgcgtgtgcatgtttacttatgccccgtagcactgtccatatctagccatcaacaacaaaagaagactgactggaaagaggctttatcgttagcatgttgcttaatagctgtgccaaacaataaaaatgataatgtaataacactcgtaaataagcaagggtcacctttaaatgtatacctcaaaatctaatttaaaatacatctgacatactaggatattacaaggagtcgatctcaattagttaaataagaagctccatagccaggcagtggtggtgcacgcctgtaatcccagtacttgggaggcagaggcaggcggatttctgagtttgaggccagcctagtctacaaagtgagttccaagacagccaggactacacagagaaaccctgtctcaaaaaaaacaaaaaaacaaaacaaaacacaacaaaaccaaaccaaagaagctcctataagtcacaagtgtaatgataattcatggacaaagggtcagaaataaaccaatttgaagatgatgtctttgtgagtttattatttggataagtttgcctagtaaatgtgtgtgctgtgtttctgggtctaaaactctgtgaagggcatggtctaaatgttagcaggtgagccggtcgtggcggtgcatgcctttaatcccagcacttgggaggcagaggcaggcagatttctgagtttgaggccagcctgatctacagagtgagttccaggacagccagggctacacagaaaaaccctgtctcaaaaaaccaaaccaaaaaaataaataaataaataaacaaacaaacaaataaataaataaatgttagcaggtgaagttaggatttagtattgtgagtataagggaaatattattaataaaaggaaaccagagatgctaagttctggatgaatagtacaagcagtatttcaaagccagtccattcaagagcgctgattggagattcctttagagtggagttacctttaatgatattgccccataggtgctagaaaacaatatatttccctcactgtgagccctggatgatcactgagtccaagatgcaagagagcaacagcaccaggttgcttacctctaaggactaatgcaaagctgctcatagctgctatctctactggtcagaatcctcccctcgttctgccccacctgtggtttccaaggaggtggtaatgggaagctgtgctacttgcttgttttgattgccttaccacatacacagaacggcaggacctgccactcatttcaacagaggaccacatgactcagcccaagcctcgtgccagaccgagttccacccagggagatttgcacattataatcatcactaagaaatgcactgtgtccctaagttggcacaataccaaaggacactttcagagaaacacattcctgtcctctgttccagaaaactgagtcagcacttagaaaagagtgtgtggatctggagatgagttactcaagagtccaaaacatcaggccaaaggtacacactcaccttcacctctggtcgagaaggataatggaaggtcacattgtggaactcaatttcgcccttgattcgatctagcttgtaaccatctcctgacatgcagtccatgacgggttgctggaatgcaatataaagatattgtacttgtgacagtgcatgacacatgcatgttgtatccatcttgatattagttaacccacaaagaaaaactggggctggtgagatatctcagtagttaatagcacttgctgctcctgcagaggaccccagttcaattccccatggtagttggtttgcaatcatccgtaactttgttgccaaggcttctgatattctctttctcttttgacttccacaccaagaatgcatgtagtgcacatacatacaggcaagcaaaatacacacaaaaaaagtaaaatgaataaatctaataaaaaatttaaagcataacctttctaggcaaaatattgcagagatgtctaaggataaatcgcttcaatatttcatatttacaagagtgatgtcagttactacttactgttgaggttgctgagttattattatattactatatgttattattgaatgtgacttttatataatagcagatagttttatttatttaattaatattatttgttaattatcaccataagcttataggttgctgatattctataatattataaaaccattgtttattgacacataaaatacaatattaatatggttaatatttattgtaatgtattatattattgagatgataggaggcaaagtacaaagtgttttaatgtaccctttacatttacatgattgctatgttctagttaggcagggggaaacctctcagagagtttcctgcccagggtaatatagctgaccaactaggctggggctagtagcactacatttggcaggcaatacagatgatgaatacaattaagtgaccacaaaatgatccatatcaccaacttccaactgtaccctgacctggctctgctgttactaatgagacagatctaaaacaaccattctggctaactacatgaggaagggggctgcctcttcctcttaggacactccaggttcaactttgtccatagttcacactagtaataggaattcatgaccatagccccatcagaggttatactggagtctattttcttcttctcaagtgtttaataaagataataaaataaaatagaaatgccttaattctcagctgtttacatggaagctctgcaggcatcatttgatttgagactgggacagaaaagataacattagaaaaggacaaaggggctcaaaaagatggctcagtggttaagagcactgactgctcttctagaggtcctgagtttaattcccagcagccacatggtggctcacaaccatccgtaatgggatctgatgcctacttctggtgtatctgaagacagtgatggtgcagtcatatacataaaataaataaataaattttaaaaagaaaagatcaaagggctggagagatggctcagtcattacttgctcttcagaggacccaaattcggttcccagctcccacaatgggaggctcatggagtctaacatttctgacctgcactcacatgcacagaccatacacacacacaataaaaaacaaaaataaaacaaacctttttcaaagggaaaatatcaacatattccaggtcatggaactcacaacacaaaagagtttcttcaggtagataacaatctcattgtagccaaacaaaaaaacaaaatcaaaatcaaaaacaaacaaaaacacaacaacatcaaaaacaacaaaagccactcagttcaggtgacacgtggctcttggtccccagcgagaagaaggagcagagtcctattttctcccttctgttcttggtctgtggttaccttacaggattttcaatgtctgttcataaattaaccaacactatccacccagggataccaaggtcctttataaatgtaaagagacttcctgctagaagagcatccatgcttgcaggcatgatcacaaggcttttcccatccttccagtctttgccctggatgactgtgttcattcccactggactttcttaactccttgagtgcaccaagctctttcccaacctagatgtttctcaaccaggatttcctttttttttctttttggttcttacttctcaagtctcccattctagccagtcataacaccttgtcctattttatcttttagtggatttagtgctgtctgatgttacccttaaatgtttatttcttgctgtgtgtggtagtgcatgcctttaattctggcacacacacacacacacacacacacacacaaaagccagaggcaggtggatctcagggccaggtctatatagacagtaccagactagccaggaccacatgtgagaccctgtctcaccaaaactgtttcttttctttttctttttctttttctttttcttttttaatgggcatctcccagtatgacagcaaggacataaagtgtcccagctattgggacctatccaagcacataccccattaactatttcttttgacttttacgtaccctgtctattgtttggaaaatactggaagctgctgaacacccagtggagaagatttccaaacaagaagatgcattgccaatattcatagctgctattatgacacagaggaaaatctggaaaaaaaaataaaacaaaaacagaaaacaaaaaaacaacccatagtttgcatacatttttgcagtttatagataatgacatttaccatttggagtgtccttacgagttctcaagatttctcagaaatattattaaagtcaagtagtttaagggcttttcagaaatatataaaagttttggctttgtaaagaatttctccatagttaaaatttaaaatacctcgtttaccttcgacagagtggaagaacggagcgagcaatgcaaacaggcagagaagaacagttcctgactaagctttttaaagaccatcctctccagtgacctcagcaaagcaagccttcctgggtcctagatctgagcccagcaaacacatattataaaagcccactaataaacagttcaggccatatgagttttgaatccatgtgtacccagaccacatggcacataagtaagagtagcaatgtgtaaataaatgaccattgctatgtctcaataaaagtgtatttatgaaaaaaaaatggataaggaatatatttgcaccagtgactcttttactgagtcattggagtcttcaattgaaaccagggtcaaaccttggcttgaccttagcctggctttatataaagctattgcctcaagcaattttctctatggaggttcttagagaatccaggagtgagaggagacagacttatgcccaatatgactggagtcaatgggacatatcccaggcaagatgttctcaccagaaatcccacatctgtatccctatgcaaggaaggtaagaagaacacatgggccacccttccagggagttaggatctgtatctcttaccacatagacctggaggcaggaaggtcagctaatgggacagtcctaagtcactgggacctgagctcaagtcatacttgatgcctcctagcacatattaattaacctcacagctgcttttcatttttgtagtagtagaattacagcaccaatcacagaattaagtaatgcatattatttatggtaattacattaaacacctcgctcagtgcctgatgccttatatgcaccaagaaaatactgttttctattactgccattattctttattattgaaacctaaaatgtaaataaaaacccaagatttccccctcattcagttcctcttcatctttccctaatagaccagaaagcaagtttttatctgtacacaagtgatactaattacagtaatctatgtgagctgcttctcattacacccaatgcagtcataataattttgtgcaccacaaaatgtgctagattaatttgattgttaattagtttagtagcttaaaacagtaaactcaactcaagaaactcaagaatattcagcttttaaaattgctgtgtagaaatataaccaagaacacacacacacatacacacacgagaggcagagagagagagagagagagagagagagagagagagagagagagagagagaagagagaatatcattaaagagagccttaacaaagaagcagcatttatccaggtaaagggtaagcagagtattatagcaagaagttgagaataagagggttgtaattgattactaaaacattagagacacatggtatgctatgtctacacacagtaaactactttaaaaaccactaaatgacaaactcctcaggaaagatctagtagggatgttcaaccaatgttgccaacttcaaagtccatacaatcaagttacaaaacaaagaagtacccctcaaaatcttaatattttaagtaagtttagaaattgtgttggcccaagttcatagctttcattggctacatgtgggtggcaggctggacacacatgataggtggtctcatggttgaacccccaggaaacttaaaaaaggagaaccataaaactagaatctagttgctatagtgtttgaatgagaatgaacttgttaggctcacatatttgaatgcttccaacagttggtggaactgtttaggaaggattaggaggtgtggtcttgttggaggagatgtgtcactaggagtgggttttgaggtttcaaaagtccatgacatttctccagttaatgctctctctctctctctctctctctctctccctctccctctccctctccctctccccctctctctttctctctctccctctccctctccctctctttctctctctccctctctttctctctctctccttccctgatgctcgaagaacaagatgcaatttctttagttactgctttagtgcctaacttttgtcatgctcctaccatgacagtcatggactcagtctctgaaattgaaatcctccaataaattctgtcttctataagttgccttagtcatgctgccacttcatgactaaggtgttctagtttgattttttgttggtgtgacaaacaccatggtcaaaaacaatctgaaaaggaaagagtttactcagcttctaagccacagtctattactgaggaaagctgagacaggaatctcatgatctgaagcagataccacagaggaattgcttgttctccattggcttgttccctaggcttacttagcttgctttcttctacagcccaggaccatctgtctaggaatggcatagtggactatgccctctgatgtcaattagcaatcaaaaccatggatcaaagccatgccctacacacatgcccacaggccaatgtgatgaaggtaatttctcaatcaagggtcctttttcaggtatgtaaagttgacaactgaagctatggcacacagggacttttactcagagctttctgttggaattgtgtatcatttaactttcaatttaccaattcacttctcctttgaacttttattcataaatccctctttctgcttataggcacagaataaaagaacgattttgctcagtgaaaacatttctacaaagtgaacagccaaagctaacttcagctactgatacccttggtgggtaaatgtatacagcttttaaattattttcattacatttttttgtttgtttattaggggctgcttgcgtgctgcaatgcaggggtgaaggtgaaagaaggacctgcctgaatcagttacctcctctcttttgagtcttgggaatcgaactcaggacagtgtgcttggcagacattcattggtgctcgccagcgccaatgaatgtctaaagcttttagaagcaattagatcgataaagagaaagaacttcatagtcagatctcagacctacaatactttaacttttccgatgtgcaaaattagatctaagttgcagagacaattggtaggttgtgatcccattaacactttccatactatcattcaaaatctacagaacacctgaacatgtgttatcacattcagtatttttaaacaaagttcaaagctactccagatgtccatccgtcaaagacaaagatgacttaaaacaatcttgttgcttccttatcttgctcagagtgacatgtattagttgatcattcccatcgacaatgaatctcctggttcccctagagctgggtttgtaataaacagtggcgttttgaatgataaaactctcatgtaatgaactcctggtacttttcattgttaaagctggtgccttcctatcaagaatcttcagctgtaacattttattttatttaaaaatcttctatgaagggatttccagcaccacagcaaatgaaaagtgttgttgttgttgttgttgttgtttgtctactgtgctttggatggatctggcacatagcaaacgctgggtaaatgcttgagtgaatgactcaaagaacactgtgaattaaagtagctataatgttcgtggtgtcataacatcccacaaaagaattgtgaaatatgcttgtatcacctattccgttgaagacgttacatatcttgcactattactaactttgcttttatgacctgttcacctttagctgaggggttaatgacttgccattttcatggtataatttcttttgggatcaggtggaggatcattactgtacagctgtaaactctttagttaattgggaatcattaagttactggtctcatcagaccacgagttcaacttctcttcactaaagtgtcctagtatcattggccctgcagatggacttcagcaaacttctgaggcattcttgcctaagacattaaagggattaatcctctgatgacttttctgacaagctagcaagaaagactatatataggaaacaagagcaaagtacctggatcagtgtccctggtgtgtactcgccttcatccaggacaagtctggagccgtaccagaaggccagtgcataacagaagaaaatgagacaccacatgtacccagtgaagaagcccatcaccattcctttccaaattccccagcgctgagcaaacataagatttttctcatacctgtaaacagaaaagggttggctcaacaccagccagagcagcttaaggcctaaagcttaaaatgttggtgtaagtgtgtgagagagagagtgtgcctctgtgtgtgtgtaagagagagagagagagagagagagagagagagagagagagagagagagagagagagagagagagagagagtcagagtctgggtgtctgtctgtgtctgcattcatggtgaagaatatcgttcagtgattatcgtcaatccctgaaacaaagcttctgaagttggttgaagcttggatgagaaacagtgggtaactttgactccaagagaaaataattttttaacaaatacctttgtttgggagctattaaaaattatgttgaaaaggtttctttggaagataaatcatttttttatcagaaagtaaggcaattatctccaaaccaacagattaaactagtcagcatggtgaatcccaggccagtgaagaccacatgagactgtgtgtcaaaaccaaccaaccaaccaaaaagctcaaaaaatattaactaaattacaaaaataaatgcatttttctttctctctttctcttcctctctctctctctctttctttctctctttctttccttctttctttctttctttctttcttcctttctttcctttcttccttttccttccttccttccttccttccttccttccttcctcccaaaacagggtttctctgtgtagccttggatgtcctgaaacttgaaacttgtatagacaaggctggtctcaaattcatgagacttgcctacctctgtctcccaagtactggaattaaaggtgtgcaccaccactgccctaatataaaatcatatttttgacaactgtataattttgcaaattaagtttttactttattaaaaattagtctctagaatgatttatcataatttactgatgttaaattctgtttgcttaaatgaaaaattataaaagttattaagggcatttaacagcacaatacttcacaattcaattaaatgttcaatttaaatatgttcgattaaagaaatgttatggggctggcaagatgacccagtgagtaaagccaccaagtccaaggactcaagtctgacctccaggtcccacatagcagaagaggagatctgactcctgcaagctgtcctctgatcttcacactcctgttttgagcacacaaccctcccttcttccccataaaatataattttaaaatttgaaaaccttggaattgcatttggatcaggttaccctttcttccttccttccttccttccttccttccctttcctttccttttctttccttttctttctttctttctttctttctttctttttttattttatttttttgccacagtgtatgaacaactaattttaatagatgcctcagttccctttgtgctgggatgacagacatgagtcaggctcttttattctttgaaactgtaaattaaattatttttttactaataaataaaaacaaagcatcacatacacacacacacacatatatatatatgtatagatggaataaaatgtgatgctttgatgcatgtacatattgtataatgtttaaatcaggagagatagatggatggatagatagatagatagatagatagatagatagatagatagatagtctcaataatttatcaactgggtatgggagcaaacaagtgattctagacctagggagtcagaggtgggaagattccaagtttaaggacagccatggctacatagcaagtcaaagtcaggctgggatacctagtgaaaaaacaagaaacaaaagacaaactttaaaacttcgtctttgctttttgaaatatgcagtacattgctacttatagttgtactgtgtttcagcacatcagaactttctcctgactgaccataacttcaaatcctttggtcaccctttctctgcccatctctccttgctgctctgtgcagtctctggcagccatcattctactcttaacatctatgtcatcaacatttgtagattcctcatatgtaagtgcaattgtgcagatctttctaagcctgccttattcactcgactatgcacgttgtcacaaacaatgaaatgttgttccttttgtgatcaaattgtatcattgatctattaattgacactaatgtcacctctattccttagctcttatgaacagcactacagcagacacaagagtgcacatgtctattacacagactggtttcatttcctttgggtatgttcccaggagtgggattatagaatcacatgattgttctcattttaatttgttgaggaacttctttgctattttacataatagatctactcatttgcatgtctaccaatagtgtgcaagggctccttcatatcctcattggatatgttagccgttttgccaacatccattcttactagggttagtattgcatgctggttttgaactgcatttccctggtgactagtcaccgtgatgaagcagttttaataaagacttgactatttgtgtgtcttcctttgaaaactgtctacttaaccctattgttccttttcaagttggattaatcattatcttactagtgagcttttaaaagttccttacatattttctatagctatcccttgtcagatgcgtcgtttgcatatagcttctctctttctgacggctgtcttttctgtgagctgctgctgttgtacctgggagctttgtaacatgatgcagtatcgtttgtttatttttgctgagcttttcatgtctgatgcatttctgtgctgtctgtgtagtctgatgtctgttaaccatgtagacatgcttactaagcgcagtagattgtctttaacggcagaaaatgctgctgaaggttgacatgaggtataatatattcgcttttgtatcatcagtgttgaaacgagtttcttgcttatttggctctctagatctcatcttcagaagcatactgtattacgcatgggagctcatacctttcagtctagtactccggtgactgaggcagaagaccatgagctcaagaccgccatggtctatacagcaagatccacaagggaaactgaaaccccaaaacattgctctaggccttctgtaacactctgcccatcaacatttgccaatccacctcttaaacaaatgcccccgacccctcctgttgctctaaatgacagtggatctgccactttgtacaaaatgaaaaagaaaagaaaaaaaaaaaggcagggaactgtattgcttcatgaaattcaggaaagccacagacattcaaaaataaccaacctttccacctccttattctcaccaccaaaagcagccactgttcgaatagatgagaggacttcatcggcaatagacccagctttagcataagccttcaactcaagctccgtgaacttggccacactctaaaatccgaagaaataaaaaggaagttggcctgtcagtcagtgattcatctaacaaaatgaacaggtggtgtggtttaacaaaacactaggtgtttcattgtaacaaaagagagaaaaagctggttcaagatgggtgcttggattggggtatgttaaaatgagattaaagtctatctcaatgaaaatgttctcatagagttaagtactctcaagtctgggaatactaatgtttcagctgttgtgctaatggtgtccctaagtcaaactatgatgtatcccttcacaattggaaagaaaccattgcagaatttacaaacatcagaaaaaaggactggaggcctatgtaagcatatggttggctagagtagagagggagagcaaggaccaggatacacagacacagcattgcaaagggaattccaaaggagaaggcattgggtgaatattttgactcaaacataaggggtttacgacctttttaatgtttacaaaagaaaaaaaggcaactgtgttcagcaatttttcaaaagtcacctttctaaaactgagtttggactgagtcctagtcaaaaatagctggacatggcgacatatgcctacaatcacaccagggaaatgctgcagaccctctgggcccctttgtctgcatggaatgggtctctagtcgcaggtgggcaaagcgttggatgaattgacagacagatgcactcaggagaagttgtgtagaatctgaatgtaatttgtcaaatcgagcatcaaactttttatacagaagacaatagggaagttgggtgacatacccgcaaggtacaaagaagttactgaattcttacataaaacagaggaatgcaaacacagaaggtctaacaggaaccacctgggatagaattcattgatagcaactgggatcaacaagggctccacctaagattcacttaatcttagaagccagggtcaagggcttcgtgcccttgccatagttcttattttagtctattgtatagtccacctttcccttaggccattgtaaatacgtgtgtatgggtgtaactcagctatctatagttctaagtatctattctggtttctccttaggtctgaaacttccttcttcctagatgatggtaaattcctgtgtacggcagtgacctagcttttattcaaagtgatagtgtaatactagaggctattctgaatgtcactgaataggcaacattcttcctgaattccaagcccattgtctgctcaaggactttctaggactgttggaacactggcaaaggctttagctatgtcagaattcaatcttaaaaggcacttataataagataatactaaaagagagcacgtggatcgatacaccagactaatgcgggaatagaatatgagtatatgggttaaagagaacgtcagactccaggagtgagtttctgtgaaactctctgtctcatgagtggcttttaggcctctcggcctgtcaagctgacttgacaggagtgcgtggcagggaaacaaggattccggggtaaccccagctacatgagagcgtagtcagtctgagatagatgagagcccatcagaaccaaagccaaccagccaacaacaataagaaggaagggaggaagttaatatcgtggaacagcacttaactcagaaatctaagacacatatagtactcagatgataagagtatatattctaacagggttaaatttttctagatctttagcagaactgtgactagcaaaatattagacagagtttataaatacaaaataaatgaaaatagcttcaacaatatatttattatttgctcagtctaaatttcataaaatctgtaaattaaaaagctgttttccccaacagcgctattcatgttcaagtttgatggatgacatttcaacttttatcccttctctatctaatttattcctgaaacatatacatttttgcacagtaataaaaatattaaagagttatgagtgatactacctttactgagggccacatttcttaataataggacacattcatccaggtgatggtgacacacacctttaatcccagaacttgggaggcagagtcaggtggctctcagtgaggtggaggccagcctgatctacagagtgagtttcaggacagccagggctacacagaaaaactctgttttgaaaatcaaaacaaatacaaagaggagaacatattgggattttaagaaactaatattttgtaatatttgataattattcatatttctcatattaaagaggaagatgtgacaaaaccatacaaaacccacatctgctgttactgtgtcatatgttgctcctcactgcagtgtgtgtgtgttctgtctttgacttacacacaacaaagttgctggtatcatattacagggatagccaagcatagacacagatacgaagggagttaagtgccgaactagaacattccaaatgaagaggctagactcttaggcactttggtggcacaagaaattgtactgtgaagtctggctcaatccaagtttagacacttgttccacctccatggtgtgaaaacacagcggtgacccatgagcatatgtgtatgaatttatctcagggacccatgagtatatgtgtattaatttattacaggtttgaagaaaaattaagggtgactatagaaagaaaaataaaagctgaacaaaatttttcagagtccctcagggtcgtcagtggaatttgaggttctctggagcaaggcgggacagcggtctgtcggaaagccagttctaaagcttgcatagtcctgtggattttaaaaaagtactatactatctctttaacaatagatttttgtgccagatgctgtacttaatgtagaacctggccatcacccccaagttatcccacgatttaggctgtcacccctgtattgaagacaacagtactgaggctctgaaggggtgcacatgttgctctttagtgatacacacttgttagcggtcaggtccggtggttttgtgacgggagctctgaaggggtacatgtgttgctcttcagtgatgcacacttgttagagggagttccttgctactgttactcttagccctttcctgtatcgcctgaaaagtgtttacgtgtgatgattagttgctgcatggatattttactggaaaccatcactgtggtgattattagctgctgttcaatgataactaagtattgctcacatgtttcctttgcaatctattaatagtaagccttcagccagccttacaccatgacctgtgatggtcagatttttttttttaaaaatatgttctaaagataaaaataataataataatactttctgcaagcaagggagacatttcactgcagtgatccccaaactccaatttctacacttgggcctggcctgagtaactgaggtaacggatagatattaacagagaagacgctctaaccaaatctacagatctgacccagaaactgaactggggacgcggctgcaaagcaagaaatctttttggagtactcaatgctggtctgactgaatttgtgccatcttgaacattagagtatagggggcatagggtctgctggagagtgggtggggaccaggcatcaggctcccttgaactgctagatagctccctttgcttctctgagctccatttattgactcttattgatgttagcatgttccttctttgtaagaattagagatagtgagtgtgaaacccctggcaaaatagaagatcctaaatccatacagtagacttctgtcctccaaataacatttaccttactaaaacatcgttatgcacatgctgtgggtcattatttaatactgaggagtaaccaagcattagaaatcaatatagtgatcatcacattgactatacttgttgaaggcatccacgaatcatgttttggccttttggtgtaaatgtacatctttccttgaagcgaagttaaaaaacaaaacaaaacaaaacaaaacaaagcattcttaccagacctatgacggctgccccaatcccaatgagaggactgacagcgagaatcaccaaggttaatttccaacccctgtagaaccctaaaaggagcccagacaaagctgtcgacaggcgctgaaggaaaagggccatctggtcggcaatggcttcatcaattttattaatatcactacaaataagagaggtgtagatcaatacgactgaattctgtcagttcactttctctttctcatatgctgctgttctgctgttactccttagtgagaagtgagaactctgtctcgcaccttccagaatttctcacaccttatagtcagtcagctgtgtgcatctcaactctgcacactgatgtggattccaaacctctggatcattcccaggaaacacttatatcacctcattacatagccatagcaaagaaattaacttgtatgtgtctgtctgtctgtctgcctacctgtctatctatagatctgtctctgtatctgtctgatctctctgtctttctctttctgcctctgtgtgtgtgtgtgtgtgtgtgtgtgtgtgtgtgtgtgtgtgtgtgtgtctgtgtctgtgtctgtgtctgtgtctgtctgtctgtctatatttatcatattctatttataggcagtagagagagactggtggcatataacacagactctgggaccacactctgaatttgaatacaagttcttcttgggaaaattattcaagtttctgggtatcgattttctcaaatataaaaagatgatagtagcaggtcctgccttacagttcagtaattatatgcaagcatatataacagtacttagtgtaacgagcaccaatttttgctactttggatcacttctttgcttgctaattttatgcctcctaccagaatcaaggtactctggatcttcagagccgagatggaaagtattgtggaatagtgattgaatataattgcataaacctgagagaattgccttaatttctcgtctggatggagcaaataggttggtatttaatagcaagaaggaactcaagacatcgcccagaggttaaccattgtattctagtggggttaagcatctgttgatagtcacagagagtggagggaaaggcagtgctgggctctagacacccaaacttccattctaacatcactggcagacagcataagcatgagttcttggcctcttattcaaagaactaaaaatagtggttcacgtaaaattgcaaaagaagcaagatagctttgttcaaactgaagtgatagcacagggaatagactgtacaggccatatagtactcaggggccccatgcctcatgtcctgagatctgacttctgtgcgctctaaagaaaagagaggctggctactacggggaaatagtttggatggtatttttattgatagattttgacactatttattctttcacactagacatgtctctttctataatgcacctgactttaatcatatgcatggccagttattcacaagcataagatggtagatagaggatcttccctaaagtttgcccaaggacacagttttgatttactgagcagattctcaaaggcacttcaagcccttctactctttatacacagatagacttttggtagaaactgtccaaatatgatggttgttaaggtaagagaaacttctccattttacagagatctataagtgtagtcgatacaggagggagtctggagttgttaggaatattgttcagaggtagaggggtgtgtgtttgtgtgtgtcctgaaagcaaagaagttaggctgccaggtacattgttgtacaagggaggcgatgtatatcccaaacctaacagagtctcaagttaccaagcgttcctgaggcttgcctccctcatatccttcacagtatatttacagactttggcagggcttcaagttcagttcaggagggtccaactactttaagctgtctttaagtctgttgtttgcatagttttttgtttgtttgtttgtttgtttgtttttaactttctcaagctacttttagaatttatttgggggtttctttctgtgcctccatagacatagcaaaagaatggtttctatgtgtgttttccccatgtgtgttgtcttatccgtctctcagtttcactgtatgtcaaataacatcatatttctaaaccctctcctgtaataagtcacacttaacatttggaccaatgttctatacacaaattctagtaccctgttattttttaggaactatagtttaagctaatatctatgaaaatgccatgcctatgaaagtataatttatttttatttataaaaccaaggtgttatgtgacccaggctggccttgaataccctgtctagtcaacactggcctcgaacttctgatcatcctgcctccacctcccacctactggacagccatgggcagtcatgcttgccaatctacaagacagagcaaatcaaaatgaaactgaaaattttatcaaattgttacttaacataaccatgaggggttcttttcgcaatctaaataagatattataacttagtagcacttgctacttactcagagaatcttgaattgagctctcccacagaagtgcagtcaaaccatccgatttccattctcattattctccgaaagtaaaatttcctcattttccttatctgacgagccccagtgattacccacaaccttatctggaaacaaacaaaggtgtgtttagcactgtagcactaaacaggttaaacagatttgtctatactttctcctatttctgaaaaatcgcacttcccgtggttatggttgggactagctgaaaagaagagtgaaggcgttgacaaagtgcctctcttgggcactagggtatgagctctgatacccctgctaatggggaggccagctgacatttgtgggggtggcaaggatccagctttaactctaattctggcaggaggacaggctgctgtctttgcatttgacctattgggcttcactgtctccatcaagtgaaagaaattcacaacgcccacactagaaaatggatgatctacattcattcactttgcgtaacccttctcggctttctccttctgtgtatacacctctaggcatccatgcacagtgttcaagaaatgatttggtcaggctctggcagaacctctcaggggacagctataccaggctcctatcagcaagtgcttcttgacatcaacaatagccactggatccagatgtgctggatccctaggtggggcagtctctttcattaagtctctgctccactctttgtccctgcatttctttttgacaggaggaattctggattattatttttgaggtgggtgggtggccccacccctcaactgggggccatgcctatccactggatgtggtctctacagattctctctcccctttgttgtgtatttcggttaatgttctccctgttgactcctgggaacctcttgggtctctgacatctgaaacttcctagtggctacccccaattcagatgtacgcggccaaacattggactgagcttgaacccatggctccagctggatatgtagcagaaaatggccttatcgggcatcaatgggaggggagccccttgatcctgtggaggctcaataacccagcataggggaatgctagagcactgaggcaggagtggatgggtaggtgggggagcacccttataaaggcaaggggacgggaggggatagagggtttgtggaggggaaactgggaagggggataacatttaaaatgtaaataaataaaataaccaataaaaaagaaaaattatgtggggacaatttaagccaaaagtcatgatccaagtagatctcatttgctgatggatttccactaatttaaaaaaaaaaaaggcatcatgaaaatggaagccagaataaaagatggatcagtttctctttagaactaatgctagctgttctcatagaataagtgagatggagtgatcatttcttttttctacagaagataacaaaatgtggaagatttctcttagttaataaaatttttatcatctaaggctagaaaaaaaatgagattcaaaattacagaatttggactagaaggacacttggttaggcttcggcaaagaaagaggaaaaaaaactgttaggaaaatagattttgctttcttgatctctcctcaaagtctggttctctccataatcctcagctctagcctacagacactaactacttcactgagaagagcaaggcagatgggggagatcagacaggcagcaacttagcaggaaatgtctacccctcccttccccaccctcaccccatccaaacccacccctggtggttgcacatgcccacttttcctgcctgcatgccctgttctctgcacaatgactgctcggctgtcggaaccttccccactctctcagagctttcatatgcagaactgagtatttcatcgtggtgtcttcaaagccagatgtctgtctgttactagaacggaggtgctactaacttgaaagtatcctaggataaggacagccacaccaactcctgcgtagatgccagaaaatttgatgacttcgctgttaatgtccaccaaccttaaaaagaaggaaaagtactgagatttacaagtaggatccaggtatcaaaggttgtattggtagatttagagggctttgaaataaacttgctatacatttctattaaatgcatgcagagaaaagttttaacaagccagttgtgctgtctggaaagacaattctagaaagaagtgagctgtcaatgaagagcttaccgttgggaaggtaaaccagattttcaccttctccatcccagaatggcattttaaaaacgtgtttgtcatattcttactggggagatggcccttccccattagccctagctttctgctggttacatcccttaaagtttttcttactagggttagttcagaaattgaaagaaatacttgcaggggaatcctaagatgtgtccttcccttcctcggagctgtcatgctatgacacagggacttggcttggtgaaccaggaaaggggtggggaggtgggggagatactctaaaactgctttcaggaaataagggacttttgtagtcagagaaatagcaagttgttttgttttgttttgttttgttttgttttgttttatggcaatgctggtctaaatgacagggatcctgtttatttaggaaaggaaagaagacggaagaggaaaagttctttttagtgagcatgcactcatactgcatgatttatggggtctaccttcctctgataacctgagcttctctttcatagaaaggaaggaccattttctcttttgtgggttgtgcttcacatttcaagtatagaatctcagggtttggcctagaacatagaagtgatctcatatacagtcataaaaattgatagtttaaaaaaatatttaagtcagtaggtcttttgggttcactttctttagtgtttacttttacctctgcccctcaaagccctagttgccccaatatcataccagaattcatctgttctccattgaattcctttcatccttactttaaaaaaaataggcatacttacttttgtggacatatttcttagtaatgtctaacctccatcaatagtaagcagtctctgttgctacagttacaatggattttgacatttggtagcttattttgttttcaatgaatttagttctgctcttttgcctttcaatacaaattttaaaggaatcttgctaatactgtaattaaagtaagtgtccaacaattcctcagtgaagaaaatacagcgtatgtgatggtttgtataagctcggtccagagagtggcactagtagtaggtgtggccttgttggagtaggtgtgtcactgtgggcctgggctttaagatctcatcctaactgcctggaagccagtctttcactatcagtcttcagatgaagcctagaactctcagctcttcctgtgccatgcttgcttggatgctgccatgttcctgccttgatgatgatggactgaacctctgaacctgtaagctagccccaattaaatgttgtccttttaagagttgccttggtcatagtgtctgttcacagcagtaaaaccctaactaaggcagtatacatatacaatggaatactattcagactttaaaaggaaggggacaacttgtcatttaaaagcccagcataggaagtggtatcatacaatctcacttacacagaaagtctgaaaaagtggaaaccacaggaaagaatgaagtactggtatccaggaactaggagtgatgagaacagaattttatcaaaagatagaaactgttcaattcccagaaaccacatggtgactcacaactgtctgtaatgggcatctcaagttgtcttctggtgtgtctgaagacagtgacagtataaacacatatatgaaataaataaatcttttttttttaagatagaaccgttggtagcaaggggaacaagtgtaaaagttgtattgcacagcacaccacagttagtgatggtgtctttgtatctgagaaatgctgaaggaaggattttaaacgtttttatcacagatggatgttgctagggctggagagatggctcagaggttaagagcactgactgcttttccagaggtcctgagttcaatacccagcaaccacatgggggctcacaaccatctataatgggatcggataccctcttctggtgtgtaaatctttttaaaaaatgtatgttatggagggacccatggctccagctacatatgtagcagaggatggccttatctggcatcaatgggaggggaggctcttggtcctgtggaggcttgatgccccaacatagggggatgctagagaggtgaggtgggagtgggtgagtgggtggaggagcatcctcatagaggcaaaggggatggggatgggatgggggttgtggaggggaaaccaggaagggtgatatcatttgaaatgtaaaagaataaaacgattataaaaatgtatgttttttgtataattatacagtatgtataatgatataagtgttaactagggtacactccacaatgtatacatatgtcaaaacacctcattctacatgcaattttagagtaattaacttaaaatttttatccaaggtattagcaaccagaacagatctaaatcctgtaaagaaactgaatcaacaatcaaaaacactcagcaaggtaaaactcaagactagatggcttcactgggaattttaccaaatagttaaatattaatactatttattttaagacttaaaaaaatacttgaaagaaacacttccaatttcgttctttgagttcagtgttgattacctggttctaaaataatacaaaaaatgcctagtagtacacgctgatatgtctagtggctatagtcacaaaactctcaacagctagaagactggggaatgctgagttgctaaagtgcttgccacatcagcataaggacctgactttggtccccacgattcacataaaagcgacctacagctgcatgtacctgtaaccccagcactgggaaggcagaggcaggaggacctttggcaccttctgcccagctattgcagcagaatccataagctctgggttcaatgaaaggtccaaactcacatgaaataactagtgagttctcggtgtcccagcaaagaccttcacacctatccttgtacaaatgaccctggttacactcagtgggtcccaaagcaaaaacaaataagcaaacaaaaaccaaaaccaaaaagccatcaaatgggaccagcacataatggcagtcggggaaagggagggcaggaatataagaagaagaactgagtatgcaagaatgggtatacccagagtgtattacatatatatatatatatatatatatatatatataattcttacagcatagattaattttaaaacataaataaaaataaggtggagggtgattgacaaagatatctaataatgacctctgctctctatacacaccgtacatatacaagttcacaaacactgatgtgtacacatacacagaaatgcacacacacacacacacacacacacacacacacatatcctaaagaaaacattgacaaattaattcttagagcaaatgaacaggaccatccatcattactaaatacaatatatccctggtgacttaacatatgaaaatcaatcagtcatataggtcatatgaatactataatgcaccaaaaaaaaaaaaaaccctcgtggtcttcataatacagaagtttttgggcaaaactcagtactgcttaaggattaaaaactcctcaaacaaggaatagaagacacccccctccccccattataataaaagggagttgaaacccattttagctagtaccattctcaatgggaaaacacttcaggaaaaagagaaagtgcacactcacacagatcctgttcaatgctgtataggaagactagctcagagcaattagacagaaaaaaaaataaaactaagaaaatacatcttcttattagaaatgaaatactcttgtttccatttatcagatgacatgaccttatatagaaagttctagagaatccagtagaaacctatcagcacgaatgaatagcagaactgaattttagaagccaaaatcagcacaagtaataaattgtaaatctatgtaacaacagtgaaaatctgaccaaggaatccagaaggtaagttagcctataagagcaccaaaaggaatggaatacctagcaaacaaatttaatagtacaaaatgtatattatgaaaattataaaaccctgttgtagatgacttcaataactgaattccagagaacaatattctcacaggttgatttatagagtcagtgcaaccccttgtatgctgccttatttctttacagaagttaaatatactaggcctcaaaattatataaaatatactaaaggcccagaatgaaaaagaaccaagttgagaggataggtgtctgcccggcccgggagggctttgcatgaacatctgtggaagacatcttggttctgggactccaccaagaatagtctgcacagctgagagtgtggactacagaagctaacagcttctgggacaggcgggagccacagagcttctgaggcagcccccttttcaggctccagacatctgggcaccttccctgccagaggaaaggtgtccgccctgctggagagggctttgcaggagcacctaggggagctatcttagttccaggatccttctgaaactagtctatgcaggtgagagtgtggactacagaagctaacagcttctgtgacaggccaaagcaacacagcttgtgggacagggcctgttttgggccttcatctttggccaggagggaggtccgaacgccagatatctgtgcaccttccctgtaagaggagagcttgcctgcagagagggatctgaccactgaaactcagagaagagagctagtcttccaggtctgctgatagaggctaacagaatcaccagaggaacaatctctaaacagagacaactataacaactaactccagagattaccagatggcgaaaggtaaacgtaagaatcttactaacagaaaccaagaccactcatcatcatcagaacccagcatttccacttcgcccagtccagggcaccccaacacacccgaaaagctagacccggatttaaaagcatatctcatgatgatggtagaggacatcaagaaggacttaaataactcacttaaagaaatacaggagaacactgctaaacaggtagaagacattaaagaggaagcacaaaaatcccttaaagaattgcatgaaaacacaaacaaacaggtgatggaattgaataaaaccatccaagacctaaaaagggaagtagacacaataaagaaaacccaaagtgaggcaacgctggagatagaaaccctaggaaagaaatctggaaccatagatgccagcatcagcaacagaatacaagagatggaagagagaatctcaggtgcagaagattccatagagaacatcggcacaacaatcaaagataatggaaaatgcaaaaagatcctaactcaaaacatccaggaaatccaggacacaatgagaagaccaaacctacggataataggagtagatgagaaggaagattttcaactcaaaggaccggcaaatatcttcaacaaaattatagaagaaaacttcccaaacctaaagaaagagatgcccataaacattcaagaagcctacagaactccaaatagactggaccagaaaagaaactcctcccgacacataataatcagaaaaacaaatgcactaaataaagatagaatattaaaagcagtaaggtaaaaaggtcaagtaacatataaaggcaagcctatcagaattacaccagattttcaccagagactatgaaagcaagaagagcctggacagatgttatacagacactaagagaacacaaaggccagcccaggctactatacccagccaaactttcaattaccttagatggagaaacaaaagtatttcatgacagaaccaaattcacacattatctttccatgaattccacccttcaaaggataataacagaaaaaaacaatacaaggacagaaaccatgtcctagaaaaagcaagaaggtaatccctcaacaaaccaaaaagaagatagccacaagaacagaatgccaactttaacaacaaaaataattggaagcaacaattacttttccttaatatcaatggactcaactccccaataaaaagacatagactaacagactggctacacaaacaggacccaacatttggctgcttacaggaaacccatctcagggaaaaagacagatactacatcagaatgaaaggctggagaacaattttccaagcaaatggtctgaagaaacaagctggacttgccattctaatatctaataaaatcgacttccaacccaaagtcataaaaaaagacaaggaggggcacttcatactcatcaaaggtaaaatcttccaagaggaactctcaattctgaatatctatgctccaaatacaagggtagccacattcattaaagaaactttagtaaagctcaaagcacacattgcacctcacacaacaatagtgggagacttcaacacaccactttcaccaatggacagatcatggaaacagaaactaaacagtgacacagtgaaactaacagaagtgatgaaacaaatggatctaacagatatctacaaaactttttatcctaaaacaaaaggatataccttcttctcagcacctcatggtaccttctccaaaattggccacataattggtcacaaaacaagcctcaacatatacaaaaatattgaaattgtcccttgcatcctatcatatcaccatggactaaagctgatcttcaataacaaaataaataatagaaagccaacattcacatggaaattgaacaacactcttctcaatgataccttggtcaaggaaggaataaagaaagaagttaaggacattttggagtttaatgaaaatgaagccacaacatacccaaacttatgggacacaatgaaaacatttgtaagagggaaactcatagctctgagtgcctccaaaaagaaactagagagagcacacattagcagcttgaaaacacacctaaaagctctagaacaaaaggaagcaaattcacccaagaggagtagatggtaggaaataatcaaactcaggggcaaaatcaaccaagtggaaacaagaagaacaattcaaagaatcaaccaaacaaggagctggttctttgagaaaatcaacaagatagataaacccttagccagactcactagagggcacagggaaagcatcctaattaacaaaatcagaaatgaaaagggagacataacaacagatcctgaagaaatccaaaacaccatcagatcctctacaaaaggctatactcaacaaaactggagaacctggatgaaatggacaaattcctagacagataccaggtgccaaagttaaatcaggatcaagttaacaatctaaacagtcccatatcccctaaaaaaatagaagcagtcattaatagtctcccaaccaaaaaaatcccaggaccagatgggtttagtgcagagttctatcagaccttcaaagaagatctaatcccagttcttcacaaactattccacaaaatagaagcagaaggtactctacccaactcattctatgaagccacaattactctgatacctaaaccacaaaaagaccctacaaagatagagaacttcagaccaatttcccttatgaatatcgatgcaaaaatcctcaataaagttcttgctaaccgaatccaagaacacatcaaaataatcatccatcctgaccaagtaggtttcatcccagggatgcagggatggttcaatatacagaaatccatcaacgtaatccagtatataaacagactcaaagacaaaacccacatgatcatctcgttagatgcggagaaagcatttgacaaaatacaacacccattcatgataaaagtcttggaaagatcaggaattcaaggcccatacctaaacacaataaaagcaatctacagcaaaccagtagccaacatcaaagtaaatggtgagaagctggaagcaatcccactaaaatcagggactagacaaggctgcccactttctccctacctcttcaacatagtacttgtagtcctagccagagcaattagacaacaaaaggagatcaaggggatacaaattggaaaggaagaagtcaaaatatcactttttgcagatgatatgatagtatatataagtgaccctaaaaattctaccagagaactcctaaacctgagaaacagcttcaatgaaatggctggatttaaaattaactaaaacaagtcaatggcctttctgtacacaaaggataaacaggctgagaaagaaattagggaaacaacaccgttctcaatagtcacaagtaatataaaataccttggcgtgactctaactaaggaaatgaatgatctgtatgataagaacaagtctctgaagaaagaaattaaagaagatcaatatagtaaaaatagctatcttgccaaaagcaatctacagattcaatgcaatccccatcaaaattccaactcaattcttcaacgaattagaaaggggaatctgcaaattcatctggagtaacaaaaaacctaggatagcaaaaacccttctcaaggataaaagaagctctggtggaatcaccatgcctgacctaaagctgtactgcagagcaattgtgataaaaactgcatagtactggtatatcgacagacaagtagaacaatggaatagaattgaagacccagaaattaacccacacacctatggtcacttgatctttcacaagggagctaaaaccatccagtggaaaaaagacagcattttcgacaagtggtgctggcacaactggcagttatcatgtagaagaatgtgaattgatccattcctatctccttgtactaaggtcaaatctaagtggattaaggaactccacataaaaccagagacactgaaacttatagaggagaatgtagggaaaagcctcgaagatatgggtacaggggaaaaattcctgaatagaacagcaatggtttgtgctctaagatcaagaatcaacaaatgggacctcataaaattgcaaagcttctgcaaggcaaaagacactgtcaataagacaaaaaggccaccaacagattgggaaaggatctttacctattctaaatcagataggggactaatatccagtatatataaagaactcaagaagtggactccagaaaatcaaataaccccattaaaaaatggggtccagagctaaacaaagaattctcacccgaggaatacaaaatggctgagaagcacctgaaaaaatgttcagcatccttaatcatcagggaaatgcaaatcaaaacaaccctgagattccacctcacaccagtcagaatggctaagatcaaaaattcaggtgacagcagatgctggtgaggatatggagaaagaggaacactcctccactgttggtgggattgcaagcttgtacaaccactctggaaatcagtctggtggttcctcagaaaattggacatagtactactggaggatccagcaatacctctcctgggcatatatccagaagatgccccaaccggtaagaaggacacatgctccactatgttcatagctgccttattcataatagccagaagctggaaagaacctagatgcccctcaacagaggcatggatacagaaaatgtggtacatttacacaatggagtactactcagctcttaacaagaatgaatttatgaaattcctaggcaaatggatggacctggagggcattatcctgagtgaggtaacccaatcacaaaagaactcaactgatatgtactcactgataagtggatattagcccagaaatgtagaatacccaggatataagttacaatttgcaaaacacatgaaactcatgaagatccaagaccaaagtatggacactttgccccgtcttagaattgggaacaaaacatgcatggaaggagttacagagacaaagtttggagctgagatgaaaggatggatcatctagaaactgccatatcctgggatccatcccataatcagcctccaaacgctgacacctttgcaaacactagcaagattttgctgaaaggatccagatatagctgtctcttgtgagactatgttggggcctagcaaacacagaagtgtatgctcatagtcagctattggatggatcacagggtccccaatggaggagctagagaaagtacccaaagagctaaagggatccgcaaccctataggtggaacaacaatatgaactaaccaataccacccccatcccccaccccctacccccctagggctcgtgactctagctgcatatgtatccgaagattgcctggtcggccatcagtggaaagagaagcccattggttgtgcaaactttatatgcctcagtacaggggaacgccagggccaagaagtgggagtgggtgggggagtgggtgggggagttggtgggggagcatgtggggacttttgggatagcattggaaatataaatgaaataaatacctaattaaaaaacagaaaaagaaccaagtttgtagactcatacttcttgatctcagatactcctacaaagctatagcagttaaaaaggtgctgttagttaaaaataagtgtatatatagacatgaaggaatcaagagcccagaaataaaccctgatgtttagcatgaattgattttgatatgggttctgatactatttaacgtgaaaaataaattaagttgaaatagtcttagtaacaaatgatgttaagtgattgactatgtaaaaatttgaatcatcaaagtcctttctcctaccatagagaaaatttactcaacgtgaaccacagatcaaaatatagaagtagaactataaaagtcttttaacaaaaaacacaggtttgcattttcatgaccttgaacagtttcttagatgatgccaaaaccaaaagaatcaaaacaagaaaagaaatagagtaagggtcaccaaaattaaagctttagggcttaaagagccactatccgtagactgaaaagataacctaaagaatggtaaaattttaaggaaatcctacatttggtaaagaacttataactagaaaaatgtactcttacaactcaataagaagaagacacttaatccagtttggtaaaatttggtaaaatttaaatagacactgtttctaaggaacataagccaatggccaataggaatgtagaaagatctctggtgttatttgccatcaaggcaatgtgtagggatgagatgctacttcatattcaccaggatggcacagcacgactttcctgccattgctataacagagtcccaaacacttggtgactcaactcctcctcaaggccagaagtctgaaagctttcccgggcctacgttgttgtgtagagaaagttgtactacagactcaacaatgtccagaggctctagggcagaatctctcttgcctcttctggaaggtgacttgacaatctgatcctggctttcctgtcacctgcctctcctccctgtagtggggtctcactccacctctattaaaaccaacgattgcattagagtgcccctatgtaattcaggaacatctcttccacctgcaaatactgattttttttctgttttgtgtgtgtgtgtgtgtgtgtgtgtgtgtgtgtgtgtgtgtgtgtgtgagtgtgtgtgtgtgtgtgtgtgtgtgtagggtatggtaggaagaggttcaagattgaaccccggttgacctggtactccaatgaggatcaagtagccttgaactcacagcagtcttccaacctcagcctcccaagtgctgggattacagacatgtgccacaaagcccatcttagatccttaatttagtcataccacttgcttagactcttttttccatattcataggttacagggattagaaccaggacatcacagggagtgatttaatctactataaacactatcaaaataaagataacagttgttagtgaaagttagaagattataacctcatataccacgagggagaacacaaatgctacagacactttgatagtagtctgacagttcctccaggattacatgggaatgaccgggcaactctgttttgacctatggaactatagaaacgaagccatatgtccaaagcagtattatttacaatagcgaaagaaagcaggaaaaattaaaattacaaccaatggaggaataagatgaaataaaacattatgaccaaatagcaaagtgttcacaaataaaaataaaatactgattcgtgctacaatatagaagaacttcaaaaacattatgctgtttttaaaaatccagacctaaagggccacatgtttcatgactctatttatatgatctctcacaaaaaatcaatcactgttgcccagacgtgacagatgggaagttagggagctttaggtagagcacagatttctgaaatcagtttgagaacatagcctcagatttctatatgaggggtgtccacatggggggcagctgagaaaacagttctccagtggtggtgtggtctgctctcacaggactgcaaaggtttgtattatccaatattcacaatcatgtgtgtttgtgtgtgtgtgtgtgtgtgtgtagtgccttccaaactgaactacagtctatgtggccaaaagaatataccagaaattgcaaagaaccaaatgaactgcccgaaagaactgactaagaactatgtctaaaagtttatctctaccatccacccaacagcttaaagacatatgaaatatgatatagtaaaagcacacaaacatctcctgccacagcttgcacacatacgtcactaagttattggcttgtcttacagatcaactcatctatcatcctaggtaacaatattgtatccttaacaataagcttttccaagaaaggatcttgaaagtgttgggtaactcgggaggtattttaaccatggacacatgagaaatgttctctccctgttgctgggatccacccaactccacgttcacaatgatctcaccccacaaaagataaaggaataaataacagtacgcacagctgtggctaccataacacatcatgaaagtatttaccttgtcaacaagttcctggtaaagggataatctaagaaaggtatgccctaatccatttcagcttactcatactttaaatgaggaagacaaacgaccattttgaatgcttcatctacttattgtactttaccaaaagctcacttaaatatttgtgtcctgtgaactcagcggaggccattgttcttctgagagcttcagtttgcaatgtttattcagttccaggtataaggcccaggaagaatgagccaatgagtggtagtagcaacaggggattctttgcttatcaaggtgatggaaacaccaaagctagattcattcttcgattcatctaacaaatgtctacaggtggctaagaccctggaaatgtctcccagtatgacctctctaacttttatcttcatgatttaatggcccagtgttaccagtggctctggtgatatcacactcagaaaagtagttcatttctgccctccaacagaaatgaagagctctaaagggctcattgaaatcagtctcgtcataggaaatgcagagtctctcagaagaaaatatccttgtaaacttagagaaacatacaaattcaaatgccagcacatttatttccaataatctggcttgctaatttttaaatttacttttaaaaatgtgtatgtgtggtacgtgcaaatatatacatatatatgtatatatgtatagatacacacatatgcatgtatgtaagagatgagcacgtatattttcaccttaatttttgagacaaggtctctcactactcctctagctaaaggattgaaaggattgactaggctgactggccaccaagctttggaaactttcttgtctcttcttgccctctccgttagctctggagtcacagatgcaggctcagtcacagatgcaggctctgtcattcttcattttatgtgggtgccggggatcttacatttgtgagccctgcacccactaaaggatctctccagtctctgcttattcattttaaaggataactttgtgtattacatagaattttatgttttctcatcacccagcactcactagtttgtaactaatattttataaaagaccattgagtgaatgacagtctgagtgactaaccaaagttctacaaaataaggatgtgactcataggacagtgtgtccttccctgatgcttctacacattcatgttacttagttgacattcaaatttttttgattgaagcagtgaaaaatcctcaaagtagatgatattatggaaaaattttaatgatttagaaagacccagtttaaaccaaccctgtccacatttcagtaattaatatgaaaaataaagatgtatttgagaaagccatccaagtgtctttctaggcaggatatgctctgcctttgagtcatgaacccgagcacagggactcatacataccaatgaacttggtcctgtatccaaagcagcattaggcaggtacaaagtcagagccacaacagtgagtcagcccacatgtactacagactcagtgattacaaagtgggctgttgggcgtgtcacagagacaactctggcacagtgaccgaccttgtctgatttccataatgttctgcctagttcttcagggctaccttctttgtcataggtgcagccctcttgatgaaaacttaactaactattcgctagaactattgattcatattcctctaatatagcatgctcatgaaacacatggacagaaaacaaagccaaggggtaaaaagaaaaaagaaaaaaaaaggcaggggtggtgagcagaaaggagcttttgtccaggagactcaagtgaaattcaattatcttcttagtggtcgtaagtatggatattgtcatgtgtggacttttagtgagccaagtagtcaattgttgatgtaggtatttgattagcaaggtctgttgatgctttgaaacctggaaggatggaaatagctacaaagttaaagaattttatcaatatgggtaagtttgtttttctattcttctgtactaaatgccacttccaactcagtcggtattgtctttggatgttttgaattataatttaaggtgtaacaaaaaagaaaagtagcttacccacagcttgttccgtttgtcatgttctggttgaaggagctgttgatccatacaatggtgttattcatacacactttttctggaatactgagttcttgtctttcaatgtcatattcaacaaaaatatctgtcagtataccaaacacaataatcatgcctggctgggccattccatggagcaatgcgcacacacttcccataaacatcagccagttgtcttttgatgaagaaaatcgaaacttgaaaaacaaagggttcagagattatctatatgtaaaaagcacatgggagatggggtggggggatgggcaggagggctatttaatttcacctctattctgttaaacaacattcaacaccaggtgcttgtgggggtcatctctgagcagttgtcttcacactaattatgtaaaagtactagctatcaattgtctaaaacatcagatccttatattacgcccaaatctttgagcctcttctcctcagaccaggagctgactttactaccttccaagtcttcatcacagatgccattaccaggtagacatactgagtgaacatttaacagcgcaggaagttgcctctcagctctgagaacccatccggacaacaggcaaattgttgcttaaaaatgctccatcctaaacggtggtggcacacccctttaatcccagcactccggagccagaggcaggcagatctctgagttggaggccagcctagtctacagagcaaattccagggcaggcaaggctacagaaaaacactattttggagaaagagagaaagaaataaagagagagagagagagagagagagagagggagggagggagggagggagagagggagggagggagggagggagggagggaggaaggaaggaaagaaagaaagaaagaaagaaagaaagaaagaaagaaagaaagaaagaaagaaagaaagaaagaaagaaagaggaaatgcctgcatcctatacaaatttgtggtagatatataagctatggaatttctaaagacttctcataacaatgtatatatgtgatctattgccctgggagttactgtaaaggctttccttattaagattataattgtgtgtcgatggattctattccactgatattagccagtgggtttactaagcattggattttaaccagtattcatatgttcggtaaagctcatgactacaagactgatccctagagttaagtcctgccagtatgactaaggagttggctcttcctctactgtgggaataactcacagttgcaaagttgccaaggggagcagcacagtgcattatttaccagttcaaagaagccaactcgagcgccttcccctttcttcttatcttgtaacctgaagagaaggaaaggcatttaaaggtcatgttcccaaaactggtgagaaattctccctacatggtgcttttctgaattattctttaataagtatgcatttcccctctggctgggaattctggccaaacccagtattttaatgtattttgcactgatgaattcccaacagctgtaggtgcctggacaagacttgtatagggccataccaatctacattacagcatgaggacagggggtgggggggggggagtaggggagtccacaaggtcggacacatagttgaagagttacaggtaatcaataacagctgaaagcaggggctgggctctgtttaattcaggagtaagattcttagtagattgcccataatccaacagtcagccttaggccatgtgtacaggcaacattaaatggactcagcaggagatacaatataaaatatttatatatatttttgtatatttattgattgtataatttgtatatatgtgtgtatatatttgtatatttattctaaatatatatatatacactataccatatattctatatatattttacatgttctatatatattaatatatgttctatatatacatacagatagagatatggatacatagaatatatatagaacaattataatgtatagtaatagtgtatatattctagttgtcatgaaaacaatcacccatccatttatctttgccaaatgtgctccagctcaaaatgtcctttcttagaccctcatgcggacagttactccaacttcagattctcactccaagtctcctaagtctccttgtcaggaccttctctagccaagatcgttaagatttcaatgacatctgccctgacacacacattccttctcagagcttcatctccaattcagtctctttcttaggaaaaaaaatagttatgcattctcagtagctaccgggtattatgttttctaaatttataatgtttattctatctgcccataaatatactttcctcatgagcctagagggatgtaccactattattctgctaaagaaacatagcagtgtaatgactcctaatggcctactgctaaagccctgggtcagagcatcctatggccctgctcagagaagcttcttcttggagtagctgggaattaacacagagattcacaactgaaaacctgcaaagaggaagagactttggagcactcatcaaacccctctccttggggctcagagatttataatgcaaaaagatgtaagaaccagagaggatgaaggaccccagagagtacaagaggacgggtgcacacgggaattcacagagactgtgtcaacacacctgaaacctgcacaggttcaaaccagatggggtcccagcactgagaggaagaagtgggcacaggctctgggctttaacctcttgcaatcgatgcctgctggcaaagggataatccattttctccaacagaatgtcactgggcttatcaatcacagtacagagcaaagaggccccatgcccaggactgactgacacaaaattaattccataattgtttgcttgttgtgggcttttgttgttgttgttgtttttgtttcttgattttttgagacagggtttctctgtgtagccctggctgtcctgccactcactttgtagatcaggctggcctcgaactcaaaaatccgcctgcctctgcctcccaagtgctaggattaaaggcctgtgccaccacctcccggctgttgtgggctttttgattcctttaattttgttttgatattcttggtcttgttgggtttttgtttgttattttcattttttttgaaggttttttttttgagattgagagagaactaaggtagggtgggtaggagggaaatgggggagaacatggtaggaatcggaggcagaaaacatgatcaaaatacattatatatttaaaaaatgaaaaaaataaaatgcccttcttgcagtgaaggatttataatagatgtttcttttctgcactcgcaatgggactcttggaggaccagggtcaccagatttcttctagcaaagtgctaatcttaccagtactactgctgccttctgtcctgaaatactttaaactttctaaatcaaccttctgccatccatcttccatgtcaggtactcacacggtgccactgttctaatgcagccccatccaatcctgcctcaacacttccttacacgtgaactcaaacgagtgctgaagagaaagctcagagaattcaactttaggtttttattagtctccaggggttgggaaataggggagatgggggaatttggaggagtgagcagaaggtgtagagttggaggagggggcaggagtggagttggaggacctcctggaactcataaaatcacactattgtccagctctttcctgtttgttcaggctagaagctctgtggtagactgggatgcaagggaggaaactgggcataatcaggaagggctatcctataaggctttaaagggaagaagaaagcagcccaaaagtggtggcgcacgcctttagtcccagcactcagaaggcagaggcagatggatctctgagttcgcagccagcctggtctacagagtgagttccagtacagccagagccacacagagaccctgtcttggaaaaagaaaaaagaaaaggtgttctatactttctatacatagtaacgtagatgaaaatactctgtcctatatttatagaaatattctgaaatccttctagagaagatgctgtggtgttgaaacggtcactcaccttgatttcttatcattgttatctgtcaggatgaagacaacgtataaaaaggttaataattgtgtccaaacgcaacataatcattagtcaaccaaaagcatttctaggaagcacttttattcatgaaatattataaactaataactgtctctttctatctctttatcatccctccttctctccccatttcctgctgctttgactatatgtttggatattttttccagattataaaatatttgtattttctgaatatcaaaaggaagtctttccctttttgatacagggtctctcactctgtaatgtaagctggtttgggagctacatagacaagagtagcctcaaattcagacttgtggtaattttcctgcttcagtctcccatggactagaattacagatgtgagctactgggcttgatggaaatcaccatttctaaattagcagaagtaaatatggtcatttggtattatctattaagatgaaaagtaatctattgtttggttccttagaaacattttctatttgtcaaaatttatctacttaacagatcacaaattgactgtaacatgtctttaatacctcatcgccaccagaatccataagacagagctacatattatttttgtcagcccatgtagagcagatgtcagtaggaaatggaagtgagtgtctacagggacataaggaagccacagagaaaagaactctaaggaatatttgttaccatggccaccatttcctggttccaatgacatttaatacagttgcagaaaaagactaaagagacattatagtgtggataaagggcttgaaaattggaaaactggattagaagcatgattgcatggattgttttgattcgtgaatgaatgaatgaatggatgaatagcagcttagaacatgccaaggactaatgtgtcaaggcccctcatttctgccaggagagtgttggtagggcctgtttaaggagcagaaaccattaacaattatcgttgccatggtgatcggcaatgctatggggctaaagttatacagtgatcactctactgagaaggaagtgctcatgggagatgttagcactcactcatgttgtgcattttaacacagagctagctttcagatgtgacatgaattctagagagcccgtccagtttggttgtatgtcaggcacatgcctagccctagccccccatgttgtagctgatttttctctgctttttgaaacctcactaggcgtgtctcactcttgtctttagttttctttacacaaggatcaaggaaactcgcttacggaaaccatctgattcgaaagcatgattctcctctccaaatttcttcacactgcgaagaatcactgagtcagacatggtgtctgcaatcttcactcaacaaccctataaaataaaacagttgctgcaattattatacattttctctttaacaaaagtagctaaataagcaagggacttggctcaagaaacaagcttctataatttgcctcaaacaaacaaacaaaaccccccagatcttataatttaataacataacaatgaaagagactaaatattaggaaagaaactgagaatggattagagtcatgtgttcattaattgttatgcaaatgacttttgccaacttttcaaaaggtagcccagttgaaatggttgacttgcttttcagcttttggctcagaggaagctacagtacagctttcttcagtcttccaaattcaggttcatcagataccaacagcctacaccgtgccacccaactttgtccctaaggatatgaaaattgtgcatgtgaggttcaccattggcagggaccactgctacatctgccttggtcatcaagattggttcctttggtctgcctcaaaaaaaaaaaatgttggtcatggtattaccaaagcaatcagtaactggacactgacatgtcattagcatgacactgacactctagaacagacagaaccagatttaggtggtgccctctgcctcttcatgacaaccaaaaccctctcagagccaccaagagacagaaaaaaaaacaagagaacattaagcacaatagaaatgttacttttaatgagattatcaacattgcctagcatatgtgacagtggtctttagccagagagctttctggaaatattaagaacctgggtactacatagtctgtgggttgaactatgaatggctgccatcctcatgatgtcatagatgacatcaacagtggtgcagtggagtgtccagctagctaagaagcaacaagaggaaatatttcaataaaagaccatctagttaaaagaaagaagatgattttctttagttggtgagtagacaatgattgtttataaatttatgtgctctttctgtttatatgtgttttacctatttttaacaaatcatcattatagtactaaaagaacaaaacagttgatgctattctttagtatacatggtacaataataacacccaagacctttcaggtagtgtcagtggcctttcgtaagtagagccccaggggaaggtgagtctagatgaagcagagaaggccctgaataaaacaagaagttagcattagttttaatcacagctctctttatgagttttctctactttgaatacatatcaaccatgagtggtgtttttaaaaattcaagcaggctcaagacaataaaaataaacaatcaaaataaaatgaagcttaagtggaagagaaaagagcaccccagttggtattttcactataggttctagatacatatgggagacttgagagtttagctcctgaaaaaagcagattaaagagctcctttctaggtggagctattgactattctagacccccagcactgctagaaggctcctgaactcttagtgccaatcgttgcccaaggacttatagctcatgatgaaatgcagatctataaaggttatataaggagacagtggtatatgttacatatacatatacacatgctgtgtgtatatatatgattacatctgcatactatgcatataaaagagttgaagatggactagtaaaaatctctcagctttacctaattgggatcacagaggatggaaatgacagatacagtaattagatcattgctagcaattttctaaaagcagtgatataattaacactagattctatgttatgtcatgcatgccttgaaggcctggtccctgtgcaaaggagtgatgcacagttatggggctttgatgttgcgcgcgctcaactggccaggaagaacgacgctgctacaggatccttctgcacacatttattcagtcctgtttcttctttctccatatatctcccttgtttttatatctcccttgtttttatatctcccctgtttatatctcccttgtttttatatctcccttgtttttatatctcctccgaaccctgggcctctcactccttttatactctctctcatccacgcaccgcaggccacgccacctcaccaggcacgcagcttcagctaatcagggcagcaggggcaaatctccaccaaattggattcacctgtatcctggtacacctgcgcagcactcaagatgtttgtggcttatatgaggaagtcaggtgcaagtcatacgacttagctgcagtctctggcgcctttgggactgccgccacacccgctccccacactttgaggaaatgattagatagtgaggattctgtcctcataaattgagtaatccatttcctgacccagaattggaatattcgattggaagatggtggaactgtagaaggtgagtcactgagaacatgtcctggctccttcatgtctctctctctgtttcttagtcatgacagggtgagaagtctcatccttcactcacacccaccaccatgttattcagccttgcctagggcctcaagaagtagagttagccatgagacaaaattaacctttactcttgtttgtggaaggtattttgttacagcaacaacagctgttagccattccaagggttgatcagcataaacaaaaatcagtcaatagacaatttatatggaaagtgtagagcatcaagaataactacaacctgtcttaaatctatgaaataagtgataataactgacagatatattttttatcagtaactaatactggaaaacagcagataaacatcttcaaagtgctgaggaaaaataacttttaacctgggtcaaaaaagtcagtttgtcagtatcctgacattgagaatgaagggaggatgcagagtgaactaatacagagtggacttcagaagtaaagagtaactagaaaggattatgaaaaagaaccaagcataaacataagaactaacaaaatacctcagtataggccattaagtctcaatatggagtttaacttacttatttcaaagagacaaaaattaaaactgtgtgtggtcatttgaatagaatagccccccatagatggctcctccagcatcaagtctgtctggtcactgccatgcttcccaccatgatgataatggactaaacctctgtaagccagccccaatgaaatggtaacctttatataagagttgccttggtcatggtgtgtcttcacagcaatggaaatcctaaagcaataaggtatagtgttcagtgtgtagatgaagtgtgttgaactcactctcataagtatctatgcctaaatgttctactagttatggaatgtgtaattgaacatctgattcaaactgccaaggataaacctacaaatcatactcagtgaatgaagacagtggcaacctctacccccacatattacctgtttccatttgtgtgtatgaaatgtccagtagggacaaccaatagagacagtaagtgatggtctaagcctggagcagctgtagaagggagttcaagaaagagtagctggtaatgaagacaggttctactaaggatgaggaaaatattcaaattctgaactacagggaaggttgcataatctatagatgcactaaaatcttctgtgttatatgcttcattcagatgaactccatgctacgtaaattacacctccaaccagctataaacatgcaggcagaacattcaagggagaaaaattccacagtagagaaacagagagtgataaatgctgacagtcggctagctttctcttctttatgtggtttgagactcaagatcatcaagtggagccaccctcatttagaatgggtcttcccatttcaactaacctaatcaaagatcttttcacaggcatcgacagagaatgctgaatctaggtgattcttcctcacagagatatgcttatctcatgggtgattctacatcctgtcaagttgataataaactatcataattaggagttttggtaagttcctatttaacaacaatgtataaaatctgaatttaggtaaaaatatatttaagttacatttgacatatgtataaaaatttgctatttcgtaatacatatagttaaatgaagctgaagcgagctgacagcctcctctgtactacctggttttcatacatacttgaaggcgcttgtgtaagtttctggaggagaagagttaccaacagtcttacatagctgtggatcccgcaagctacagtaatgatctgtgggacatctgtaagatgtattccttagtgtgacactgacatgatgattatgtggaccatcaacttctctctggttgaatgtgaggcccacttctcaggagagagcacacgaatgggtctgtaaacctagccaagagcccgtggctgaggaggtcctgggccatagcagaaaacttagattctaagtttactaaagtgtcctgttgtcaaactgttttctcaatactcgattatacccatagataagtgctatgcccagtcttcatcagagaaacttctgggcagtgtttaacgcagaagcccacatctggccaaaagtccaagaatgtttggagagctgagtgtttggtcctaaattggaaagcccagggaacgtcatagaagagtgagcagaaagaatgtaagaatcagaggatgggaaacgggcagaaaaaaaaaagatgtcttctgggtatgacacagccatggcactcaagattatctgcaatagaccggcttaaggctgcacgtcttcatatttcgtcatggttaagggagggagccacaaggcctcattcctccctgagacactataagcaattaacaactgttgagagacggggaatcattttcttcagtcatgtagccattgatgaattgttctagcccaggaagcagcctccccatctctgctctggcaagcaactctattcacatgggaagaggccacatagaaaaggaagatatgaaaaagtaggaaaattgaggagagagggaaatcgatggaattaaagatcacagaaattcattatataaatgtagacaattatcaaacaattaaaaagacaatcaaaaaattaattcggatattaatagaaaaaactaatttctctacacaagcatattttaatttttatttaaaaatttccacagaatatatatattgatcataatcttcccttctcctgataattatatttgtatatataattttttagcagatatgctgatataaatgcaaccaagtaagaaataaaagattaaacactggtaaaatatacacatttctattcagtaaaattatgtattacattatacagagctctgggagtcatgtggaagagttgatggaccaggaggggttagaaattccacaggaagaccaacagagtcaactaacatagacccttggggactttcggagactgatccaccaaccaaataacatacatgggatagccctaggcttcctgcacatatgtagcagatgtcaggagcagggactgtccctaaatctgttgcctgtctttggatctggctcccctaacctgtctgccttgtctggtttcagcaacttaatgaaccaaggtgtggtgatacccagaggagccttcccaccccttctcagaggagatagagagggaagttggggagaggctgtttaaggcagggactgtaagaaggggggacatgtgatccagatataaagtgaataaattaattaattaacaaaataaaaagactaaaacctattaggtctttaataacctattattattcatttttaattctcatgtcttttttcctgtctcagacatacaaaatccatgataaaaattccatcaatgaaaatgaacgtcagcaaaatatgttatgatggaaatctgttggaaaaacaaacaaaatcaaaaccaaaacaaaccaaaaacaataaaggcagataaaaatttaaaaaaaattgtgtgttacaactttaaaacacatgcatgctaaagacgagctcacaaagaaaattaagaaattgaagcttgataataaagtcagggatctagaaaaagctaaacagacatcaaagatttagttgtaagcataaatgcagttaatttttcgaaagattaaagaatgaatgccattcttcttaagatgctttcagaaaagattacggagctgagggtggcaccccatgcttaccacgtggaggtcctgcactcaagcctcagcatagcaaaggggggaaaggatttcaaaattaataaaagtgtttttaaaattcaaataaaaaatagaggacaaagcaactgaaaagtttttcttttcagataaccaaagaccagacagaactccacaaagcatctcagtagaatatatgcaaaccacaaataaacaatagaaaacacataggcagagaccagaccaaaaaaaatttaagtcataatcaaatactataaatgactgtttgataacaagtttgaaaaccaggataaaacagatttttctagaaaacatgtgaatcaccacattctgtacagaagaaaataaaaaatgtaagattaataatcattaacaatttttaataattatttcaacaattaacaaattgaatattcaatattaaaaaaaatccttccaattcttacccacgtcccccacctcaaaaataggcttagaaagaacaaagccatcaaaagcatggatggcttcacaagtgcacgtccttcccgctccttcctggttgaggccgttctaacccatctgctctgctctgctctgctctgctctgctctgctctgctctgctctgctctgctctgctctgctctgctctgctctgctctcctttagtacatttgctgccggagtgaacagtatcagttgctttgttaactgggaagctaggatagctagtcaacttgttaactagtaagctaggatagctagtcaactcatttcacaaggcaactttgatcttgacaccaaagagagaatgttataaagaggaaaaatagacaagaaaattgactttaaagtgctaagatagacagtaaacataattcagtagcctacaaaataaatgagacaaggctggtttggagcatagcatggttatttaggaagacaaatgatcatttgaatagattcagaaaatgtacttgatataattaacatctgttcctgattttaggagaccaataaagttggaaaaaaaaaccagaaaacaaaaacaaaatgaagttttgcaaatgtaacaacaagaaaatttgaggtcatgatcaggaagaagtactaaaaccaaatacaagcctagactaagctccaatagcacaaggagctgagagaatagagggagcgttctctttggtacagctaataaaaatatactctgatggaatagctttggagagcaaattaaaaataacgagaaagaataaatacgctaatggtgggttggagaatatcctattctgttattttccctaataattaaaaaaaagaaaagaaaactgaaatggcgtttagtatctaccacaggtgtttgttttttccattaattaattaatttatttattcactacattccatcatagtcccctccctctgtccctcccagccactccctcccaccctccttcactcattccccaccccgtcctgggtaccaactcaccctggcacatcaagtctcatcaggactaagttcatcctctcccactgaggccagacaaggcagaccagctaggggaacggggtcctcaggcaggcaatagagccccaagccagagactgcccccctccaattgttaggggactcacttgaagatcaagctgcgtgtctgctacatatgtatatggaggaggcctaggtccagcacctgtgccctctttggtctgtggttcggtgtctgtgagcttccatgggtccagcttcattgacctgtatgtcttcttatggtgtctttgcttcctcaatccttcccccacacttccacaagactccctgagcttggtctttacaaaaattgcttgttcccccagcaatgctctttacaaatgccttgactttaaatccttcaagaggaactggagagaaggtccagcaactaaaacccttgacatccatccagcctgactatcctagaatgatccccagaaccggatggaacaagaaggggacctgaacacacactctcagaggctggaggcaagggtaaaaccaaataaaaagtcacgaaattcttgtctcaatgggggtagggagttggctgcatgcctttaatcccagcacttggaaggccaaggcaggtggagctctgtgagttcaaggctagcctggtcctgagaatgagttccaggctacacagagaaacccctgcctggaaaaacaaaacaaaaacaaacaaacaccaacaaaaacaaaaatagaatagatccttatttcctgagatggaaactacctcttcccacgttttccagatactggctctaaggcatgaagagattcagccacatgctcaagagcataggttagcgagtgatggggcctagaatcaaactcacatcatatgagatccatgcagagacctgtagtagcgtgtttactgcagcatgtttttgaaagcaaaagcttgaagaatatataaatgaacaagaaaatgagacctcggtgtatagaacttttgttattcagactaaatgaagtaagtaggagaattcaggggaagtatggattggagagatgtataagtctccctcccccttctatctccctcttcctaccctctcttatctcctttccatccctatcaacccctactttccctctcctagattcatgacttcatgttgcattgtgtgacctattcagtttaaccagggtcttgtgtatgaccattgtaccagaactatcaatgtgatagttcctggcggggctcacagtagacactggaggtaatgattccccggctctccgaagcaccagtagcaactagtgaagtagtgaggggtgggttcccttgagttattttccctacctcagtcgttcatttaagatgattcatcccactgccagtcacgtcttcaggagaatttagaggccaacagtacagtgccttccctcagattccagattttcacagaccccactgttacttgctgctcaactatattatttttagatggagggcacaatgagagttcacacaatcttacttgtacttctctctggcctggaactcactatataaacccaggttgatctttaacttgcctcactgagtgctgggattataggtgtttaccaccaagccatcatgtttttaaaacatatctctgcctcccagttaatccatcttcgcctcagtgtgctgatgctgggaaagcccacaagggaagagaacacaggttgctttttgccctttatgctgtccataccaatcccctccctccctccctcccccctccctccctccctccctccctccctctgcctttcagggtcctttgcagtcaacacactaacctggatcccttctctcattccagccactcagcaatcccacacatgaggtttcctacagcttgtgtctttctggacagccttataattcatttctgtcatctttcatttattatgaaaatgaaacctcctcaaagataaagcttttttgcaagcctggatttctacacccgtaacatcatcaatatccttcagcaaagaccaccatgaacggaaccataagtcaacaagtggagccacagaggaggacacattggtgaccatgaagtgtctcagtaggagaatgttagaaaggtcctgttatgggattggggcttccattagggaagctggggaagggcctaaagaagtgagagtttgctctagatgctctgcactttgcagcaaaattgttaactattctttggttttttgttttactatgtatgctttcagagtaggtctgaggttagcgctgtgagattgcttatgtctgtgtctaataggagaacagcattgtaactaaagtggtaggccagctactgacgtcagaggatgatttctgttcctctctcatcattggtcggaatgatgtagtgctatgatcctcttcttgacataattcacaggacacaggtctcggggccaaaggcattcatcagtatttctgtgagaattggaaggtcctgtcatgatctctgaggcactcagccggggcaggaatgacatttgaaagccattgtgctgaaaattttaatgacttcaagtcacaaagacactgaagaatttttagcattaaatgtggtgaaaagccgggcagcactcaggaggcagaggcaggcagatttctgagttcgaggccagcctggtctacagagtgaattccaggacagccagggctacacagagaaaccctgtctcgaaaaaccaaaaagaaaaaaaatgtggtgaaagtacactgaaaacagaaaattagtagaaaataaataaggtcttgtttgtgaatttccccagaaaaaaaaaattctaaaattctaaaaacaaatacaaaaagaaggaaggaaggaaggaaggaaggaaggagggagggagggagggagggagggagggagggagggagggaggagaggggaggggaggggaggggagggaagggaagggaagggaagggaagggaagggaagggaagggaagggaagggaagggaagggaaggagaaagaaaaagaaagaaagagagagagagaaagaaagagagagagagaataaaagaaaatatgtcttaggactggatgttcgatgccttgcctcatataattacagtgtagaatgcaaccaatctgtattagaccacatcttcacccattggctgactcaggaacagtcctggaaacggcttgtagtagtcctgttagtctctgaaaccctagcaatgaggtaggaatccgattctcaacgacaaacaggtttggcaggtgcttgagactatgagaaggttttttttgttgtttggtttgttagttgttttgttttgttttgttatcaactgaagcagtcacaatgttgctgagtcctactttttcagctcatatcttataatgtccaattagcacctaaactattttaatccattgccaaaaactataatcagaatttcttaataatttacagtaataaaaattttaaattaataacacataattcagagctgaaaacaaaatttaatgttattcgcttttcctctgaaattccatgtaatgaattatttttatctctcccaaatctctgaggaaaggactgagaattttcaagcctttcagaaaaatcaattttctgtaacatcggagaatctagcagtttaaagcaggaaattaagatttctacataatggttatctgacttggctgtgtaagtaggaacacctcaagaactcttatttgaccacaaaacccccagtgtccctctctgttccatgacatgtgatatttaacctgcctactatatatatgtgcttctgttcaactagggtgaagtttccttttgataaaagatggaatcttatcaattcagagccgaacactggaggtcagtcccatgaccataactggtagcctcagcagtgacttttctatcttagaacatttgcatcagctcctggaagagcacagtcgagcagaagggtggagcccagcgtctgcatggattgtccttgagaacctaagggatgagagcatccagcgatggggacgaatgaggggcctccgagatactccagatgaaaggggacaaacacaggctcctgtgagccacgcaggtacaggacaaaaagtcaaggtcctccagtttcttgtgtgcatctcatggtggccaaggtgctttgtgacttggtggaaataccaggctagagcagcacatgaatgggctgaacttctctaagggcctggtccacactaacagctgagtctggtattgcaaataagaaggaagggagggagggaggaagggagggagagagggaggaaggaagggggagagggaggaaggaagaagaaatggattctcagaagctggtctcagaatgaagaatcctacaatcctactgcagtaagagcaaggaccccgccgttccccctccctctctgaatcatgattttattgaaatatagttattacactcatcattttgttgtctttggttgcgtcatcgaggatctctgacacaaagtgaatgttcctgctgcattcactctcgggctctttacggaagagccttctgcactgggtgtcctcttcccatcccagccacacaaagtcagttcagaacagtgggggagttctcaaggaggttacttcccgactaaaatatttagtgtgccaaaccttgtaacctgatttaccctagtggagcttccggaggggacagaagacaggtgacagaattcatggaaaactacagaccttggctgagggagaagcatgggcactagcctgggaaggctctggaatgtgcatattcaccttggatttgggaggaaaacccaaagtagacaagggaaggtggagaggagggaagaacacatagaaggcccagaccccagagacagaataggagcaagggacgaaggatggactccccactaggtctggggagtacagggccatctctggagcagctgtcgatcccttggttccttgtgatctttaaccctggggattggggctttatcctgagaacaacggaagctagtgaggggttaacactttaacatctccgataagtcttgggattttgtgattattagttcaaatcatgcttctataatgccaagtttaaaggacatctctctggggtttttattttgggtgatctcttttttcaatccattcacctaattttgccacacacacacacacatttttgagacaactgaagtacaaaatagcactgctgtaagaccgttaccaggcctccctcactgtatataatactaagaagtcagccatttgtcttcacacgtctacccaagcactgtagctttactggatgacaaggttgggcttttggtaaatctgaaccacaaccctcccccataaactgagactaccaaataaaacagactcggaaagcaaagacttaaaaaacgccataggcaaatgagagtcacttacctacagatgtgaatttgagggagccaggagaagcgagagacgccactgtggaaagtcagggttgtacacccctttccaagttcagttttcatggtaataaagcattgaacagaaatcaggcttttttaagaacactatctatttgcttataggtcaatggcctaaagtccagatctagcacagttcagtgacatgagaggaaaggtcgaacatactcaaagcaggaacccaaacccagagtgcgtggggaccttctgagggtatcaacaagctttagaaaatgcccagttgcccgagagtggggcctcatggtagagagcctggtgagaggcccgactcttcttttttaagccctaggttttaaaaagtaactttaaaaaaatctaacaggaccaaactacttcttatcgtctctgctctatttgaagtgacccttgtgacatcctgggttgcaggccctcagtgatctggagccagccccaaagtttcatggagaattgataacatgcaattgccttctgctcagaactctgtgcacacagatgacccttgaactctggtctgagcagtcaatagcctcaagctctgcccactagctgcagcgctgtataagtagaaatgcattactttaaaaaacacattcccattaacaaaacctcaaagcaaataagcttagaactggctgtgacttttcgtatgccttcttactattaatctccacatatttctttaaaaaaacaagttttaccatttttcttcttcattaatttcaattgcattgtattataaaaagtaatatggccatatgattcaaaatgctatttagtttttatatttcttcctggaaaggggatgtaagattgttactggacatggggtcccaacttgtgctccaagtcagaaccgatcagctgccttctataggccaataaaatagccaagttagtaatagaaagcagagaaaggagatttattcagtgttccacattgggaaaaaaatacagagatccagtgtatatccagttttgggctcctgaaatgagaccagaatttaattagaacaccaaatgcacatcttagcagtgccagttaaaatatgatcctgcccaccactgactgggcttcaggctggttcctgaagtggtctaccaagttgtgagacttgtgtgaagtctcaagagactagttcttgctctggctggtatctctttcttctcccagagtgagattcctgaggaaatttcaatttggaggtgggaggaccagattcactacagtagtctgatggtcagatggagagacacatagcatctctttacactatcttcatttcttccaggccagagagaggacaagaaaaaaggctgagcttgcaagactgtggttcttaaagcatacccaccacaccagagatggctactgagcataaaggttacaatacagtggtatgcatgcttacctaagaaggtgaaggtaggccaagaacagttttcagaatcaaggagatgaattgcagacagactggaatgttagccctgtggctcagaataataggaatggttttgtggagaagtcttccaccaactatcaactcttgtttggttattatagccctgcagatcaaaatgaattggaaaaactcaacaccaattatctaacacaacataattggctgtactttggtagagtagggaggtttaactcattacagagagaagcaaaaggaactggcttcataattaggttctagcacttgcttctcgatttagctatggtaatgatgcttgctctactggctggttttgtgtgtcaacttgacacaagctggagttatcacagagaaaggaacctcccttgaggaaagacctccataagatccagctgcaaggcattttctcaattagtgatcaaggggggagggcccattgtgggtggtgccttccctgggctggtagtcttggattctagaagaaagcaagctgagcaagccaggggaagcaaaccagtaaggaacatccctccatggcctctgcatccgcttctgcttcctgacctgtgtgagttccagtcctgacttcttttggtgatgaacagcaatgtggaaatgtaagctgaataaaccctttcctccccaacttgcttcgtggtcatgatgttttgtgcaggaatagaaaccctaactaagacacttgctaacttcatcaccctcacgtgaagtccactgtgctctgcatgagaagaagtctgtagtggaggaaggttctccatagtcatccagggacttagaatgacaagcctctgttatcctgaagattcggctttcaaggtctccttagatattggcatctaactatcacatggggtattttacatgaacagtttccatggaccaagcctgggagtggcattcatcactattattcactttccattcagagactctatcgtataaccactccttcctgaaagggaaactaggaggtaagatctacctatgtgcctagaaagtatggttaagagctagccaacctcaagaaatggcatttgaaatcacaaagattttagtttatattgtactacttatgtgactgatatgacccaaccagcctcctgctgggacctcactgtgctatggattctgggtagagatcctgcagatggaaagtacgcggatgtggaagcagagcaggctttctctcagcatttgctaaaaaccagttggcctgacttgcagggagcatgctccaacgttagcaagtcggagggtgggagggtgggagtcaaaaatgcacaaggaaacagaagggctactcagtaacaagattctccacacccccagcttcctgggaggggaaggatagcagacacctcacccaaaagctaagccagatgcccaggtcaaaatgagcctggcagataggcccacagctctgcaaagggacaagcctagtcacaaattctgatgaattggtcacccctctggccacacaggccagtgaatggagaggagctcactcttgtcagtcttcatgacacatgggtctatgggctaggtgctctttgagagagaacttactgcttaaaactaagatagtttgagagactgataatgaggaataactccaaggtaagagacagccaccggaggcaaccaagatgagtagtgaagactggacatggacaagcctactagtaaaggcagcagaaggttcagttaggacatggagtgtgcagagactgacaaccccacccttggtggatagtagaaagaaagaaaaaagaattgaaaataaatctggagtttggtagccctgagtctgaggagggtgggtagatggtcctctggagcctgctctgtgctgcatggttcactgctgtgcagactgagcaatctgaagctttagcagcctactagaccttctgcagcctcggatctgcagcaggaggagtctaactcagcagattttgaaagcatgaagacaaatttgcttacagttcttggggctgtctttacatgtgggacacacggcaactcaactagagtatcagccactccagggtgcctgaactgagcagtgttaagaacttaggagaatctgtctgagtgacagagtgcaaaggtaagcgtagacccttagaaataagccacaccaatctgtttaaagattaaagtagttctcaggacttatcagagaagtttcttggtatggtatatggtggccaacacagaaacccagaactgatcaaagtgcagaagataaataagactgtggagtgcttagctataaatgggatacctccctgagggcttagagaccattgtgagcaaagggaaggaagaattgtaagaattggaggttgggaaggaccacagagaagtagcatcttctgaaagtgcagggctcatagtggctctgtttggctgcacaggacttgtacaaggtcaacaagtcaacgctcccacatgaagggaaaaggactacagagctcccacacctaactggtgagctgtggtcagttgatagcttccggtttgttgttgttgttgagggtcttttgtttggttttgggttttaggggtttttttgtttgtttgttttgttttgttttgtttttggtattgacctttgtaggtcaaccacgctccacaggctggcctccacacacaggagtatttaagcagcataaactggatgtgaaggctatttaaaaacaacaacaacaaaaaaaaaaaaaaacaagaacatgaatttgaggggggagcaatggagaatggactaggtcttggaggaatccaagacgatgaatggcaagtggatgtggccaaaatacattgcatgaaactctcaaagaattaatgaaaacagtttttaaactaaaataaaaaaatccacatggaagcacaaaataccttgaatagccaaagttgcgctaagacgttagaggtattacagtgcttggtttttattagaggtattatggcacttggttttaaattataccgtaccttatagtaacaagaccacgatgatactggcacaaacacagacactccaacggactagaatagaggacccacacaactgtaaccacctaaattttggcaataagaaaaaaacatgtcagagaaacaaatagtgcagcaaaggtagatcttcacctgaaagcgtgaaggaaaacatatgtcttgtcctgaacaaagatcaacttcaaccgcatccgcgggttcgtgaacttagtgtggccagaatctctgatacagctagaaggaaatggggaaaatatatcaatctgtaattcagactaggatggagagcaagaaatagctccaagaagtgatgaatgagattgcctgaaaataaagggcaggactgccaagggatcagatgtcgggggtggggggtgggggggagagacaggctaaagaatgggagaaaatctttgttagcatctccaaagagcttcacattctaaacagcaaaagaccagttgtcaagtcagtaaatgtgcaaacacattaaacaaacagctctcaaggaagaaataaaactagccaagatggatttggaaagttactcagcagcatccttagctatgaggcaaatgtgagataaagttgtactgagaatctcaccccagtcagaatgtctgccgacaaataaagcaaatactgtcaggggtgtgggataggaaggacccttgcacactgctggtgggtatggaaatcgtagcgctacagaaatcaatatggaggttttgaatgaaactaaaagtggaacaaacacttcatccagttatacactctgagatctacttgaaagaatgtaatcaacatatcacagagatacctaactgttcgcaatagtcatgctaagaaaccagtctagatgcccaacaacagatgaatggataaatacaacgtgatagatatatgtgtacggatgtgtgtgtgtttgtttgtgtgtgtgtgtgtgtgtgtgtgtgtgtgtgtgtgtatgtgtgtgtgacaattttattcaaccataaagaattaaattatggcatttgcagaaaaatgcatagaactggatattattatatggataaaacatgccaaactcagaacacacatctgacatggaaataaaaggaggaagagaaggatctaaaagagaaggcagtagggggagacaaaatatcatggttttcgcatttggagtctaggtttatgtatatatatatatatatatatatatatatatatatccacatggaagcacaaaataccttgaatagccaaagtcacgctaagacgttagaggtattacggtgcttggtttttattagaggtattatggcacttggttttaaattataccgtaccttatagtaacaagactacgatgatactggcacaaacacagacactccaacggactagaatagaggacacacacaactgtaaccacctaatttttggcaataagaaaaaaaaaacatgtcagagaaacaaatagtgcagccaaggtaaatcttcacctgaaagagtgaaggaaggacatatgtcttgtcctgaacaaagatcaacttcaactgcatctgccagttcgtatatatatatatatatatatatatatatatatatatacacatgtatatatacacatatatatacatgtacacacacacacacacacacacacacacacacacacacacacacacacacatatatatatatatatatatatatatatatatatatatatatatacagacacacacacatatatatgcatttgtgacatggggggaaaggggaagctttttaagagaacgaagaacaccagctacatggcaaaactgaggaaagcacagatgcaaagggatgaaaatgtcatcatgaatccaccttttgaaccattactaaaaattaatgagcatgcacatgatgcacagatatatttgcaggcaagacacctacatgtaaaaaacactaaaacaagtatttaaacttttaaataagtaaaaaaaattgaaaaagtaatgaaaacttaaaagtagacaaaatgcaccagtttcttcagctgctagtcatctttagcacgcagctcttggacagaacttctatttttatttccctctctagtgaaggaatgaagcacaggaatttagacttgattcatcagcaaatcttctggacagatgtgatgacagacactgtggtagatgcccatgattccagcactgagaaggcaggggcaggaatgtatcataaatataaattataattttgaggctagcttaaaccacgtcatgagaccctgtcaaacaaacaacggacaaaaatacttgactgtaataagtcttgtttttctttctctttccctggagcatcgtcatagaaaatgggaggtcacattaggacttgtacaagagaggaagtaaaataactgagaaaatcgagagaagcctgctatagaataagagaagtcatcataagcccttgtacccatggcgttgagttattattactgtcatgagaaatcttttgtccttgaaggggggcagcctgcctgatcctttggctgacggggttctcatgtctcagtgttagctagaacacctccttctcaaagtgacgcatcagtcttggaaatgatcctgcgctagcacttgcttacagggaagcacaggtcacagggatctgtcccaagtgggtgggtggcatctattaattcgtagcttagagcaaggtggctcatgcttcgtacaacaaagactggtaacagagaagaatttgtcgaaattagtcaaaacacgtccttggaaagcaacccggtagacttctgaacgtcctgtctagcttgttttaaactttccaaccacataaatgttgataaaaataagtaatagtttagcttttgaaagtgaaaataaggctggcatgctgtttttgatattccattctaaatggctgctcggagcgtccgccccttctttactaatctagagtaacatcttggccactgaagcactgctcagcagtgtacgagtcagggctcttttgaagaactgaacttatagaacaaatagacataataaaagaagggaacttattagactggcttaagggtgtggtccaggaagtccaacaaggtctgcccataatggaaaggccaaaaatctggtaagacgttcagtccaagaggttgaatgtctctgcagtcctaatgctcaagccctgggaacgttgctggtcctcaactacctagtctatatttcctccaaccaaaagcaacgtcaagttccttcagaagttagtgccacagcaaggacttggaagatggggttcccaccgcgtctccctttaactctcttaattggcctatgcagaagacaaagggatcatggagaaacacagttgactatcacaaacttaatcaagtaatgactccagttgcagctgctgtggcagatgtggtatccttacatgagcagattaacacttctcctggtacatgaaatgtggctcttgatctagcaagtgcctttttctcaggaggacctgtccataaggtactggaaaacatttgttttcatctggcaaggccagcagttatccatttacagttttacctccaggatatattaactctccagctctgttttataacttagtttgagggatcttgatcatctgtctcttccacaaaacatgacactggttcactatattggtggcattatgctgattatactaaatgaacaggaggcagcaaacactttggacttgttggtagcacatatgcccatcagaggatgggaaataaatctgaacaaaattcaaaagccttctgcctcagtgtaattttggggagtgcagtggtataaggcatgcaaagatattccttctaagatgaaggaggtacctgcccctcccaccaccaagaaaaaagtacaccattcagttggcatatttggattctggaggcagtgcattccttacttgggtgtgttattctggcccataaatcaagtaattcaataaagccctagctttgaatggggctgggaataggaggcttttcaacaagttcaggcagccatgcagaattctgtactacctggaccatacgacccaggagacctgatggtgcttaaggtgccagtgggagatggggtgctggttggagcctttggcaggctcctgtctcagtttgtttcctattgctctggtaaagaccatgaccacaggcaacatgggagaaaagggggaagacaggtatttcatcgcataactctcaggtcataattcattgctgagggaaatcagagcaagaactcaaagagggcagaaactaagacaggagctaaggcagagggcatggaggggtgctgcgtactgtcttgagccttatggtttgctcagcctgctttccactagcccaaaggtggcactgctcacagtgagcactgtccacccacatcagtcattaatttaaaataaaaaaaatccctacaggcttgttacaatcaagtatgatagaaataattctctagctgagattcccttgtcccagaaatgtctttggttttcatccagttggaagaaaaaaaaaaaaaaaaagaatcagacagcaaccagtgagctctctaggctcaactcactaacccaccacgtctcctgacctttgtagccacatatttgaagactgatggttgaagtaatgctgaacgtcattaaacaacaggtgtggtggttcacctctgtaatcccagcattcccgaagtagaagcatgaggagcttcaagaccctgaaactgaaaccaaaccaagcaaaaaaaggagctgactatggagaccctgtctcaagcatcaatcatcaaactaagataggaaaaaataaataaatagaagatctgcagccaaacccaactcatatccaccactctaagagaactggtgaagtggcatctagaacagtcactctctctgaagtttcctcagtctcctcaccagaggtcacatatcctcacaagacttctgattgactctggaatgaccacttcctccactctcgggaattcactccagtatcgtcatgtttactaaaggtatgtgctaaaaacagtcacccacttctcctctctttcctcctctcctggactcccattttccttattcttcataactattttatgtggatatagaaattggcacatgtatcaagcagaagcaaacttgtaataaattatattctctcagtgaagaaaatacagatctcaagaaactgtattttctatttctgtggcaaagaacacttaaaataaaatgtttatcagtaataggatctataacctaacctcaaagacagcttctgccttccagtctccaagctagtgccgtattcatattactttatttaatctcttcaagctaatgatttacttttgcagttcatgaaaagctaagactcagtgagggaaaatcactggtttatccaaagataaccacatgtaaatttgatttcagtccaaatctactgtatatgaaattcataccctgcccacaaagccaagcagctccttagaggccttaaccattactttaattcaccttctctgaaagtcactatttgatgttaatttctttcactaaaaatctcctgagtttgtataagtttaaggaaaaacacacttgcagggaaagttgattcctctgggacaagcccccagagcagctaaaccagacatggttattacatccttcttctgcttttgatgacatagagtcagacatatgacccaattttgttcaatgcaaaagaagatatttactggtctctataccaattacagctctaaggggaaatgtttcctcagaggaattgttatagctctgaacggtatcctggaagtcaggagccaaggaataccaccaagtcacaccacacaaaaaacatcacacaagagatttattggaaagacacaagaggggggccacctctgctcaggcaagaagcagcagggaactgagccgaaggcatgttttatacaggatttcttgtgtggcagagtttttaatggtggagatttccagggtaggtattggtgagatttcaagccaagctcaggagtggtgggtcttggtaggtttttcaaacccagaagtgggattggactttttactctgaaatgttcctcagaaattctaccaggagaaattatcttgtacttttttttttctgttttcaacatgtaccaagggctgtaatagccacctggtgaccatgatgtggcagtaataatgaagatttacatattgaggatggtgggggtggagaggtggaaacaacaagtacttgatgataagattaaatcactaaatcaaccctaaacaccatatgtccatgttccatgtcatatgaagtaattgcctttgttacttaagccattatcactaggaaatctctttatctgctattgcatctatgttaactgataatgcttacattcccagagagcttcagaagttatgtttggcactcttttttcattatttaatttattttttcactttacatcccagtatcagtctcctttctcctcccagtcttcctcacacagctactttctcctccccttctctgaaaagggggtatcaccccaccctggcacatcaagtcactgcaggactagacacatcctctaacactgagtccagttcggttgctgctttgtagcaggtacaggtaaattcataaacttccatccctcacacactgattttctcagagataaaacattccatcttgaagggaagctcattaacacataagatattctttttttttttttttaggtatttttctcatttacatttccaatgctaacccaaaagtcccccataccctccccccactcccctacccacccactcccaccttttggccctggcattcccctgtactggggcatataaagtttgcaagtccaatgggcctctctttccagtgatggccgactaggccatcttttgatacatatgcagctagagtcaagagctctgggttactggttagttcataatgttgttccacctatagggttgcagatctatttagctccttgggtactttctctagctcctccattgggggccctgtgatccattcaatagctgactgtgagcatccacttatgtgtttgctaggccccagcatagtctcacaagagacagctatatcagggtcctttcagcaaactcttgctagtgtatgcaatggtgtcagcgtttggaggctgattatgggatggatccctggatatggcagtgtctagatagtccatccttttgtctcagctccaaactttgtctctgtaactccttccatgcatgttttgttcccaattctaagacggggcaaagtgtccatactttggtcttggatcttcatgagtttcatgtgttttgcaaattgtaacttatatcctgggtattctacgtttctgggctaatatccacttatcagtgagtacatatcagttgagttcttttgtgattgggttacctcactcaggataatgccctccaggtccaaccatttgcctaggaatt

SEQ ID NO: 9 - DNA, 97659 bp, Homo sapiens
atctatctctctcttcagttctaaagatatgtgctttatatatctggatgctccagtgttgggtgcatatatatttaaaattgttatatcctcttgctgaatcaacccctttatcattatatagtaaccttgtttcttcttacagttttcgtcttgaaatctattttgtctgatacatgtatagctactcctcctctttttttttttttgtttccattggcatggaatatctttttctatcccttaattttcagtctatgtgtatctttatggattaagtgtgtttcttgtgggcaacagatcattcggtcttgttttgtgttgttttgttttgttttaatccattcagtgactctatgacttttgattggagagtctaggccatttatattcaatgttattattgataagtaaagacttactcctgccattttattatttgttttctggttgttttgtgatcttctctattttctttcctgtcttccttttagtgaaggtagtttctctgaaggtatgttttaatttcttgctttatatcttttgtgtaactgttgtaggtttgttgatttgaggttactctggggcttgtaaatactatcttataactgattattttaagctgataacaacttaacactgtttgcacaaacaaacaagcaaaaagaaaactgaaaaaacctttacaccttaaactcattctctgcttttaaattttttattgtttctatttatacgttattgtgctgcctatgtcttgaaaaaagattggttcaccttttagtctttctacttaagataagagtagtttacacaccacagttacattgttaaaatagtctgtgttctatgtgcttattattaccatgagttttgtagcttcagatgatcttactgctcattaacatccctttctttctgattgtagtactcccgtcagcatttcttgtgggacagatccagtgttgatgaaatccctcttacgattcctttgaataaactttctaccccatcactctctctacctactttttaaggccaataactattagatttgcccttttgatgctattttctagatcttatagttgtgtttcattttttaaattctttttgtgtgtgtagttttgtgtattcactgtgtattttcaaataactcactaattctttcttctgcttgatcaattctgccattaaaagacctcgatgcattttcagtaagtcaattgcatttttcaactccagaatttctgcttgactgttttaaattatttcaatctctttgttaactttatccgatagaaatctgaattccttctctgtgttatcttgactttctttgagttttctcaaaatagctattttatttatttattttttactttaagttctgggagataagtacagaatgtgtaggtttgttacacaggtgtacgtatgccatggtggtttgctgcacctatcaatccatcattctaggttttaagccttgcatgcattagctatttgtcctaatacactccctcttcttgcccctccacccccaattggctctagtgtgtgttgttccccttcctgtgtccatgtgttctcattgttcaactccaacttatgagtgagaatatgcagtgtttagttttctgttcctatgttagtttgctgagaatgatggcttccagcttcatccatgtccctgcaaaggacatgatctcatccctttttatggttgcatagtattccatggtgcatatgttccacattttctttatccagtctattattgatgggcatttgggttggttccatgtctttgctattgtaaatagtgctgcaataaacatacgtgtgcacgtgtctttatagtagaatgatttatattcctttgggtgtatacctagtaatgggattgctgggtcaaatggtatttctggttctagatctttgaggaatcaccacactgtcttccacaatgattgaactaacttacattctcaccaacggtgtaaaagtgttcctatttctccacagcctcactagcatctactgtctcttgactttttaatgatcactattcagactggcatgagatggtgtctcattgtggttttgatttgcatttctctaatgatcagtgatgttgagcttctttttatatgtttgttggctgcataaatgtcttctttggagaagtgtctcttcatatcctttgccaacttttttatggggttatttgtttttttcttgtaaatttgtttaagttccttgtagattctggatatttgacctttgtcagattctataggttgcctgttaactctgatgatagtttcttttgctgtgcagagctctttagtttaattagatcccattggtcagttttggcttttgttgcaattccttttggcattttcatcatgaagtctttgcccattcctatgtcctgaatggtattgcctaggttttcttctagtgttttatggttttgggttttaagtctttaatccatcttgagttaacttttgtataagttgtaaggaaggagtccactttcagttttctgcatatggctagccagttttcccagcaccatttattgaataggagatcctttcccccattgcttgttgttgtcaggtttgtcaaagatcagatggttgtagatgtgcgatattatttctgaggtctctgttctgtttcattggtctatatgtcaaaacagctattttgaattctctgcctgacaggtcacatatctctttcttcagtattgttcccaggtgacttatttagttcatttggtgaggtcatgttttcctggatggtattgatacttgtaggtatcggtcagtatatgggcattgaagtgttaggtatttattttggtctttgcagcccgagcttgtttgtacccatctttcttgagaaggcttttctaggtgtttgaaagtacttgggtattttgatctaagctgtatctgcattagggagcaccctaagcccagtaacattgtggtttcttacagacttatagaggtactgccttgatggtcttggataagatccagaaaatttcttaccaggcagagactcttgttgtcttcttttactttctcccaaacaaacaaattctctctctctctctctccctctctctttttctgtgctggacatcctggagcttggggtgggatgacacaagttcctctgtggctacaccactggggctgcactaggacagacctgaaatcagcacagtactgcatcttgctcaaggcctgatgtaaccactacctggctaccaatgtgtgctcaagaccttggggctctataatcagctggtagtaaatctagccacgtttgtatccttcccttcagggtggtgagttcccccaggccctgggtaggttgagaggtgtagtctgagagccagagactggagtcagaatccttagaaatctacttggtgtgcagtttagttggcactcaaaccactagacacattcttccctcccctttccacaggcaggagagcctcgccccctggccttcaccaccacaggcccaggggagtacttccaggctactgccacggttcacttaaggcacaaaggtttttcaatcagcttgtggtgaatgctgcccggtctggaactcattctttagggcagtgggcaccctctgctcatggcgggtccagaaatgccataaaagagccaaggcctggattccaagagcctgcttggtgctttgaccctgtggccgaattggtacctaaggtgcaatacaaagtctcctttacttttccacctgcttttctcaagcaaagagtctctcaccaccgccaccatagcgggtaatgtgctggatcttacctaaagccagcacatctcagagtcctacccaaggtccatgtccatggcgtactatctgggcatcactgatggttattcggggcccaaaggtcagcaagtaatgagtcctgctaggactggttccttcccttcaaagcagtagattcccttcttgtccagcgtatgtctagaaatgtccaggagctagggcctgggatgtgagtctcatgactctgaccagtcccctatcctactgtggctaagctggtaaccaagatgcaaaataaagtcctctttactcttccctttcctctcctcaagcagaaggaaggaatctcttttggagccatgagctatgctgcctggggttgggggaagggtggtgcaagccatttccttagctgccccagctggtgtctccgtaggtcatgtgcctccccaagtccactggctctgagctcagcttagcactagaaatcacctaggagttgcagtccttgtggcctacactgactttcaagtttatttagagccccaaggcattttagcccacagtgatgaagcttgatggaactcaagttccgacaactgggatgggtgattcccctctggctaggcctgatctaaatgctccctctgtgggcaggtgtcaactgagttcagcccagctttgctttatactgtgacagggaagcactgagttcaatgcacagtctcacaatctctgtgctctccctctcccaaacacatagcttttctctccgcacaatgtggccactgctgggaggatgaagggtggcatcagcaattcaagactgtctttcctaccctcttcaatgcctctttcagcgatatgaagttaaaactaggaactatgagtgctcatctgatttttggcttttataaagttgctttttgtgtatagatagttgtttaaatttagtgttcttgtagagagggacaatcagtagatccttctattcagccatcttgccctgcccttcttctctacctgtggtagtcttgactatatctatttgtgtagattttttagtggtcctctgagtattgcattatatataaataacttatcatactttactattttcatcattttacttgtttgagtgaagtgtagaaatcttatctcccttatatccctttactctctctcattcacttgtaattgtcttatgtatttcccttacttatatttagaaccacatcagacagtgatataatttttgcttcacccataaaaaataatttagaaaactcaataggaagaggaaagtttcttgtatttaccaatatttttcttgaccatgttctttattctagatattctaagtttctcctgtttataattttctatttagagaacttcctttagtcattcttttattttgaaaagcgttagctttagaataactttaagagttagtaaatgtcaataaccttaagcctagtgaccctactcttgcttatccatttcatcgttggccttggcaccttgcagccctccctgtccacccagtggttttcattactctcacagaacacaagaatttcattaggcaatgtgaccttggaactctcaatgtgcccattaatccacgttggcagaaatgatataacatagtgattaatagcaaattcttctaactacttcttgtcatggtacctttgcaagtccaccctagtttatgaaggtataaggaagagtttagtggaaaacagagagagagagagctgaatcagtattacccttgtcttcaacatctttatgagtgcctttgggtgtgctgggccgaattagatgaattttataatgaacaaaagaagaacgaaaccaaaaggaaataatatttttaagagaaaggtcaaaggcaaagcaaaaaatttctgagtcaagcaatgagaagggttttttaaaaaagaaaaaaaaactttgggagaagtataagatgtaacatgggttgaaggaagtaaaggcaggaaaaattaagatctataaactctgagaaggtagtttgagcagaagtaaaaaacattagtgaccaaaagtttggaaatgattcaagagtagttaagtgcagccaagtgcaaacagaatagtcaaattttcactatcttcagacatgaaaatttggagaattgttagatagccacaaatgcaatatagtgggggaaaagaccacagagcatatttgtcaagatataagtcaacaggacagagaatagagtccatcatagcaccctctttaggaaaaattgttgctaattaatttatatttgaatataatttgaaaatactttggtagatggaatttgttattctctgttgactcttacttataggaaattctttttgtacaaacccttttatgctatagttcaaaaatattgatctattcaatacacatttactgagcccactggtgctgtgggcactagaaatacaacaggtaaggcttctgtctaacagtggtcttcaataggaatacagaatgagaagctgaagtcacgtggccagagctggaagcctaattccattgtttactagctgtgtaaaattcactttgatatccccacctctaaactgagaataatagttcctcacttgtttaccttgaacatgctccttgttttgagaatcaaatgagatgatatatatgtgtgataggctctgtaaattcataaaatactatataatctgagtaacttttgcattagccttgtttaaatccttctttatatgcctaaaactttttatcctaaaaccttagcccaggtccttgcacatagtaagtgtgggcagcaattattggatattccagcgaatgaaatgaaaacatattaatatttttactctcacggctcttatgtgctactaagatgacaagagacaataagcataataaattctttaatgatatagtatactagaaggtgataaatgctgtggaaaagaaaatcaaagtaggataagaggaactgagagtcctgagggtacaagatccaacttctaattgagaagagatttttaggaggtgagagtgtcctccatgtcagtattttggggaggataattttggacagggggaacaactagtacaaacaccctgaggtggagtgctgcctctcttgtctgagtaatatccaagaggccagtgtggctggagtggagttaggcaaagacaaaataaataaaaatgagatcagagaggtcacggagagggcacagcattgtaggccatgactgagtgaattgggggctaccacagaaatgtgaagagaagagtgatgtgatgtgactcacatttcaaaagaatcatccaggccatgcttttgacaatggacaaaggcggaagaggaggaaaggacagaggcagagagacaattaacaagctattatagaaaatcaggtggagatgatagtggcttgcatgatggtggtagagctggaggtgcagggcaaaggtcagattctgaatatattttgaaagtaaaggcaacaagatttcctgacagattgattatggtgtgtcaaagaaagagaggaatgcaggatgattccagtgtttttgttgacaactataagtctggagctgccaactggatgcagaagttcactggagggcccagcctggggaaaggatcaggagcaggttaggcatgttaagcttgagatgtctgttaaacatccagataggaatgtcaaagatgcacttgtgtttaagagtcaggaatgcaagagggaattttaggctagaaacaaaaagttagaaattattcgatacagatggtatttaaagctgtgtgactgactgacatgacagaagtggcgagaatagactgagaagtccaaggaatgagccttggaccactccagtgttaggtaagtagttgaaaaaaagagagagagagaaggcatcaaaggagactgaggaagagtgatcaggaaagcataggaaaatccgagaaacatatggtgtcctggaatctatatgaaaaagatatattcagaaagacagagtgataaatctgtcaaattattgaatttgtcaggtaaaataagaacagagaattgatctttggacttagcaaagcagagattatcagtgacttttataaaaatagtttcggtagtgtggaaagatcaaacttctgtttagagtgggtttcagagagaacaacaggaattgaagaaagtaataaactttgccaaccagtttagctccaaaggaaaagagggaaatatgatggtagctggcaggggaagtgtggtcaagagaggttttttgtttgtttttcaagatggaagaaataacagtatgtatgtaagctcacaggagggatccagcaggcatggggaaattgatgatataggacagaaagggaagaatggctccttgtgaaagtgaaaggggatgggatctacaggatgaacatgcaaacaaagactggctgcaaagagaggcatgaatagttcatttacagaaacagcaaaggcagagtgttggtacagatgctggtaagtggaaaaatatcatggtaggaggttatggagttccattctaaacacttcaacttcatcagtgaaataagcacggtaatttagcagaatgtgaagatgtaaaagaacagaatttgagaaaacagacgatatgaaataattattagaaaagcaggtgagtgaatgaactaagaaaacatcttatgactattggtcagtaaacgttgggatacatagtgaattttacaaaatctttgccctcataagtcttgcatcccacagagtgggcaataaataataaacataataagtacattatgtatacagtatagggccatgtaagttcatggcgaggcaagcccgatgactttgtatttttcttcagacatgttctgctgcatggtgtaggttcacagtagctcagtaacttgaattatccaggattgtggttttactaagcaagcctgataaagagagagggctagagggttgtgggtgttttcaggctgagttaagagagaagacatgaaggaggtgaggaacagtaaaaaggtggtaagatcagtggactgaaggatgcattaaagaatgactgtgtttaactctctgatacatctgacgtatgttctccatctccacttccctgctagtcatagcggataaggatactccctggattcgaattctagttccatcagttataagatattgattctgttttactttgtctgtctcattccaaaacacatgtctctaattaccatagtttgataatgagttttgatatttatttagtaaggcaaacccataaataactgataatttttcaagataaaagtgaaataaattttcaggaaaaaaaagctgagaaaatttgtcacaaactaaagaaaacaagaaagagacagtagatgaaagagtgctcattaggtgaaaggaaaatgatccaagagggtagctttgagatgtaggaagaaacaaaaagcaagaaaatgataaatgttttgataaagctaaataagtatcaactcataaagaaataatattcccagaagagtcatgaatatacagagaaaattaaagtacatgacaatggcaatgtaaaagttaggggtgaataaaaaagagacttaagagttctaaaatcattgcattgtcctggaagaggaaaaagtacaatgattagtcaaagatacatgtcataatccctagaaaggagatcattattaaatagaaaataaaagaatacatcttatagaaaggaaatctaaatgataatattaaacagatctaaaataaggcaaaagtgaggataaaaaagaaagatggaaccaatggggcaaatagaaaaagtaagatagcgtggtagggcattaattccagccttacatcaatgcataagtatctcaatattctactgtaaagggaaagtaaagatttcttacagcctgagtgtaatggagaaatctagtttatcatagtgctttaaatattgtaagtcttcaacttctagttgatgaataaatgatggaattctcagtgatactgcactgttatcaaataaatataaaaggagctcctggaattggatgtaatacaggtaaagaagtaaacacagccatataggcatggcttcttgcagggacaactttgtgaatcggctcagacagacagacaggcaaatacacctcattgcctcatacatgttatttgctttagtttttgttctgaaccttcctactccttcaagtatctgcatttactttatcaaattctcttttattagagactgaagaaactgtcatctccttatgtgctaatgagtttaataatgtcctccagtcaccacaagccttctttcaaactacacaattccaactgcttccgtctcagagtatcttgaaataatgatctgaccgcctgttagaccagtgaagggaaggaatttgggttgatttaagaagagaatcctcatggtcatggtagactgatatggagagaaaacattttgaggaaaaatactcaactaaattcatttctactccagcatgcagtttcaagtcaagttccaccttagctccaggtggcaggcagagcaggatgcagaggcacagcacaagtaaggggtgagtgccgaagctgctggctcctgttccagtctttcttccttggcctcgcctgaacttttactataataatagtcaccatttattaggtgtctcctacgtgcaggacactttacacacagtatccctaatcctaataacacccttattttatagatccaatgactgagtcaagaattacataacctggccagacagctggtacatgggaaaggtgagattcacaccagggtccacccagcatctctacttataccatgctctgctttaaggttctctgagaactcagacaagccttgggctaacaattgtgttaacaggacatagcaggtgcaaggacccactggtcatcctgctacctgatcagaaggaaggaaagttgtatttgttgctcacctactatgttttaggcatagtactaggtgcttttacctagtacttaattcccttatcctcaactcatttattcctcgcaataacctgataagggagatgtttttatcctcattttacatataaggaaacaggcctagagaaatgagcacagtgtccaaagtcacatagttaataagatgtgaagctctgagtttgaaagtctccggtttcaaagccatgaaacttatggctccccgttttagacacttccttttgggaagagtgtggaggaattaatcagaaagaagaaagtcatactcaaataggtggtaggagcagagacaattcaatacagacagaagtcttagatgagagcagtgagccagggcactggactgggactcaggaggcttcccctagactctggttccaccgatgcagcctcaggcaggacttcacctctctgggcatccgtttcttcatatgttaaacatacggggttttaattagatgatcgctgaagacccctctagccctaaaactctgtgtctcttaagtgctaagagggcaccaacagcgttcctcctccccaaggagcataatgtgatggttcctgccggccctggctgactctcgccgtccttggagataattgggttcagtgccacctggaccagaactggggatgcggaagcaagaggcgagtctattgctctctctcggtcctgggccgccctgtgattgttgggcgtccggaaactgtctcccctatgggtttaaaaacaaaactgagcgcccatggggtgtgacagtcatctgcaggggcttgggtggcccatcaggcgaggctttctcggcacccgaggctccagcctgatctcggtcttatcctgcgaccgggctggttctggcgggtcgccagggtgggcggcggccccagccgggcgccccggcggcaagagcggcaggctgcgcccctggcccgcgcctagcctggggagagagctgggcgggcggcgggagctgctctcgcgggccgcggccctcgccctggctgcaacggtaggcgtttcccgggccggacgcgcgtggggggcgggggcgggggcgggggcgaggccgcggcgagcaaagtccaggcccctctgctgcagcgcccgcgcgtccagaggccctgccagacacgcgcgaggttcgaggtgagagaggtccgggcgcgtctggcctcgaagggagacccgggacgtggggcgcggggcgggagtggccggacctccacccagtgcccccgggccccgcgactcgtgcgccgggccgccggagagggtgtacttggttctgaggctgtggtttctcctcaggctgagatggatcttgaggcggcaaagaacggaacagcctggcgccccacgagcgcggagggcgactttgaactgggcatcagcaggtacatccccagcagccactggcttttccgttacacgccaatcagcaggactaagttcacccttggaaagaagttgtaaaaatcggttgatgcctttgaagacctttgttttggaggcttctttgaagggtcttgcatccggttctgaccttggagcaaacgtgttgtgtggcctcaaagaatgtcactgaggctccttttggaacagattcaggaagaaaaggctgtcttgaaaagtgctcccttccctttgtgcaggggggattcaatgaatatctgcattgtataacattcattgtattacgtaactcttgaaacttttacaaatgactttcatatacatcatctgattgttcagacttaaagggtgtcagacatctgctgttgatggctgtgctttttgaacaagggcagtgaagcaaaaactccctcccctcctgcccatcccctgttatgtctcttcctccttgtcttacccctccccctcctctcatcgccaggcttatttgtatttctcctttctgggaggataggtggggagggggaacttctgtacatccgaatcagttttgttcaagtggtagggggaagcagcgcttcctttgccttcatgtctttctcggttcccctggcccttgttaaactcacttcacaggctttatgagcggggcagaagttcccagtcaatggcgtgtgtctttgtttcctctttcactgtgggaatagtgaatcattttcgcctttagcctgaaatagtttatgaggctattacggtctctgagttcataccaggctacccagaaaaaattgacctgtgtcaagtgatcacccagagggacaaatttatcagtctctgtagtttgtcctcaagctgctaggggcttgattagctaactgaaaacatgcctacctgatgcttaaactgaagcattattttagcctgttaatgtggttgtgcagtaaccttgctgtatttcttctaagcaccattgtattttttcatagaaaatttagttttgccatgtagaattgaaaaagtgatagatggtgttacttccaatggaagtacttacacacgcaatagaaaaatatggttttcatcagctggctgtttaggcagggattgactgtgagtctattaatagatggcattttcatgaagaagtctatttatgtattgcactggcttaacatttgatgcgtgtgcaaaggagctattcctacaaaaggtgtagtaacacttcagaacccaggaaagtcctcagaggggaagcccacagcttctgctggaaagaagaaagcagctcaaaagagaaatacagaaagttaacaataagttaagaccacatgattatgaaatcaaatgtagtgaaactaatttttataaaagcagaccaaagataatatatttaaaggaagttaagcctgcttcaatcaaattagttatattcttgttctaattatgttgctattgcccatggcacattcttttgaacatatttagtggcagatgtttgtccagtgattttagtcaatactttacataatttggaatcatcttatgagtaaaactttatcatttacctggataaatgcatcatatttatgtaaaaatcatcatatatatataaatcatcatacacacacacacacacacactccctcatagagtttatattatagtacggaggacagacataaataatgtacatactaaataagtaaaccacagccaatgttagaaggtaattaacgccatggaaaaaagcattaatccaggttaaggggatcaggagtacaaaaggggagtactttgtaattttaagtagggtggttagggtagatcttattttaaaggtaatatttgagcaaagacttgaaagaaatgagaggagacagctgtgtgggtatctaaggggagagcattcccggaaaaggtaactggcaatgcaaagaccctgagtcaggtacatgtttggtgagttcatggaacagcagagagtccaggctggttggagcagagtaagcaggtttgggagtagggatgtggtcagagaggaaataagcaaacagatcgtgtaggacctcagaggttaatgcaaggattttggcttttattgtaagaaaaaggaaagccattgtaggtttttgagcaaagaagtagtgtatggcttggcattttgaaataattactctgactgctagttgaagatagactgaagcggcataggtggaagtggagagactaggcaggaggctgccctactggtgacagcaatgaaactggtgataagtggttaaattctagatgtactttgaatgtatcaccaacaagattgcctgacaccactctccacaatccttcagaagaatagacattcctaattttaaatcatgattttttttaattttagaaaacaaataacttaattgacttagcgacactgttagcatacttatctttcctgtgtatgtgagctctgtaaggcaggcgaccatttcttatgtatccatgtatctttgtagtaccttcgacagttacttttgtgcttgctatgtttgttgaactgaataattttgacattttgtgaacatcactcttatatttgaaaatataatagttgaatattgtaactaaacatatttatgttcaattgattgtaaaacattttgtaacagttttaaattgaagcaattctattttttacagcaaacaaaaaaggaaaaaaacgaagacagtgaaaatgattggagtattaacattggtaagctgtgaaatgttaaatgtgaataatcctaccttttattcaaatttgaggtattgaatcaattacctttaaagcaaatactttaagattgtctagctaggcgagctgactcatacttgtaatcccagcactttgggagactgaggtgggagggttgcttgagcacaagagtttgagaccagcctggacaacatagtgagatctcatctctacaaaataataaaaataaaaatcttaaaaaatagcatatgtcatggcatgaacctgtagtcccagctacttgggaggctgaggcaggagggtcttaggagtctgaggctgcagtgagttatgatcacaccactgcactccagcctgggtggcagagcaagaccctgtctcaaaaacaacgacaacaaaaaactgtctgcagacagcaataaattgtccttgctgcacctgtgctgtataagtttggcttattatagtcaatgacccacattcttaagatggatgattttttaaaaagtagagacaggctggcgatgacaccggacagagctaactggtgtgcaaggaaagtgaaaatgggaattgtgttagtagcacaatgcaaactcaacaatttcaagaaaatgcatttctgcatttgcttcacagacccccaccccaaatttagcttaaaataagcttgcatttcaagaaagtaattgttaagtacataaattttaatttaaggaatctacattcacatttggtttccaaaaaattggctaaatagggggtaactattaggaattctgattatgcttaaaacagttttcggtgcttttctgttggtacaagacaagacaatatttttggaagaagtctcctcatctggttttcatttgaaatatgtcttacagaggcagctcaagaaagcatttgcccatttttggtaaatatgacgtgtttcaaactgtgacagccattatttggtagcaaagaagttagaattaagtgtcatgtcagctgaaatccaacttagtaattaaatggataaaaagacaccaaaacatccacactctcaaacactgctgcatacttctcatgtaaccaaaagcccctattcattgtcttctctcctctttttttatttgtttaaaaagcctcagtaagggcaatttaaaaaaaaattagcactttggagaataaattgtttatcaaatgaaagctggttttatttatttttttagaagtttttttttctttatttttttaaatttgtttaaattatactttaagttctagggtacatgtgcataacgtgcaggtttgttacatatgtatacatgtgccatgttggtgtgctgcacccattaacttgtcatttacattaggtatatctcctaatgctatccctcccccatccccccaccccacaataggccccggtgtgtgatgttccccttcctgtgtccaagtgttctcattgttcagttcccacctgtgagtgagaacatgaggtgtttggttttttgtccttgcgatagtttgctgaggatggtttccagcttcatccatgtccctacaaaggacatgaactcatcattttttatggctgcatagtattccatggtgtatatgtgccacattttcttaatccagtctatcattgttggacatttgggttggttccaagtctttgctattgtgaatagtgctgcaataaacatacttgtgcatgtgtctgtatagcagcatgatttatattcctttgggtatatacctagtaatgggatggctgggtcaaatgatatttctagttctagatccttgaggaatcaccacactgtcttccacaatggttgaactagtttacagtcccaccaatagtgtaaaagtgttcctatttctccacatcctctccagcacctgttgtttcctgactttttaatgattgccattctaactggtgtgagatggtatctcattgtggttttgatttgcatttctctgatggccagtgatcatgagcattttttcatgtgtctattggctgcataaatgtcttcttttgaggagtgtctgttcatatccttcacccacttgttggtggggttgtttttttcttgtaaatttgtttgagttctttgtagattctggatactagccctttgtcagatgagtagattgcaaaaattttctcccattctgtaggttgccagttcactctaatgatagtttcttttgctgtgcagaagctctttagtttaattagatcccatttttgtcaattttggcttttgttgcctttgcttttggtgttttagacatgaactccttgaccatgcctatgtcctgaatggtattgcctaggttttcttctagggtttttatggttttaggtctaacatgtaagtctttaatccatcttgaattaatgtttgtataaggtgtaaggaagggatccagtttcagctttctacatatggctagccagttttcccagcaccatttgttaaatagggaatccttttcccatttcttgtttttgtcaggtttgtcaaagatcagatagttgtagatgtatggtattatttctgagggctctgttctgttccattggtctatatctctgttttggtaccagtaccatgctgttttggttactgtagccttgtagtatagtttgaagtcaggtagcatgatgcctccagctttgttcttttagcttaggattgacttgccaatgcaggctcttttttggttccatattaactttaaagtagttttttccaattctatgaagaaagtcattggtagcttgatggggatggcattgaatctataaattaccttgggcagtatggccattttcacgatattgattcttcctatccatgagcatggaatgttcttccatttgtttgtgtcctcttttatttcgttgagcagtggtttgtagttctccttgaagaggtccttcacatcccttgtaagttggattcctaggtattttattctctttgaagcaattgtgaatgggagttcactcatgatttggctctctgtctgttattgatgtataagaatgcttgtgatttttgcacattgattttgtatcctgagactttgctgaagttgcttatcagcttaaggaggctttgggctgagacaatggggttttctagatatacagtcatgtcatctgcaaacagggacagttttacttcctcttttcctaattgaataccctttctttctttcttctgcctgattgccctggccagaacttccaacactatgttgaataggagtggtgagagagggcatcctgtcttgtgccaattttcaaagggaatgcttccagtttttcccattcagtatgatattggctatgggtttgtcataaatagctcttattatgtttagatacctcccatcaatacctaatttattgagagtttttagcatgaatggctgttgaattttgtcaaaggccttttctgcatctattgagataataatgtggtttttttctttggttctgtttatatgctgtattacgtttattgatttgtgtatgttgaaccagccttgcatcccaggggtgaagcccacttgatcatggtggataagctttttgatgtgctgctggattcggtttgccagtattttattttattttattttattttattttattttatttatttattttttgagacggagttgcgctgtttcgcccaggccggactgtagtggcgctatctgggctcactgcaagctgcgcctcccgggttcacgccattctcctgcctcagcctctcgagtagctgagactacaggtccccaccaccacgcctggctagtttttgtatttttagtagagacagggtttcaccatgttagccaggatggtcttgatctcttgaccttgtgatccgcccgcctcagcctcccaaagtgctgcgattataggcgtgagccaccgcgcccacggtttgccagtattttattgaggatttttgcattgatgttcgtcagggatattggtctaaaattctctttttttgttgtgactctgccaggctttggtatcaggatgatgctggcctcataaaatgagttagggaggattccctctttttctattgattggaatagtttcagaaggaatggtaccagttcctccttgtacctctggtagaattcggctgtgattctgtctggtcctggactttttttggttggtaagctattaatttcagagcccgttattggtctattcagagattcaacttcttcctggtttagtcttgggagggtgtatgtgttgaggaatttatccatttcttctagattttctagtttatttatgtaggggtgtttacagtattctctgatggtagtttgtatttctgtgatatcagtggtgatatcccctttatcattttttattgcgtctatttgattcttctctcttttcttctttattggtcttgctagcagtcaatcaattttgttgatcttttcaaaaaaccagctcctggattcattgactttttgaagggttttttatgtctctatctccttcagttctgctctgatcttagttatttcttgccttctgctagcttttgaatgtgtttgctcatgcttctctagttcttttaattgtgatgttagggtgtcaattttacacctttcctgctttctcttgtgggcatttagtgctattaatttccctctacccactgctttaaatgtgtcccagagattctggtatgttgtgtctttgttctcattggtttcaaagaacatctttatttctgccttcatttcgttatgtgcccagtagtcgttcaggagcaggttgttcagtttccatgtagttgagcggttttgagtgagtttcttaatcctgagttctagtttgattgcactgtggtctgagacacagtttgttataatttctgttcttttacatttgctgaggagtgctttacttccaactacgtggtcaattttggagtaagtgcagtgtggtgctgagaagaatgtatattctgttgatttggggtggagagttctgtagatgtctattaggtccacttggtgcagagctgagttcaattcctggatatccttgttaacttctgtctcgttgatctgtctaatgctgatagtggggtcttaaagtctcccattattattgtgtgggagtctctttgtaggtatctaaggacttgctttatgaatcttggtgctcctgtattgggtgaatatatatatttaggatagttagttcttcttgttgaattgatccgtttaccattatgtaatggccttctttgtctcttttgatctttgttggtttaaattctgttttatcagagactaggattgcaatccctgcctttttttgttttccatttgcttggtagatcttcctccatccctttcttttgagcctatgtgtgtctctgcacgtgagatgggtttcctgaatacagcacactgatgggtcttgactctttatccagtttgccagtctgtgtcttttaattggagcatttagcccatttaaatttaaggttaatatagttatgtgtggatttgatcctgtcattatgattttagctggttattttgctcattagttgatgcagtttcttcctagccttgatggtctttacaatttggtatgtttttgcagtgactggtactggctgttcctttccacgtttagtgcttccttcaggacctcttttagggcaggcctggtggtaacaaaatctctcagcatttgcttgtctgtaaagtattttatttctccttcgcttatgaagcttagtttggctggatgtgaaattctgggttgaaaattcttttctttaagaatgttgaatattggccccctctctcttctggcttgtagagtttctgccgagagatcagctgttagtctgatgggcttccctttgtgggtaacctgacctttctctctgcatgctcttaacattttttccttcatttcaactttggcgaatctgacaattatgtttcttggagttgctgttctcgaggagtatctttgtggtgttctctgtatttcctgaatttgaatgttggcctgccttgctagattggggaagttctcctggataatatcctgcagagtgttttccaacttggttccattaatcctgtcactttcaggtacaccaatcacacatagatttggtcttttcacatagtcccatatttcttggaggctttgcttgtttctttttattcttttttctctaaactcctcttcttgtttcatttcattcatttgatcttcaatcactgataccctttcttccacttgatcgaattggctactgaagcttgtgctttcgtcacatagttcttgtgccatggttttcagctccatcaggtcctttaaggacttctctgcatcggttattctagttagccattcatctattcttttttctaggtttttaacttctttgccatgggttcgaacttccgtctttagctcagagaagtttgatcatctgtagccttcttctctcaactcatcaaagtcattctccgtcctgctttgttccattgctggtgaggagctgcattcctttggaggaggagaggcgctctgatttttagaattttcagtttttctgttctgttttttccccatctttgtggttttatctacctttggtttttgatgatggtgacgtacagatgggttttggcgtggatgtcctttctgtttgttagttttccttctaacagtcaggaccctcagccgcaggtctgttggagtttgctggaggtccactccagaccctgttttcctgggtatcagcagcggaggctgcagaacagcgaatattgatgaacagcgaatgttgctgcctgattgttcctctggaagtttcgtctcagagggctgcccggccatgtgaggtgtcagtctgcccctactgggtggtgcctcccagttaggctactcgggggtcagggacccacttgagaaggcagtctgtccattctcagatctcaaatgctgtgctgggagaaccactactctcttgaaacctgtcagacagggacatttaagtctgcagaggtttctgctgccttttgttcagctatgccctacccctagaggcagagtctacagaggcaggcaggtctctttgagctgtggtgggctccacccagttcctggccgctttgtttacctactcaagagcttcctggccgctttgtttacctactcaagtctcagctatggagggcacccttcccccagcctcgctgccaccttgcagattgatttcagactgctgtgctagcaatgagcgaggcttcgtgggtgtgggaccctctgagccaggcgtgggatgtaatctcctgatgtgccgtttgctaagaccattggaaaagcgcagtattagggtgagagtgacccgattttccaggtgccgtctgtcacagctttgcttggctaggaaagggaattccctgacctcttgtgcttctcgggtgaggggatgcttccccctgctttggctcatgctcggtgcgctgcacctactgtcctgcacccactgtccgacaagccgcagtgagatgaacctggggcctcagtaggaaatgcagaaatcacctgttatctgtgtcacttgcactgggagctgttgactggagctgttcctaatcagctatcttggaaccgcctctgaaagctggttttaatgcataggttttaaatctgcctcctacagaaaatacaatcctacaaaccttaatgtaggaacagaaattttcatttgaatttagaagttttagcttaagttaaacttaaatttaatatttattttcacctcttactagatatcttaatagatattttttgtcctgaaagaggttgaggataaaactgtgctctaacaggagttagaaatatattattttctggaaaatcactgaaaacaaacctaggtttacttaggatgttgctgtgaaattcacctcgttttaaatttatgcttagaggctgtaaaattgtattcaattaatatgaaaacatttaaaatgctttttaatgttaacaacctgaccctgtgcttttaactatagctgacagactcaagtgttctgttttccttttcccagaaccactaaaaatgaacctttgggacactggtccctttgtgacaattttagggacccagctccattggctcttgactttacctgctcccattgttttatccaagctctgcctggtttctgaccctttgtctctttcggttctcttgcttgccctgtgtgtttgatgatggagtttgtccctgtccctgaaaccttgcctgaactcctggaaatctttgagaatggtgtacacacatatccactttccaccatgtgcctctaacctcagcctcacccgggttattgacccagtctgacctagcttcagccctcaaaggctccactgtgccaagcctggctcatcaccctctctcccaataactgttctttgtccccaaaaggggctgaggtggggggaatgggcagagtaaagcattttaaaagagaggagagaaaaaaaagataggaagctatagaaatggaaatgtaagatgaggaaaatgtagtctagaaggcagaggaggaaagaagaacaaagagaaagagagccataaatgggtcaatcaaaaacagaaagaaaaggtgagaaatggaagaggactaataagacagtaacaaagtcctttgaagtgttagaacactgaactgctggttagttcttgagggttgtgcacttcactgtgacaactggtatcacccttcccctctgtaggtagtactgtgtccaagattcttggtgtggcccaccagcgcaggccttctatctctctccaacatcctctcccacactttgtactgtgcccttcaggaattccactgccaggggttacttaagcattccatgtagtttctagttaccttcttattctaagcctaaattcttcctacttcttttacactcgccgattcttctccagcgaactccctcttacccttcaaggttctgcatacttggcaggtgacactggtgaaaactaaatttttaaaaaaggttctgcataaggatctccataggcaagacttccctaaggtgcatatatagacacactgtaatgtttattgtgcttcactactgagttgcctttttaaagctaacttaaaccttctaaagggatcttatctcaaaactcagagcatctattttcctctattttaaattctccctctgaaatattctgaatgcttttttaaaggatgtggtgtgtgtgtgtgtgtgtgtgtgtgtgtgtttaaacttaatgtctttccctagccgttctttattaccacaggagctctgggatatcaaataatatttcttaaacctttatcccttttgattgtatagtaattatttattcaaatcagataccaattaaacataattagattgatttcttcacagaatacaaaataaacagaatcatgaaattaagttgttaatgatttgaaggcctccttttctaagacattcatttacaactcttaaaaaagtactgactttaaataaaaatccaaagaatatataattatggaagaggagaaattccattccacagctaagtattattttatttcctttttttagtttcgatactccgattggcaggataaattgtttatgtcgctgggtaccatcatggccatagctcacggatcaggtctccccctcatgatgatagtatttggagagatgactgacaaatttgttgatactgcaggaaacttctcctttccaggtaagcatttctttaccttttaaaaaaatccatagcatttctttaactgggtaaaaatttgggagttgattttgctattcattaccatcttatttaatgatttggatatctggttgactccagatatcatagaaggagttgtaaaattctcagaaaattgttcaaatactcgtttaaatttaaagaaatatgtgtattgttgtttgacttttaatacaggtgaaggaaatacacaggaagcttctaaataaagtaaggaagtcactctacttgagaacagtggaaatgtaatgagagtatctctatgcagtatccatcccattagtaattgctgatgagtttcaaagcacatcagttaaacatggcagtacttcttagctgtgtttagcttgtagatctgtttctgggttttcttttcttctctccccttcaccttaaaaaaaattatacccattttctgtctctaattttggatcaaccagattgactggaacttgagatggcatttcactaaagagtgaatggattcaatacgtcccttggaactcacccaaaggactatgattactgaagagccaagtgtcccataagttaatgttatcaatacgagaggccctgacaatagcattacagtggggctccaatagacatggttattttcatagtaacgaaattcaacatagaaaggaaaattttcatgctttctaccaagcctgaagcctcttttctctaagagaccttgtgggcactgggctggagaagactgagtgaagctttactgttgcacagatggtagaatattttcaaaacactggtaaaggaaaggcagctttcttagcaaagatatgtaagaaaaattactctatcatttagacagcattgaataagaatttacagtgttcactgactgagaactacatatttagttactattgtaggccttacgtgtaatttcctaagagaataggattgtttaattaatacagcagaatatgtttacataaatattgataaatattaatgccttttaaaaatccagtaaaagcatcctttgaatatttaaagcaaactcctataaaagtttatttatttattctcaagtaatatagtttctgaaaaaaacctctttataataaaaataacaataatggtgatttttcattgtgcttactatgtgctaggtcctatgctgagcactttacatacattattccactttaccctcacaagaacaatactacacagtaggtaatgttatcttctgtgatagatggcaaaaccaaggcttggagagggcaaataacttttccatagttacactgctggtctttctgccatccaaaccatgcttattatcatatatagtatagtgtcaatatagatgattcggaaaaaaaagtgcttgggaaagttttaaatggattgcttatttgtgactagtgaccaaaactttaacataaacattgtgaagttgtggtaggacagatagtttaaaaagtctttaaagaggctgggtgttggtggttcacacctgtaatcccagcactttgggaggccaaggtggtggcaattaagttttgagtttgggagttcgagaccagcctgaccattgtggagaaaccccatctctactaaaaatacaaaattagccaggcatggtggctcatgcctgtaatcccagctactctggaggctgaggcagaggaatcgcttgaacccagggggcggaggttgccattgcactacagcctgggcaacaagagcaaaactccgtctcaagaaaaaaaaagtctttaaagaaatgggagaggtaggaattttctattgtgtatttgttttcctagaaaatctacagatctacaacatattaattttgtatacatatagagcaggatgatgcccatattaagacacctcagttaaaaatctatttcttatggaatactacacacctataaaaaatacgaaatcaccagctacttgggaagctgaggctggagagttgcttgaacccaggaggtggaggttgtagtgagccgagatggtgccactgcactccagcctgggcgacagtgcaagaccttgtctcaaaataaataaataaataaataaataaataaataaataaataaatacaaaattgtgtcctttccagcaacatggatacagctggaggcaattatcctaagcaaattaacacaagaatagaaaaccaaatactgcatattctcacttataagtgggagctaagcattgggtaacacattgacataaagatgagaacaatagacactgagatctactagagaggggagggagggcagcaagtgttgaaaaaccaaatactaggtattatgctcactacctgggtgacaggatcattcatatcccaaacctcagcatcacacagtatccccatgtaacagaactgcacatataccccctgaatctaaaataaaaattgaaattattttaaaaagaaaagaaaaaagaaatgcagactcccaggccacatctggacccactgaattagcaatggtattttagcaagacatttccttccccacagtgaatcagagatgcatttatgcacattaatactcaagggtctattaaatggtctgaccttccagatgcggagctgggtttctcacccatccctttagtagcaggacaatgactgtataggaacttacaccagctgcctttgatttccatcttatttcatctggaaaaaaaaaatcaaagaaactacaaagacgtttctccaactcctgaattgtcagcaccatatctccactgcccctactttgaaattatctttgggtttcacatttcctgatcttcaaaccataaagcaccatttattagagcaccaatggaatatttttgtggaataagacccaactttatctgttcatgtatggtctagcacctcttttcaagtgtcgcagatattatctcttggtgactcacattagccttccagcgaagcacttatatgtccataaaatatctgtgaaataatgtagagaaactgatgattacttctagggagagaaagtgagtggctttgaaaatgggtgggtgtgatgtctccctgtattctcgcttgtaactgttgacgtatacacctttaccaagaaaaaataaatttaaagtaaaaaaaaaattttaaatggcttctacacagggttaaaaaaatcagattaacagatgaatggaaaaataagatatggtagatacatacaatggaatattattcagccttttgaagggaaataacttctgacatatgctatgtcatagatgaaccttgaggacatgacgctaaatgaaatgagccactcaaaaaaagataaatactgttcgattctacttttatgaggtatctagagtaaaattcataagaacgcaagtggaatggtggttaataggggttgtggggaggagcagtggggagctgttgtttaatgggtatagaatttcaattttgcaagttgaaaaagttctggaggttggctggacaacagtgtgaatatacttaacagtactgaactgtacacttaaaaatagttaacatggtaaactttatgtaaggtattttatcacaattaaaatttttaaagtcagattaaagcaatgcaattcacttatcacacatcatttctcttttggaccaattttattagttctgtttttgtttttactaataccagaataattcccaactttcttatttggagcagtttgcttttttttttttttttaacttgtgcctaattatgaaactgaatggctttaagctggacatggcagagaggtgccaaattcaaggtctctctggggaatggcacaagcaagtcacttacagaactgtggttgacacagagataaactcgcgagagttgccaactttgttttggtagcctccgaattataaacactcctgttatgatgcttggtaccctgtagccatgtttctcattaggcttactggatgctatggagtatttagatggaaagttcctcaaatgttatgaatttccagcatccactctttggtcgtttgtaaaaataatattctcatacctcttagaagacaatgaaatctttaaaggatactcactctaaatccagactgcttattgatgtgttgagagttgtagagtttaacaaaaatcatgggggttgggaacagatagagtgaggtacttagctgaggttccagcttatctcttagagatgtttacttagtctattctttagaattgttggatgcttggacaaccagacttaataggagccaaatgagaaaggcatgttagaagaaaaaaaggttcatattacaagagggtctgacaatgacttattgtgagcaaagctcgtccttgtcaacagaataaagccactccatgacagggttgttccctcacaatgagtcagttgtgcagaaagtatgcacacaacattctgcatccaaaacattaaggacggagttggagaaaacagtttttctgcagagtgtcaaggacttgatatcttttatgctgtctctgtgactataatagtctagaaaattctgcgggaaaatagctgcaccctgattgtccttgcattgcctcttgtttgaggggaaaaatgccattttgagcccccaagatatcttcataactgtccatagtgcctagggtgcctgaacaaacaccagctctttattttataatgaatagttctatgtgttaaaagaagtcctaggcaacatttaaaaataactaaaagtacataattggattgtttgtaacacaaagaaaggagagatgcttgaggtgatggatacctctctttcttcccctttgaaaaaaaaagaagtcttgggcagaatccgggaaggcagacattgatttactttgagactcaaaagtgaaaatgaagactatgtttccctatctaatccttaatgtatacactgcttattcagacccttcacccataagctgtgtgaccatgagcaagtctcttaacctctataatccttactgttctcatctttgagaggtaagcatcaatttactgatagaattaagtgagatgatttgtgtaaagtgtctggaacatagtaaatgatcaataaatattgggacaaactagctataagaacttggaaatgaaacaacccactctgtctcttcatctgtaaaatggataggttatataggtactctctaaaatgaacaggcagcttcaggagttccccagttccttactacgggaggcattcaggtggactggggtgtaagttctccatcctggcatattagaatcaaccagggtactttttcttttttgagacagggtcttgctctgttgcccaggctagagtgcagtgaagtgatcatagctcactccagccttgagctcctgggctcaagtaatcctcctgcttcagtctcctgtgtagctgggactacaggcacctgccaccatgcccggccaactttttgtaaaggtggatttcaccacgttgcccaggctggtctcaaactcctggcctcaagtgatcctcccgcctcagcctcccaaagtgctgtaattataggtgtgagccaccgggcctggcggggggcactttataaaaatgtgatgctctggactcaaccagagattctggctgcattgggcttgagtggagcctgaacatctgtaattcttaagctccccatgtaattctaatgcacagacagcgttaagtaccaccaagccaaatgaccatgtagatatcgtttatgagactgaagcagaataggtagcatctgacaagaccaggagtaggctcttttcagatctagcaggccatgacttttcaggcaacacaccaacatatgtttagttcacctttgtcccaggcagcagaaactctgagtttccccggggactctggagctcctcaggttactaacccagcactagatttccattcttgagactctgagaaaggagcgggtccaatctggaacgctcatagattctttcctaggagggagagtcaatttgagttggtatctgtgttagtccattttgtgttgctaggaaggaatacctgagactgggtaatttatgaagaaaatatgtttatttggctcatggttcagcaggctgtaaaagtatggtacccacatctgtttggggcttctggcaaagcctcaggaagcttttactcagtgagggaaggtgaatggggagcagatgtgtcacatggagagagagggagcaggagggagaggccaggctctctttaacaaccagctgtcacatgaactgagtgagaactcgctcattatctcagggagggcaccaagccattcatgtgggatctgtccccttgacccaaacacctcccatcaggccccacctccaacactgaggatcacatttcaacgtgagatttggagggaacaaatatccaaaccatatcagtatccttattgagagaatttaaaagtttgaggtaggtgttgaaagagaggaaaaacttatttaagatttcacccaatttttcagttcagggaaataaaaaaaccacaatgatttttacaaatgccacagctttagaatagcttgcctgcctctagttccaaatactcttccaatttgccctatttaaaacttcaggatggaaatgaacacacagaaaggaactgataagatgaaaagtaaaatagggtatgaatcttcaaggttctgatagcttataaagagctagattaataatcggaaatttcactgtgaacatcagtagaaattataatcctgggggaaagatgatgctgcagttggggccagatgcctggtaattgatcctgacagtagtttgagttttaaataagtttcaaccttatctttctttggaaaaagataaggaggatacacagcaccacgaaaacacgaaaacacgacccctgggctatttacacatggcaaaggaacaaagagaccaatttctctcctaggaccatggaaaatgagaaatatgtaccctgatgtgttttctcaacaatgctgtggtgatattttatcctattattttgtgaatgcagtagatgtaggctgtttcttattttttcatttgtcttttctaaaaaataaaaataagtcattgtcacatgaataaatcagtatagtatagtgttacgagcataggccaaattgcctgggctgactttcagctctgccacttactagctgtatgacattgagtaagttactttatttatctgtgcctccatttcctattctataaaatggggtttgtgaaatagtctcacctcataagataattaaatgaattaacacacctaaagtattcagagcagtgcctggtatttaataaatgctcaataaacattagctattattaaaacatggaaatcaggaaagatacattgacattttatcaaattagctcaaattaatagacaatagatttctttccaattaatactgcttcaaaaaatactagaatacagcagtgctggtaaacaagaggtggaatgcaggatgttcactaattgccagtgatcactgacatgcctttgagcaactaagttatcttccctgtctagtttttcctcctttgcgatggatgtaacttagcctttcccttacttatgtcatatgagacatgtaaagaaaaaacacacagatataaaaataaaatttattgaagttctataaagtgctttgagccaccaaaaaaaaaaaatgcctcttaaatcctgtgttttctattttaaatatttcttattccctcctctgtcttctgtgtgttttgtggcttccttgtctcttcagtggctcctctgtgcctccttagaaggctgctttgctaaaggctgagaccgccaggatgggggaaagacctgggagggcttatcttcccctttcttggcccttaatgtccagtacctaaacccttgggctctttacttgagtaaagtgaaaagaatgcacttaagtgtgcaaagaaaagtgttttttaaagagaaacttaacaatagcatcttctagctttcatacatttaaattattaacagatttttaaaaacctggcaatgcctattaatagtttgatcttttaacatgttttattttattttttaatttagtgaacttttccttgtcgctgctaaatccaggcaaaattctggaagaagaaatgactaggtaactcatatatatggtctacttttttaaagtttcatttgaagataatttccaattacagagttataagaatatacaaataacgtgtactctttacccagattcacctattattatcatttttgctcccaaatcccaatttaaagtaagatgcacacatcatggccctttactgcagtatgactcctaagaataaggatattttcttacataatcacagtacagctattagcttcagtaaatttcagtacttttatctaatataacatctatattccaattttgtcatttgatccaataatgtcatttatggcattttctcctccttctagtttctcaatagaaatctctaaagcctgtaagcatgatgtttgtatgtctgcatagcagtgttgctgattgtaacgagtgctgtctgtatgctaaaaggcctgaaaggtgtctatctggaagcagtttataaaattagataataaaaatttgaaagtattgatatgtacttattattttttaaaatactaactttctactaatttggtaaaacattccaaattcgtttgaattcatgacattttatcatatctttttttaaaatatttcaaattctgacaaataggaacaaagttttttggttctttttataaagaatgtggaaaaatcaatatggaaagggcgatttcacatgttcaatctgcttattactatatttgcaatatgtaaatagtagtgaacttttcagtacaataagatatacaagtctagaatataattattaaagaggagttaaattgtatccacaagttatcaatatcagttaaaaacaaatcattaacttttttgcagttaacaacaaaaatttatccattttctttggctaacagttcaagtaaatagatttgccatcatggagctcatcactttataatttaaaaaaagaaaaatgtaatgtctgtttgttataatgtcctatacagtttttgttttaagtttagtaaattgattaatttccagttctgaaaatttctcctgaaagagatgaataaaggatggtagggtgggggtggtggctcatgctataatcccagcactttgggaggcggaggtgagcagatcacttgaggtcaggagttcgagaccagcctggccaacatggtgaaaccccatctccactaaaaatacaaaaattagccaggtatggtggtgcatgcctgtaatcccagctactcgggaggctgaggcaggagaatcacttgaatccaggaggcggaggttgcagtgagctgagatggtgccactgcactccagcctgggtgacagagtgagactcagtttcagaaaagaaaagaaaagaaaaaagaaaagagaaggtatttaatagagcctttctcttttttttcagatatgcatattactactcaggattgggtgctggagttcttgttgctgcctatatacaagtttcattttggactttggcagctggtcgacagatcaggaaaattaggcagaagttttttcatgctattctacgacaggaaataggatggtttgacatcaacgacaccactgaactcaatacgcggctaacagagtaggtacattgttaatgtcacactttcatatagaaattaattactgtgtgaaaatatgtcaaggaaagattttaaatgaaaaatgttactagattgagcatctgatctatattagaaatcgatcatctggcagccatgtctagcagcatctatagcctatgccattgcatgttggctttcccccaaggtgcatagtaggtttatttgaggactgaattcacatcttatacctgtttatttctcatggaactttctactgcaggacgtgacaggtgctagactgtcagtaaagatggttgaatcaatgaatagatgattgaattaatttacaaagagacttgctttagtaattgtcaactcttcacttattcaacaaatatttgagggtgtttcatgtgcgaagtaccattctgtgtgttcgtaatatatcagtgaacaaagcacagatctctgtccttttggtgcttacattccagtagagggagatagatgataaactttcctgactgggagtcctggcaaaggcatcctgagcaaataagtcaaaaaaaaaaaaaaaaaaaagggaaaagcaagacatttagggccttgtaaacctccacaaagacttcaagacttcagctttcacccagtgaaatggcagccgctggaagtttctgagctgaggagtagcatggtcagacttgcattttcaaagcatcccactggctgctgtgttgagaatagacttggttgggaatagggacaagagtagaagcaaagatctcttccctattacttccctataagaagaaatgcagtaatacttccctactactgttgcttattattgttgcaatgttcttcttaattcttgcttttaaacagatacatttttatgctcaaaatgttaatgcttctctcataggattgactcatttaatagtatcaacttaatgatactaacttattagaagcattgatcaatcctgaatttcttcctttgtgcggtgtttaggtggggaagatgttattcaagaggctaagactctgaaagaggcttgcagtcagtgaacaaattttacttgtctatgtgtttgttggatgtctacttcatctttctaactgaaacctcctgcctgtaaccacttaggtgtgatcttttttagtgacatctccaaaatcagtgaaggaattggtgacaaggttggaatgttctttcaagcagtagccacgttttttgcaggattcatagtgggattcatcagaggatggaagctcacccttgtgataatggccatcagccctattctaggactctctgcagccgtttgggcaaaggtatgtgaaagctgggcctttttatgtgtgttaacccctgcacacagtaatctttaatatgcagaagtctcgtacttgtacctgttcaggtctacattaaatgtcagttgaaactacatccagtaacatggtgttaatatgatgctttcataaggaaattaatttttaacataattcaaaatgtcacaggctgggtgtggtgactcattcctgtatcccagcactttgggaggccaaggtacataaatcacttgaggtcaggagttccagaccagcctggacaacatggcaaaactctgtctctactaaaaatatgaaaaactagccttgcgtggtggtgcatgactgtaatcccagctacttgggaggctgagacaggagaatcgctgaactcaggaggtggaggtcgcagtgagcccagatcatgccacttcactccagcttgggtgacagagtaagacttcatctcaaaaaaaaaaaaaattcacagttcttacttcgattacccttagttaaggaagtgcaactttaaaatataacatttccctcaaattattgcatgaacataaaaattttaaatagagtttgtatttgttctatttgttttaatcattacctgtgatggttaagtggcactctgccagttttgcctggcaataaaatacacaaaatgtattctactttagccaacacttcagagttgagaaattttactggcaatttttgctcatcctgacgttgatgatttacacagtgaactacctgtatctcttttgttttgattcttcctttgcttttctcctgaaacatcttgtttggctatcttattattcagcagaatgcccatgaggaggtctggaagtattgtttttatagtaattaaaaattgtgacacaagtccaaagtgggtggatcacgaggtcaggagattgagaccatcctggctaacacagtgaaaccctgtctctactaaaaatacaaataattagccaggcgtggtggtgtgcacttgtagtcccagctactcgggaggctgaggcagaagaatcacttgaaactgggaggcagaggttacagtgagccgagatcgtgccactgcactccagtctgggcaacagagtgagaccccgtctcaaaaaaaaaaaaaaaaaaaattgtgacacaataaagttaagaatggtaaattctttcaaagcagtaaagttttattttattttaccttacaactaacaaagaaaaacagtagatgtggaacttgacagtgttcccaagagtgctatttagagaattatgtgtggattttcttttttcctgagtactcttggggagcctatcaccagggtgggtcagatatagcctttgagggatgtggacgcagccattggatccagaacactggcatttgctacatgactttaatatttgttaaaggagagggtttgggaagaaaaagtaggttaaagggttgaccagagtgcctttaaacttttctccctatacaaaagtgatcactgtttcttttctgtccagatactctcggcatttagtgacaaagaactagctgcttatgcaaaagcaggcgccgtggcagaagaggctctgggggccatcaggactgtgatagctttcgggggccagaacaaagagctggaaaggtcaggaaggttctttagccactggtttaaggaatgtgtttttacattttgttgcttcttctttgtggtatgtgttttttaccttccctttcctaatattaacccttctcgcataaattataagcaccctttactgatggctatagttgaatgtcagactctaaagcaagattcttaatcatttatgttccatggactcttttggctatgtgataatacaaatggactcccttgtttttaaatgcataaaccaaaatatgctagccctttgggaagccaaggcaggagggtagctggaatccaggagctcaagaccagcctgggcaatgtagtaagaccctggctctacaattttttttttttttaataagctgagtgtggtggtgtgcacctgtggtcccagctactcaggaggctgaggcaggagaatcccttgagcccagaatgtcaagggtgcagtgagctgaactccagcctggatgatagagtgagcctctatcacaaaaaaagagtaaaaattttttaaaaaccaaaaaataaataaataaaagccccaaaaaacaaaataagtagggttacaaaggaaaataattatattaaaaatacttatcaaaatattttttattttattttactccttaatgactatgaactggaatatagaagagaaaaacctgagaaaacatcgacttcctagttatagcccagaattctttgtagggccttgtgggtcctccataacaatgaggcagggcttcccacccaggcctctggcattcaactttaatgatccaggataagcctggaaaattgaccagtatctggaggcatgttgcaaactcttctctgaaaaaattatcaaggcatgattgacatatgaaaagctgtgtatacatctttagtgtgtatatctcaatgagtttggggataagaatacacctatgaaaaaggctattctgctctacttaaatgaaaataattacttagggttttatttaaataacaatatcccctactgtagttgaagtatgattccatataaagtattttctttggctattctatgggactcttgatactcacaactcttggatataaaaattctctggaaattctctagcattaaaaacaaagtttcccttattccccccatttaattttctacttttctattccttaatccctcttcaaagccaacatgtttctgatcctctaacctcttccttttttctctctcactgctgcttcctgtacataatagtccacacagaccacactaaccctcagttggacctcaggatgtcagtgtaatctgtgccgctccattagccccggtaagcgagccacctaagcaaaggtaattacagtgtgtccgctgctgtcactggagctgtgtgtcacactgggcagatgcaagtcttcctgccacgccttgaggctcagccacacaggagaaatcacagcgctagctgtggcctgctggctacccccagagatgcagctgtgctctatgaatgcagcccccaaccagaggaaagcaccctgaagacctgggtgctttacgcaataaaaaagacaaaccttctgatggcagaatatgttttttaaaagactaatgaattctcatgttttatttggttcaacactaaaactggtgttgctgtgttttgttttttgtttttttttgtcacaaagaaaaatatcctagtttgtgtgatattttcccctcgaagtgtcattgcatacccattggatttttctttaaatttcagggagcccaaattaaattttacataccctctgggtctagtatgaaaaagtagatttgatttaacttgatgaaaaaaaattgtaatttaacagaatcattctagatattttaaactttatatcaaatgccagcagccagtaataatgcatttgaattatgattcaaagatatgatagtaatagaatgagcaaaactcaggaagagataaaagttgaacacaatgatactaatataatagtaagagaaatgatcaggcttgctaactatgaaccagctactgtactactttctacaattatctaccaacctcacaattatcttgcaaattaggcattattaaatccatttttcatatatgaaactaaagtctggaaaaattgaataagaactcatattccataagtagtgactaccttataacctgtatctagcttgacagatgaaggtcagcctgatttttaaaaaagtcaaagagagaagcctatgtttatgtacaacaacatgtaaaattttcatccctcacccagtggacaatagagggacgattttcttttctccagagaagagacattgaccagagttaagaatctaactgtttatgagttccagtgacatttacaatcaattctggtttggcttggtttctctcattccctcttaaccctgacttgtgatattgccgtgaaggtgatggagaagctcttccatatcccagggtgagccctcaattctggaataaccacaggaatgttggttggcttggaatggatgaagggaaatggaaccgggccagtaaagagaaggcttggatctgttctaggcctggctgatcctgaattagttcaattcccaaagatctgggtctcaccatgggttcattaccttgactgactttgttacttaaacctccaactatataggagccgagtgtgactcggactatggattgttattcttaattataatgttttccctctcatttttctggtaggtatcagaaacatttagaaaatgccaaagagattggaattaaaaaagctatttcagcaaacatttccatgggtattgccttcctgttaatatatgcatcatatgcactggccttctggtatggatccactctagtcatatcaaaagaatatactattggaaatgcaatgacagtaagtagttctcctaacatttatgaagaatatgaaaatcttatttctccatctaccttctcttttctttgatatcgctcctttttgaaagatgaacatgattataggtttttgtttttggtgaatctttccactgtccagtgggcagagctgactttctagtatatacaagtcataattatgagtgtggataagaaaatagcatgtggttagaccatttgtgaaacatatacaatgtataaaaggaaataaaaatgggatgaatttaggaataaacaaatatggatgggagccatcctccctctgccgttgagttttattgtataagaaagtaagcatcattattacagaataggtcattgcacaagaaaatgttacatttatatcacttaaaacaatcagctctctgaaatacaagaagagatgttatgttagtttgtttttatttatcaaaatgaagatagcttcattttatgattgttaaaataatatatactaattttacaaaggattaggatacagaatttttaaaattaaaattacttacaatctaataatttatattctcttgatgataatttttggcatatatcttccaggtcattttctatatatatacacattgttttctttcaaaactgggatcatactatgtatatctttttgtaaccacatttatgaactaccaatattttgtgaccatcttttcatgtcagagactcagaacaatatgtaactatttaaatagaaatcttttaacatctgtacttccctatcttgctaaaatgaggatactgagcataatttggccctttgatgatgacttggggtcattatgaaagtgaatattttcagaatgctttatgcagtggtatcttcagacttcattgagaggttgtgggtgttcgacttggtgagccctcattaatgctgagtctaatttttctcacttccatcttctctctggcagtcggtttggaagcttgctaccctttcttcacttcctcatttactattgatgttttatgaagaagggaggttgaatcctgacaaccgttcacctttggtgatgagtttgtcctctatggccttaatttcctcatttgtagtatgtggataatgacacctatccggtagggctgagattgctatccccagagggagcccaagcaaagccctctgcatagagggcagggactctattgcattaaccttatggcaactattttggtcaacattatttttctttcttactggtccttatctgtattgcagatgggggatagatatttaactgatatttgagttatgggtaacatgaagtgttgctgtgttttgagaaaagccaaattatatgtagaagttttaccatgccctgagagaaaaaaataatttatcttcacttatgtttttctcagttaagttatgctaataatctggattcctgaagctgtattctgagcttctttatatcaattcattttcctagtgaaaaaatactgtgaagggaaatgtgttaagtgttgtatgctacagtacagaataactgtgtaaaggaattgctaaccagtgcacactggagtgattttatgttttatgatgtgcaaactgttactttttatgttaaaaatctttaaaaatatatgtgacatggtgctttttaggagcattacatagggccaaaatctgccatgttttatattgaaccgtctatgtaattccatgcatagttagagaaaatcatataggatggaataataatactgactgaaaatgtttctttctggtggcatttgtgagtgagtcaatgaaataggtttgaaaaatctttttaactctgtatgtattcaggagaacaataggtagtttgagaaaatagacccactcaggcaataaaatgctatattagccttgcaaatgttgctcttccacaaaaaaaaaaggaaaggataaacctaaacttaatcctttatgtactatgttacatatacatcacattttagataataatgaatgccagaatgtgacttaaacttttcctcatgttattttgctcaggtttttttttcaatcctaattggagctttcagtgttggccaggctgccccatgtattgatgcttttgccaatgcaagaggagcagcatatgtgatctttgatattattgataatgtaagtcatttattattttagtgccaaaagaagtctttgagcttgtataattaaatctggctttagtttgcatatttttgaatcaactacattgaataagttgtactgactaaagtgacatttaattatatgaaatgaatgacctgttagtaataaatgaaagaaaatacctcttattaatattttttaaatgtatctttagataatataataatactgatctcattttggaaaaggacatctgcactagtgcagagcaaagacgtttctcttcctagtttttatctttttcactttcatgttgtagccagactgagaatcttatgatttctatatgggatggggggtagataaattatcggtgggaccaaaattgacagtatattttgctgtgggttccccctctccaaaaaattatcactgcatgtttggtatgattttaaataaactacattaaataaactgactacagtgaaaaagaaaaagttttgacgtaaaaaagtaagtcactgcattcaaatattgcaaggtagctaagtgaaatttgatcatttaatctaagcaatttcctttttcattgatccaagtcgtgagaaaagtgctcagtttctgattgtattaaaagtttacattatttctaaataactgctataatcaaccattcaatcttctcaattcaatctattacatttattatttaggaatgagctaattttcactaaatgctgaaatacttggctataatatatatcaattatagcatatttttgttattgcacttgtataaatatgcatatctgaccatttagaaaatttatgaggatatgccaaaaacttaaagggaaatattatatgaaatgagatgaatatctcttacgtacttttcaggaaaacactattttctgaaaaggagtatttctttaaacagcacacatacatatacacacaatcttcatcttgggtttttcttatgtaaaggggattgtgacattccaggtcctatttttggaatttgctgaatcatattccttaaaaatgcaacttgtttgtgctatgatggaatagtcattacattttgttttatttagaatcctaaaattgacagtttttcagagagaggacacaaaccagacagcatcaaagggaatttggagttcaatgatgttcacttttcttacccttctcgagctaacgtcaaggtactgtaagtaatatttataggaattcctaactgaggttgattgttgaatcattttaaagaataaagtctctattattttgatacttatgtgccttttcctttgggggttatattcccttatttgatacttttttttcaaatttcaaactgaatcgaattattcccattttagggctttgttgtgaagtgtgttcttttttctcattttccttacagatcttgaagggcctcaacctgaaggtgcagagtgggcagacggtggccctggttggaagtagtggctgtgggaagagcacaacggtccagctgatacagaggctctatgaccctgatgagggcacagtaagtgggaagaaccaagctttccagagtgggaagctggatacaaattggccctttgaaattggtttttcagtaacaaatttgcgtgtgaatccagttttggtaaaaagcctacaaaatggcaatgccgatggataatgccttcacacccttgggctggtttcacaaatgcattaaataaaagtcataaaagctgtggaagctggacaaagctctcctctgttctgactaagctttcataacacattaaattactgcaaagcagtctacaaaccactgagaggattactttcaatgagttagagtttggtcaaacatactccatatagcaattgttgggaacaattgatgacaattagggtcaccagatattttaggacagcaattaaattcatccaagacagttgagttttcttaaacttaggaatatctaagggggaaagtgggatggtctcttaagaaactagtctcttgagaaaattctagaaacacagagacagtaatagcctagggtatgtttttttgccatttaaaagttttgctataaatttgaatttacagaaaattgtaactagagaactcacagatccttcacccagatttagattgtttatattttgacccacttgctttatcatcttctctttctccgtgtgtgtgtgtatgtgtgtgtttatgtgtgtgtgtgtgtattatgtatacccttatacttcagaatacattcctaaaaaggacattctcttagattaccacaaaacaatgattaaaaatcagtaaatttaacattaatgcaatatacaagtccacgagctatattcagaatttcctcagttgtcccaattttagagcattgagtttatctgatattaaaatggattataattcaataattgtgaaaacagaagattataaggtaaaaagtaaaaataatggcatgccaaaaccaaaaatcataaaaaggcattgggacagaacagagatctccagaattaatacataattttctacaatacatggaactatttatttaatttaataaaattaatattattggaaaaatctgatattactatgggggaacataggcccattctcatttactaaagtaaactctgggttggttcaagtgtaaatattttctttattttttaaaaagaacctggtaaaataccaaccattgagaattaaattattattgaaacaactgacatttttaaagaaagcatatgttaacagaaaaaaaagatcttcagaaattctataactcagagatattcactgttaacatcatgatttaacaattttcttaccactgaaataatagaaaaaaatgcccagtggcataattgattaattcagttgttccttaagcctctttccaataaaaaccaataaaactatgatgaaagaaagcaataaaggcctgacatggtggctaatgcttgtgatctcagcactttgggagattgaggtgggaggttcacttgaggccaggagtttgagatcatcctgggcaactaatgagaatctgtctctacaaaatattttttaaaatagccaggcctggtggtgtgcacccatagtcctagctacttgggaggctgaggcaggaggatcacttgagcccaggagttcaaggctgcagtgagctattgttgcaccaatggttgcaccactatgctcctccaaagcctgagtgacagaatgaaactctgtctctaaatttaaaaaaaaaaaaggacaaaaataatgaattggaacaaaagatttattatatatggaaaaagtattatatttattattagagaagttaatatgaatatatgaaggtaaccctgctcattatgaacatgcgactctctggaatatataaagatttgtaaaaagtttcaagaaatggtcaactttataaatgtatacaaatgaaaacagatataagctatcacctcatacctattaattggaagaaaacagattaaaatgataaaacccagtgctagtaaattacaatgaaacagatatatttatatattcctgttgacaatgtaagttattaaaatgttttaagataattatttagccttttattaacaagcaacaaatgcccagcaaatccagtcattgtacatgtaagcaattgttgtcaagggagaaaaaataaatcataatcttcaacttagtaattctctactcttgcaataaatattgaagtaagtcaaatatttaagaagaaaggaagtaaattaaagcatgtaaaaaatagcaaaacatgggccaggcgcagtggctcatgcctgtaatcctgtaatcccagcactttgggaggccaaggcgggcggtcacgaggtcaggagatcaagatcatcctggctaacatggtgaaacaccgtctctactaaaaatacagaaaattagccgggcatggtggtgggtgcctgtagtcccagctactctcgaggctgaggcaggagaacagtgtgaacccgggaggtggagcttgcagtgagtggagatgggccactgcactccagcctgggcgacagagcgagactccatttcaaaaaaaaagcagaacaccataagctatcaaaattatatgtagaccaggaaggtaagtgtgcatttttatttaaatttaatattggaacataaaaataatggtatgccaaaaacataaaacccaaaattgtttatggcaaataatccttccacgaaaaaactgtatatatgaaaataaatatcaggagagagcataagctttttatttttgttcttgcatattgctgtttatttctaattattatttctaaacactgaaccaagttaaatattaggtaggatgtttttcatgaatggtcctgatacttcagctattaaatggttaaatacttaataggaaatatttctttctttcagattaacattgatgggcaggatattaggaactttaatgtaaactatctgagggaaatcattggtgtggtgagtcaggagccggtgctgttttccaccacaattgctgaaaatatttgttatggccgtggaaatgtaaccatggatgagataaagaaagctgtcaaagaggccaacgcctatgagtttatcatgaaattaccacaggtaaagcctctgataaagtagttgtccttgaaattagaatttcacctcataggactgagtttattcttcaaaggtttagctaataatgtttgagatgcaagattgtccaactttgctagataagtcccctgaatgactcagttaggggttaaaggattatagcatggtagatgattaatataaaattttatacagcatgtgtcagttttttataattcagaattcatttatcttatcatactttatgatacattaaaatagttaagacaaagctccatgttgtctttatgtagttctatagaattcctagcctttttaaatttaagttacttcaagagctgatccatgttttctgtgttagaaatttgacaccctggttggagagagaggggcccagctgagtggtgggcagaagcagaggatcgccattgcacgtgccctggttcgcaaccccaagatccttctgctggatgaggccacgtcagcattggacacagaaagtgaagctgaggtacaggcagctctggataaggtcagtagactctaaaaagctgaaggaccaccacattgaaacctattgaagattcttgccagtgcttccggagtctgggctgagaaacagaaacatagcaaatggagctacctcatggagctgtattgatttctcctttctgtcaggttacattgtcttcagagacaggtgaagggtactgacttgttttgaccatggtgcagtgagcccagatccaggtctttataacaagccatttagctttgtttatttcttgcacatgggctattgcaagactacttttgaccaaaagtagtcatgttaaaatatatatatttttaaatccggttacccagacactggtccagctgaaaactaattcagaatactcaccctattttgtaggcagtgacatcatctttatctattcatgtaggtgaccaggtgcttttctggaaataaagttcaactctgtacttgtctaagcatataaataaacaattcattttaagggtgctgagttcatctgtccagctcagatatttctaagtctctcattagcatttttactaagctgaagtgtcacaggaaagaccttatcttggtacacttttgggggtaatgctgatgtcatctgtattaacaacacaatgtaaataccagagtcagatgacaccatagaaattagtttcaaacacataaatatcataaatatatttgatttaagacagttcagtaataatatgtgcaagttccttaaggaattctatctgaaccacctcttacaatttaagagacaagctgcacgaaccttattttctcaggaaaatttatatctgaatcctaagttaacctaattcccttttatgctgtaaactgtagttaattaatgcctcatggtttatcagcttaatatcttgactctttttgttgttttttaagacagggtcttgctctgtcacccagcgtggagtgcagtcgtgtgattatggctccctgcagcctccacctcctgggctcaagccatccttccacctcagcctcctgagtagctgggactgcaggtgtgcgccaccacacctagctaatttttgtatttttggtagagatgggtttttgccatgttgcccaggctggtctcaaactcctgagttcaagtgatcatcctgcctcaacctcccaaagtgctaggatttatagatgtgagccactgcacctaaccaatatcttgacttattttatataatttaataatgattaataacacaataataattattccttacaaattcttgcactgaattatactgcttttgtgtatattaaatcatgatattaaggagtcaaaatataatgcatatgagactggtatatggttggttattctgaagttacttaaagcagtacatcataaagtaatacatgcataagttattctaacttaaaaatataattagacattcatgtattggcatagactttttagagtaaagtcgggtagaatgagagatatatttaccaaaaaatcaaaaacaaaaaagagtcctattcagccctggagtctaggttccaatcatttccaggatacagatattcaatatacaatatagttcttgctgtgctaaaagaatagaattattggagatgaccagtatgtattgtttttcataatatgacctctgccagaaaaactgtgatcttgcaagttttagtacgtatttggacaagtcaattcattcaattttagctgtttcttcgtgttctataggatcatagcacactcctcagttgataaccttttttatatttactttaaaaatagctgatgaactactcataattttttaaagtctccaggaaaagccattagcagcttagggtgatggttaagagcacaggctttgatgctaggctgggattggagtcctggctctgttcttttctagctgtgtccttgggcacgttaactaacctctctaagcctgagacatctctgaagtaataggggaagaggggacagaaatagtatcataggattatttaaagaataaccaagatactgcatgtaaagttattagcacatgcctagcacatatgaaacacttgatattgttggctgctgctattattatggtgattagcattaccaggattattattattattattttttggttgctaaattggttacctattgctatgtaagaaactatcttgagtccacgcttaaaacaattcagtgtattggctgagtagatcctctgttctttccacctgagcacatggctgcatttacctggagggctggcttcattaaaatggtccatggtggcctcactcacacgctggctgttggctggccatctcaattctccatgtgacttctcacactcatacaataggctaacctggcttccttatatgaaagtttcagggcagtgtacccagagagcaaagactaatgtgtgaagtgtccagaggattagactccagaactcatcttgttggtcacagcaagtcataggctagcccagatttgaggagataacagactgtgcctcttaatgggtgagcagtaaaaaatctgtgaccatattgaatcttctaaagcatgccctctgtcacaattatttacatttcttccacatgcaaaagaaggtcacctcttcctcagaccctcaaaatgttcatacagtgatagcatctggctcaaagaccagtatctgaagatctgcatgtggtctaatacagatgagggtcttcattttcagctcatcttgacccacagacctatgaaaaagacaagttatcatcaacacatactctcaacatagagtggcggtgcagggacaggataatcatagcagatactcattcaaaaaggatgagaacagaaagctcatagcagtccttggccatagcaattctgacatgcagccaattaccccactactccagggaaatgggatgtttcttgattaaggcctgattctgctccccaggagtgggttccctagtccattgttctctttagttccagggtcttttaccttccctctaagagggctttcctttttcataagaaatgatctgtatctgcagctgagtggatttctttgcatgtttctgcccatagaaatttggggcccttttcattttgtatttttttcagtctcttttagactaagctgaaggactgtcttaaagactttgtgagtttacttagaatctagctgtcatttactcaagccccagaagttatgcctatatattttattttgagacaggctcctctcttctttgggctgcaagtgaacctgccatcagaaaactcttaaatagtttttaaggctttttttttttttgtagctgaaagtgtccactaggctctgcctaaaatctttcagagatttttgctaaaaatcttacacctacacactctgatttttgccctaattttattggatgactaacaacttcattttccaactgagtactggggtctgctttattgtcttaaattctccttgtaaccaagtagctcattctttagctgatcattctcttcccaaacctcattgtacacagctaggggaatccacttgtctctcctatagtctgtctagagatgtctgaaatctcctcagccagatgtacaggttcattaagtaaaatgtctttcttccaagtcactgcaggaaatatttttgtcaaattttccaaggttacataatgaaggtactccttttctatcctctaatagcaatttctttactcttgtttcagtctccactaacaatattatcaccttcctttcaaccaccacctaccactcaatcccaaagccaatgtcacatgttttaggtttttggttacagcagcataccaatctaattactaatttctgtatcagttgttttaagccaagaatttagtgacttaaaatacaacttttattgcccacaaatttgtgggttggtaaagtggtttttctgttggttttgcctagtcttatttcagctcagggtcacctgggctggaatattcaaagtggcctcactcatgtgcctggcagttggggatggctgttgcctaaggcaggttgcttttcctccctgaagccagttatccttcaggaggctagagaaacttcctttcactgcggttccagggtaacatccgaagatggcaaacagacgagctgtgtgagatcccttgaggcctgggctccagaaattgtagaaatcaatttctttacattttctttgtcaaaacaagttacagggcctgcccagatatgaggaggcagagaaattggctccacttctgtataggagaagctgcaaagtgtttgtggccatattaatctgccatagttgctatgaaaacagtttataatctgcactaattggctccacactgcaaggtaattatgctaatatttttacagacaataaaccatacctttaaagataaaccctttattactatgtccccaaagaagataccaatcaatcagttagccagtcactctaacttacaatccaactctctttttaatgatgaaaagttgaatttcataaattgtagtcttgcctctgaggaccataaggatgtatcactattatatctactgttatttctactcaattacccatcctggaagaataatatttttattttgtggatcctttatacattgatcaggccttccttgtgtggcaacagcttactgtagttacctacttatttttatgccttctctttcctaggaagaataaaccaccccaggaggcagaattaataaaaagattcatatttgaatctcttcaacagcccagtgccttgcacatagtagaggctaaataaatatttactaaattgactatgatggcccagctcattgagaaaatatgtctacattaaaataattttttttttgagacggagtctcgctctgtctccaggctggagtgcagtggtgtgatcttggctcactgcaacctccgcttcccgggttcaggcaattctcctgcctcagcctcctgagtatctgggactacagtcacatgcaaccacgcccagctaatttctgtatttttagtagagatggggtttccccatgttggccaggatggtctcaatgtcttgatctcgtgattcgcctgcctcggcctcccaaagttctgggattacaggtgtgagccaccgcgcccggccctaaaataaattttaatagtgatgaccatattagcttttgactctacagatagcaactatttgtcaaaataaataaaatgctattaaatataagatcttgaagaaagatataacagcagattttgtattttgactcttttaaagaaaggcaatacagtttcatacctacatgcacactcctgatcatggtgttatcatagaagaacaggaaaagaaacaaaatggtggccaggtgtggtggctcacgcctgtaatcccacaactttgggatgctgaggctggcggatcacgaggtcaggagattgagaccatcctggccaacatggtgaaaccctgtctctattaaaatccaaaaaaaaaaaaaaaaaaaaattagccaggtgtggtggtgggcacttgtagtcccagctactggggaagctgaggcagggtaatcgcttgatcccaggaggtggaggttgcataagccaagatcatgccactgcattccagcctggcaacagagcaagactccatctcaaaaaaaaaaaagaatgaaaacggtgattttatggtgatttttataaaaagattccaaaaggtttcattctgatgctgttttaccaaagttccagaaaggctagtagattagtcctccctttgtttaggcccacctttcatccctgaacatcccaaattagtcaaaggtctaaatttcataatagctggtgtccctaaatctaggatatttatttatcaatgtcctgtcatcatcagggtgtctgggagctctgaaaaaaaaaaaaaaaaaaacaacaacaattttttgtgtcaaagctctactttggccaacttctcttggtcaaaggtgacagttgcttacttctaaattgatgaacacgtactttatttcttttacatagcaatcattcactcatacatctgattccaattcctttgtgtatatatgttgacatatcatcaacctattatcatcatcatgataatatagtcattgttagcaatttattcatcactgttagcatcatgaatataattacagtaatcaaattattttgtatatgccttattatatatggactaaacccagcttccatataagtaaatatttgtgagtgcttctttggggcttatatactaaaaatcaaataatagtcttaaatgttgtccaagagagctgtgttctagcctctctctctttccagtgatgtttctcttttatatttacttaaaaacaattgattcatctggatttattttaatgtaaggactaaagtagaaataccacattactttattaaatggctgcacaattgtcccaataccatttattgtataattcaccttttctttaccaataggtagtaccatatttattgtaattaaattcttagatggtttatgtctatttctggactctccatttggttctattgatcaaattacccattcacgtgctggtttttcctaggttttactattttaattgctgtagctttttatatgctaatatctgttagagatatttccttctcattactcctctcattaacttctttttcagaattttcatggctatttttaaaaaattgagatacaaacacatgccataaaattcaccctttaaaaatatacaattccggggtttttagaatattcacaaggttgtacaaccatcactgctatcgaattccagaacattttcaccacctcattaagaaaccagtcactctgcattccaccctcactctagcccttggcaaccatgaatctaccttctgtctctatgaatttgcctactcttagatatctcatataaataaaatcataccatgtgtcatcttttgtgactggcttctttcacttagcacaatgttttcaaagttcatctatgttgtgatgtgaatcaaaatgcattctattttatggcctaacaatattccattatatggatataccacattttaaatctgtttgccaattgatgaatatttggattgtttccactttttgcctattatgaatctagcctctcatttttaatttatatgttaaccacttaggtgaattagactattctctaataaccatcctaatgatgtggtttgattgtctcagagtaggagtgatcttaagctattgggtaaaagggctaatgagtgtcagaaagagtagccattattaatgacataatatcaatacttttattggcattatccagggtttaaatgcccatttataaatccacccagcaaacatatgaggccactaaactagttagacaggtgatttgtagattttagcatgcataaaaatcacctagggcacttgttaaagagcagatttacttgccttactctagagattatgctttggatggcttttgaaccataattttaatagtcctgatcccaaggtacattttcacctaaactgcctgctttcagttcatcagaattagttaagatcaggctcttaaaaagagatcctacagcagtgctctggaaaaggctgtcacttggcaacaacttccctaaaatatttctggtgatgtctctagcattccatataacttagagctagggcttctcagacaagtgtgaaaacactgaagaaggatcaaacccttatttttcttaagtaaacactgacactaccataggtttctggagaaatcacccatcctcctactgaaggggttagccacttgtctggtcccaaactcgtctgactttaatttttcataaagagtgatgcctttgccataatcacgcagagatctggagtataaactactctctaatcatctacaaacagcattcatccaagtgcttaactgtgcatgttaattgacagtgtgccaatactgtaaccctgatgcaccacatttttgttcttttaggccagagaaggccggaccaccattgtgatagcacaccgactgtctacggtccgaaatgcagatgtcatcgctgggtttgaggatggagtaattgtggagcaaggaagccacagcgaactgatgaagaaggaaggggtgtacttcaaacttgtcaacatgcaggtacttgcttttcaggaattttttctgctatttgctcctcaatatagtgttctttaaatattaaaatatgatccagtgaatgctatactgagcaagaagaaacttcaacaagatgcctaaaagtgtatatctgagactttaaatcagaatctgtaaagaggtagcaggtgagaaaataggggaaagtgccaaaaacatcatggatatattccttaggacagattcctaattgcctggggaatgtggtcaaactaaaaggtcctttctaccataatgggatggtcagagttttgggagtcagaggacgagaaaagtgtttcgacttgtccgaggagccccggctctgagttatatggaatgccagagactttaccagaaacattttagggaagtcattgacaagtgaccgccttttccagagcactgctgtagggttccttttgaccagccaggatctctagtggttgagggaggtctcatgtgatctaaaattgtttcccagatgatcctaataagaccatcatcaagatttgtggctctaggaagtgaatagtttgtcttttaaaaggaaaaagcaggccaggtgcagtggctcatgcctgtaatcccagcactttgggaggctgaggtgggcagatcacctgaggtcaggagttcgagacgagcctggccaacattgtgaaacccccatctctactaaaaatacaaaaaattagctgggcatggtggtgcacgcctgtagtcccagctactttggaggctgaggcaggagaatcgcttgaatccgggaggtggagattgcaatgacctgagactacaccactgcactccagcctgagtgacagagcgagactctgtctcagagaaaaaagaaagaaaagagcactcattcattctagttcctaaaacaggttatattgataatgattggtttttcatattattaagacatgttattatactcagtcacttgagcaacattgcagaataaataacctaagaatattttattctatgaacgattctatttgtgaaagtatatacatttgctttgatacaactgtaattagcatgtacacacatatttttgttcttttttcttaacatttcagatatacgtcatccacatactattattttaatgggtgctcagaagttcattttattaatgtgtgaaattagtcatttttctaaagttagatatttggtctgtttccagtatttctctattctaaatattgccactgtgagcacaagtagatcaaaaaaggttgtcaaaattttgccttgctttctgacaagtaactcttctgagccttcgtttctacatttggaataccaaacctaccatgagaggttgctataagtttagaaaaataaacatctgaatacttgtgtactaaaaacaacctactgaaatgtttaaaagggtggattttgtgatatgttaattatatttttaaaaagctgtttttctttttttttttttaaaaaaaaaaagacctgacacaaattagatgatgataaatggtggttactaaaatttgcaaattcccccaaatgaaaataccaaatgaaatgacgaaaagttttataactcaggcttgcatgtgccagagggtgttctacagtggagggaatcaatgatagtgtctctgccgaatgctaccatatggcctagccaccataaagggtctttgtcatttcactagttaggaatgcataaaatgttactttaaatccattttagttttaatttcatgagtggttaccaagggtctgtgattttgcccataatgacatgttgaatcctcaagtgaaataaccacttggctgtcctattgccataagctcttgtaagaatgacctctgcttccatcaggacttggattgggagactgctaaagagatgcagacagctctgacctttctatatcaaattcccaagcttactttcttaggaaaagttgtacatttgaagactgaacagtcagtggtctggcatgatagaaatctgtcaccaactaggcaatagctttgagcaagtcatttaaccaaattgggttttgttatcctcacttgctaaatgagcaggggcttcaggtaagatgacctctgatatttctaccagctctggcattctgtgattctcagcccctttgaatagttccacctgggtacccccacatttcccatttctgatttgagttttgccctcccacttacttggtgaggctggagagatgagggaaagacccactgtgagcctgagagtcagcagatgctcaagctaatgcagtactcttttctcaagtttcaaagaccaacctggttttcattcacccttgttttggtattgtttctaacaagtatcactgcttttccattaggtagactgttggctcttagttgtttcttttaaatgtatcttaatttttttctgattataaaggtaatgcattctttttaaaaatcaagcatttttttaaaaaatccaaacattacattctagaaacttgaaagtcatcataagccaaatccctacaaacagccactgatagctatttcgtatttatttttcatctttgccagcctaaagagttaaacagtatcttcaaatttaactatttataagattgagcttatttctacatttttattggccatttatatttttcttcctctgtgaaagtatttgttcctgtattaggatatttttctgttgtgttgttcatgatattctcattgatttgtgagaactctttacataaaaagaaaatacactcttctcttgcgtgtattggagagatttttttttcctgctttgttcctttcaatttcactttgttgtatttggctgccataaagaagctttaaaatgtatgtaattaggttgtcagttttttcctccatgtcttcaggatttgaggttgttctccgaaaggatatttaccccatttcctttcagcattttttgttctgcttttttacaattaaatctttgagacaactgaagtatacctgggtggaagaaatgagggctattggttttaaatagatactttttaacacctggtggaaaagtggctatcttggcttggagctcaatgacctttcagctgaagcacccaacaccaactgagtgttttaggtaaggcacagaaaaaatattatgaaagagacaggtaatgttcatttggtcatagaaggaagctaaaatctgaatgggcttattggaagaactgtccattgagatggacctcttgatagcatggatgagattaccaaaagaggaaaagttctggggaggtattcatgagaggtggtctggtttgacttgccatgagctagatttttggggatccaggcttgggcaggtagtgggaagctggggatgattttgagctgccctttaggaaaataaatctggtagcagtgtgggaacagatggcagtgagaatgcaagggatcaattacaaagtctgcagcctaggttggtttttgttgagagatggtataaaactgattcagtaatgagcaaataaggaaatccaccaagcagaacatatcactgcaatgtggttcaaggcaatatataagcacatgggcagtgttctgtcagatgttgaatgagcaactggaaaactaagagatcatgattggctattgtatgtacagtaaggcactagccaaaggattgggttcagggcaggtcttgaagggaggagcaagaacaagacactactacaaggactaagaccctgaacaaactattaagatgtgtagttggacacatcttaatagtggaggaagcaaatagggaaccagtccaaagtccaactccagcagggcttgatgttccctcacccttactaggcagtgaactagaagtccttagatcagcacccccacccccattcccattaaaaagagaactgatctcacagccagcaatgaggctgagcctgcatgttgggtctcgttgtgtgcatgagagcaggactgtgaggaaggaagatgaccatactcagccagtcgaggaagacagttttacctcccgtgggtagtgaccaggccctttgattcagcttttcttgtttgtagctttaaaaacaagcccttgttagtgtttccatgtagtcttcttccctttcttggtggccatgacttgttccctggattattgcatattaagtaaattcctatataccttctggattacgaaaaatgtgtctttaaatttttagaaaatattcttatactccgattttcttattgttcaaattgaatttaacctttctatactttatagttttctagctatccttgattgagaagcagttaggaaatctgaaaatcttgatacatgtaatattccaaattgctttatgattctaaacttggaggttacatccatttggagacacacacacacacacacacacacacacacacacactttaatgtcttgatattctttcagacatcaggaagccagatccagtcagaagaatttgaactaaatgatgaaaaggctgccactagaatggccccaaatggctggaaatctcgcctatttaggcattctactcagaaaaaccttaaaaattcacaaatgtgtcagaagagccttgatgtggaaaccgatggacttgtaagttgtttttcacttaaattaagtcttttactttgtagttttgctacaattattgaaattcttagccttgcaaatatttttcaggcacagatgactgctactatgagccatactctttgtaaagaaaaaaattttcaaattttaaatgtatttgacaatgaattgaaatcagttccaattataaatgggttttcaagggaaaaaaaatccagaaatgtagtctttacgctgagatgcttaatattaaaattaaatttgacattcatctttgaggtccagaggtaataagactggtccaaaacgagaggccctgatatttgcatactctattgggtaggattacatttgattatctatattaggaaacccagaatagcatccgtttaagcaaattaagagtttttatttctgtttcacatgccaaaatcttagaggtgaaaaacccagggctagaacagtagctccacagtccccatagacacaagctcccttcatctttatctgcactaccctggcatcaggtttccatcctcagggtcacttatgatctaaggtggctcctgaagccctacctatcacatctgtggtccaagcaacaggaagaaacaaagaggttttccagaattcccacacaatactattacttataagtcattggtcataattcgatcacatggccatacttagcaatgagtatggaaaattcaattttttttttttgctgtatgcattgacattctaaattagattggaattctcttacttagaaaaagaggagaatggtgagaaatagcaacgttggatttaggagattattaactccagttaacaaataattttatttatttatttatttttaattttattttttgagacagggtcttgctgtgttgcccaggctgaagtgcagtggtgcaatcttggctcactgcaacctccacttcccgggctcaactgattgtcccacttcagcctccttagtagccgggactacaggtgtgtgccaccacacctggctaatttttctgtgctttttgtagagacgaggttttaccatgttgcccaggctggaacaaataattttattatacagagggaatccattccaaaaaaagatttccttatttcaagatatagttttgatatattttgatgttatttgttaatgaagactgagtttatttttactcttgtgttggcctgagaaaactaattctaccaataatttattgcatctgtttttatctgtgcatgctattactgcagaaattacaaggactctcttagaggtcttaatcttggtatatttatagaaagaagaataacaattgtaccattttggagcgtcattattataagtcagataagcaatttcccctcttttggctatgaaattatccacttttcatttcctcatttattttgagagttattttgctatctctttaaactccagtattttataggagcacgtctcttgaagaaatgcacagagaagagggggaggcaggaaatgctgcaatcaacaagattgtcccaagtaccatcatagggagaaaacaacatgccaaaggagagggagagattaagtctgattagagggacctgtttgtgtgctgaagagcagtaaccaaagaaaaagattcattcattatgctggagatagggacttaaagataatgttaactagggaggaaaaaaaaaaaccctgaaatacagaaaaaatgggtaatttgaaagaaggctcagtagaacctacttctatattctctgttttatagagatataaatataacctttctcagtgacctcaagtttttgggattccatagtcacctctgtctcaagtttaatgttaaactgcttctatcatcaaaacattctttatgagacctaaatcctgcatgcttggccagacatttaattaaacatttgctgagaatcttatatgtgccaggaattggactactttctaggaatataaagacataatctttaccttaaaaaaagttacatactagaaatggaaatatgtaaacaaaaaaatcacagacaagctaagctatgaaataagagaagtctgcacagggaaaagtgtggtaagagaaaaggaatgtaattaatttggttttgtgagttggaaatatggtacagaaaaggcaaggttttggggtgaggaggccaagcccatgttctccagttagtaatggtttcctacatttgcaaagatgtttatccatctactcaggtgtattgtctcatttgacccagatatcatccctgttagagaggcaggactgtatcataatatatgagaaaactgcagctcggcttatgtggtccagccatgactgtcacaccaatacagtgttgtgtaactccagagctggatgccaaggtatttgtgcccagatcctgctacctcgcagtctgctgaggccagaatagggacgggctaagcatcccatgaaggttatttcttggccgaacaacccatactcagcttatgatgtgtaatcagtaaacattgttaacatgttataatatactgtcctactctctagtagtttgcttgtcattctctgcacctagtttgcgagtcccttgagggcaatggccatgccttttctatgtctacagactctggtaactgttgtgtcatcaccagtttgccctgatgtttatatgttctaggaagcaaatgtgccaccagtgtcctttctgaaggtcctgaaactgaataaaacagaatggccctactttgtcgtgggaacagtatgtgccattgccaatggggggcttcagccggcattttcagtcatattctcagagatcatagcggtaagtttgcaaacaccacataacagcctgaattagatcaattcatcagctgctgcttctcccaacctcactgactggctccattctgggattaagcagccttaaattaaactaagccaaagtccttaaatcccttttgagaaaagctgtgagggaaaagataagtagcctttgaatcactctaagttatgatattaatgaaattataaaatgtaaaatcaatgaagaaggcattctaatgagctctcttcatttggtgaaactggtgtcagacaatgatccccaatctgtttgtgtagaaaagctggtacaagtcgcacagtgaggtggagagagagtggagcagggaggggttaaagtcatagagtttaataagagtccaggcactgggtatagactggcctcaccactcaatagctctcggtacctcagtttcttcatctatacaataaatctacctcataacatggctgaggattaagagattatataggtaactatctggaaagcatttaagagtgtgtgccttgtagtaagtattcaaaaagcgatagccaccccattttagcaatccttccaaggcttggggagtccaagactaagaaagaaaacatactagccaatcattcaattaattgggggatatttaaaggaagttatcacaaatataaagcctccatcaattccatgaaatccagaattcatattctacaatttcagtcaagctctaatgttattggagagactttgttgttgaggataaataattctccatcatgttacgagtttattatttttgtgatgttggacatcgatccacaattaagaccacaagccaaaaaataaataaattagaaaagatcctcctccaaatcttttaaagtttcaaaacaaagcaagctctggctctcttgcaattcaaggcaatgtggactatatattttggggcatctgtctgcctagtgctgctccaggcactggagatacagtggtacacaaataaaccaagttgtgccctcaaacagcggtttctgtcggggaagacatgcaatggacaaacaaaaaaataaccccacaaacatgtaacatgttgagggataacaagagttttaaaagatgggtagggtaatagagaggtgttagctgggggtgctgtttcagataggatgctcaggaaaggcccctctgggtggaagcctgatggaatgagaagtggagggctgggacagggaggagtcacagggagcaagggacatataggaagaggaacaaatgctaaaatgtgcaaccactcacagtccatatgcagtatgtcaacctatgttaacaaccatgcagtcagaaagtagaatagagattaccaggagctgggaggaggagggaatggggagtcagtgtaatggtatcaagtttgggaagtttgggaaggcgaaaagttctgtagatggatactggtgaaggttgcacaacaatgtgactgtacttaacgccactgaattatacacttaaaaatggttaaaatggtaaattttgtgttatgtatattttaccacaattaccaaaaccctacatatttgaagcctagttttaaacatgtgacactcaagccactatttatgagaggaatgaagaaggatcagttatgtaatccaagtgggcgttttaaatattcttttgtagatttttggaccaggcgatgatgcagtgaagcagcagaagtgcaacatattctctttgattttcttatttctgggaattatttctttttttactttcttccttcaggtaggtacccatgatttgcctttctcatcaagtttataatttaattagagaaattaaattaaacctaatggagcttccaaattcttacagtgaaataaattgcaaacatgattggcataaggctctgctggagggtagactccttatcagggggaagtgtgacttccctgtgtcctaacttatattacattacaagtttgccctcagcagacattcattaccaaggacaagagacctcagtttactgcagaacataagagtaacttaaattcaacaggttgggaactgggaaagtacagtccaatagcattctcttttctgttgttactctttatagaatatcaagtaacttctctgatcttttcctacttaattgatgaactatttgaaagaacataatattttgcattctaacgttgtagacctggccaaaataaactagtcaaactctctaattgtacttttctacccagttagacttctctgtaatttcttttgtctctttaacccagtgggcaccacataggcctttcgaatataatacaatccatcaagtcagcaaaatagtgtttcctagtcatgccagcatgcttctcttttattattgttgaaccaatggcaaagtaaaccaagttttttatttagaaatcattgccctactagacacaactcaatgatttgatccagccccagtccctggcatgctagggagtgcagctagaaaatgtgtttcaggggccgcaggaacagtgggctgatgcatagaacctgtagcaatccaccagcaaatggagggggagggcagtctggtcctggacaaggaacacctggggccgattcactgggtgcactgatcatctatccccctggcttagtaaacagttctgatgtgcactcccccgtgtgccctcggcacggctaccccaacactcacactgtggctggagactcacacgtcccagaagtaagcccacttctggatatctggactcctctccagtttggatgtggtaattagaaagtaggaaattgtcccaaagaggctggggaaggaagagtaccctgattgttccccaatctgagtgcaggtggagctgtgaccaggaaccagcatactcatttggatcttgtttctaaggtcatccttcctttacactgcatgagccaaaatgaattcgtgtgtaggactttgttacttctgtatttaactggtttattggaagtagtaggaacacactgaattttgtagttaaacacagtatctttgtcactgagatgttgtccttcaaagttttgaaaaataaacctatttagaatggtttagaagccagaactggacacctttaagatttttggcctttgattgtaatgcatactgatgattttgcagtacatgaatttgacgtgggggctttgaattcgtatttggtcctggacttttgttatttaaatagttaacatacaaataatgtaaaatcaatgtgaatataggcacctgtgtcagaatactagcaactgttacccacacaacgggcaggtttggtcacttggtgggtttcaacccaatgaccacatcaaggaggatttagcaaaggaattttataacttgtcacaagtgagaagctcacagagcttagttcccaaagcagtatctccccaagctggaggctgggtcaggttttataagcgtatggtaatgaagtgtgatctgattggatcttgcaatgaagtgatgccgggaagcaccatctgactggatcctgccatggggtggtgtcagagctcaatctgattgaatcctgcatcctgccatgtggtgtctgcttcttaattcagtccctgattcttgtttcggagcacttaggttcctgctatggttgcatgcttgattcatctggggctgctcaggttattaacatgacttgaggatccgtggcaactgtaaaacaactcataactttgctacataaaagttgaacatgattggtctggtgcaattacatacataaagatcaaaagagaccatagccttttttctcaaccagggtttcacgtttgggaaagctggcgagatcctcaccagaagactgcggtcaatggcttttaaagcaatgctaagacaggtaggagtgtgcgctggagaatgccttctgatctttcacatttcttccatattaagcttcttactgttcttattgttatgtcgatatgcatgttttccccccagggtattcacgcaaggatggggcagagtcctgcaaattgtcctggtccttcaagagctaaagacttctcatgttttttttgttttttttttgtttttgttttttttcatagaaataggctttatttgggtagctttggcttattctgtaaatatctctctccatgtagacactatcatttcgaagacctgtatctcttttctggatcctgtgcaggccctggtgagtccattgagactccaggatgtctttaaaccaagaaaaacctagttgatagcatttaatctcatgtaccacaatctaccatactaactgtaggtatcctcaaatgttaataattgagttttgtttatttcttatttgaggtctattttcacattaattcacttgtttgtttattcaaacattacttatcatgtaccagacactgtgctggtggctggtactgtataatccattatttgctctcctcgtaagttcacattctagtgcctgacataggaaaatatgcaaacatgaattatctatttttatagaaaatgcctaagagagggccagaatattatccattcaattgacaggaactgattacatttctgttcacaaatgggcacatagtaggtagtatattctgattaaatctgtctacaaatcctatttcagtatctcctaaactcttgctatgcaggaaaaattattttatgtgaaggtaaaagatgccatggatgagtagcttacaattaaaattaagtctcagacatgcttctttttttatccctgtggctaactggagatcagacacactttcaatcagtgtttaacaaaaaatcaaacaaaagcttggtgagaaaccagtgcttattttctcctgcctagaatctatcagaacaacatgtccaagacagctccaccaccctttatgagagacaacaccatatcagggcagaagtgtccatagtgaaagacctgatgattgggtgaatggaatgcctaccagcctcccagccttgggaggagctggcaaggagcatggcagccatctgggtgagccctgcccccctagaccagagatgccctccctgctaccacagagcagtcaggaagctgggttctgctagattctgggggtgtgtgctcagagcaaggccagggactctacactgcatatgaggtctcccctaaatttcctcagcattggagctttgggaggctttgtctggttttctttgcttgttttaattttgaactaacataaacgtgtattttatgccataggacatgagctggtttgatgaccataaaaacagtactggtgcactttctacaagacttgccacagatgctgcccaagtccaaggagtaggtagactgcactctacttgtagttttttacataacatggttttagataagcatgtagcatacccacacttgttaagatgcttccagctagaaatagcagaaagctcaaatcaaaactgctgtaaacaataagcagaagattaaacttcaaggttgattgacccactgccccctccagatttaatccagaatccaggttccctcattggctttggctttatcccaaggctgattccctgcagtcacaggatggctgctaatagtaattagaactacaggcttccttatttcccatccagtgaaagagagcacacacctctacctcaaccaccaaacaaaaaccctttgctgaaatctaatttgggctaatttgggtcacatgccccaccctgaaccactgtctccaggggatggtggtgttctgagtggcctacgtcccccacccctttagctgaggtgggttactttgcagctcactgcttccacacaacaggagaaggaggaatggatgcagagagctgactgcaatgttgctacagccacctttgttttctgagtggtacaacactaattcatccttatatgtgctttgtggtggatgtctcttaggacacgtaccctttgtaacaacagatggtctctttcccttttacacttttgaattaaatggtctttaaaattacccaggtacattggagttagtttcctctttgaacattgcatctatgaaaaaatacatgcacccccagtgcccatccacaaagcagagaagttgattacttggttctagaatgttggttcaggtgggcaggagaggaatgagagtgtaaaggcacaatgaagaaatgtctgcagagcctcatgagttaagcacaggtgttgtgggtttattgtaatgaaagtaagccaatgtagctcaggcatagaacccactcatcattctgaccaagaggctaaggctggagcgcatgcatttggagcttaaaactacagttgctttgtgctttttctctcccaggccacaggaaccaggttggctttaattgcacagaatatagctaaccttggaactggtattatcatatcatttatctacggttggcagttaaccctattgctattagcagttgttccaattattgctgtgtcaggaattgttgaaatgaaattgttggctggaaatgccaaaagagataaaaaagaactggaagctgctggaaaggtaggtcaaataagatttcaattggtgttaagtgttgtttttagacatgtgttttatttgaattatttatcatgatatgcaggctttaataattaaatgtttgtgcccactacaactaataattgtcaattgtgtatgaaatattttactgtattaatgtctagaacttaaatataaggtgattaacataaaacgttgagcctatagaaagcacttaacatagttatgataaagaacttctgaatattcaaagtgcatttcattttacttcatgtccaaatgctactgtttggacaaatgtcatccctgtttcacaaaccttcatgcagaagactgtaagtgaattgttcagggtcggacatgtgctggcatttaagagatcctcttctttttggctgtgatttctataattaagatggcagccaccagatggcagtaatgcctcaattttgtggttctcactataatggcaattgggcttaacatttacttgagccttactacgtgccagttattgtgctacatatttatatgcaccaatttattacatcttcacaataatcctataaggcaggcactattgttatcccaatttcagaaatacagaacctgagattcaaacagaagttagagatttggctgggatttaagttcaggtctagtttcaaagctcttacctctactatatggtctctttatatgtgtttaagtgtctaaatctacacataaacattttatttacaagtacatgcactgaaatgttcacatgtagattataaccatgaacattcttagtcttatttatgtaattattatcctttattgaaacatgaggaagtgaagcagataataaatataaattgtgatataggttttatagcattgcactttacaaagcccttttacaagcattactgcaactgaccttaactagttatgagaagtggaacagacagtatctctatagggaagaaggcgtcagagactgggtgagtgactagcttcagaggcaccatattaagagggaagattaacattcggactaaccatgtttccactaaaccaattatgtctggtgaaatcctttcttgtcctcttgtaatcagcatcagctgccgctgcatgcagcgttaggtataatagtatctccaggtttccatcagaattcactctcctcattttcacgctgcatcctctccaagacttggagcttgctaggacaatatgtggttcccaggacttgggaacccctgggtgtctagagttcttgaagattctcttggctgctggctgtgggtactttagggcatcatttccttgacttctgagtgtctcaactaactgctgaagaaacactgtgtagctctgtttcctcccctgcccctcaatcctgcttctttccacatttcatatgggagaatggtcagttggatggaatgaaaataaacttttcttagacaagttacatgatagaaaacatcttgaatctagttaatagtcttagctccattaattgttagaattttgtcagagtagagcaggtagaattgagcagtattgaaacaaaacaaaatcttgggttattagctttggtcttgctattcacagtgtgtgaggctggagaagatccccaacttctctagtcctcatgtcctaccttagtaaaatgagaaattgtaccagatactgccccaagttccttccagctaaaaccctgttattctaagcatcagagattgaataactcagactggccagtttaaatttttttagtagctactttaacctaatagggttatgaaatatgaaagattaaatatgaaatatgaaagattttaaatatgaaagattaaaaatgttttaaatgttaatatcagcagttcaatcatagtttaatattgtttactcagtcagcacttgcttaagagtcggaaagaaggttctagaaaaaccccaaatcactatttaaaaagaaacactctcatttacctgggtacagtttcatcatcattaaagtacaacagggtttgaggtattcccatcccaattttccaaaaagggcttggtagtgagggtgttggttactgggcagggagtggggagggaagactgcctcataaccatcttgacccagggcttgtctggtcactgagattaagggccctctgtgccacagctaacccgtaagggagttgatccatgactagaatgtcaagaggagtgtcaagtcattactggtttctccttgtgtaaattacacagcaggggtagcagaatagcattatggcttaggaacatggactccacatcagatagtctcagttggaattcttgctttgctacttattaactttagaacttaaggcaattcagttaacttctctgtgcctcggttctctcatctgtgtaaataggaatactatttccctttcaaggttgtgaggctaaatgagatcatattggtgaatgaggtaatacttggacatagtaaaagctcagtaatttttctctattcttgtaattgctatctgttatatctttattacaaatgaaaaatctatggttattcagtctcaagcatcacatatcttcctttcagctcattgcagaagctaagaactgaggtaaaaaaaaaagtcttaaagctgttaaaaacctaaaattaagatcttatgctccatgtgctgttggtttagatgactcaactacagaactaagatttagactaaatagctaagtcacagacaatcaacatttgtcaagggtggtttggctgtaagaatcagagaactgctctggctggtttgggtaaaagcgatttgatataaggacactccaaagtgcaagaaatacaggcagtttgtgtgtaactggctcttacagccacaggctctaatatctgagtcttcctatacatctattccattcctcggatgctgtatattcagaccagcttcttacacatacccaatgtgacatcagcctctgaagccccagggcctcacggttcaaacttgtgtccagggccaggaaaccaaatctgattgacccagattagtcagatgtctgactctgatttaatcacggatttaaagcatgctcatgttgttgacaattgggatctccttcccattgtgggtggacagcttttataagaagttatactcagggaggaaataattggcagctccaataggcccttagaaatcacagcctaatcctttcttttaggactctgccttgtgaagaaagccaggccacaaaggggttgtgactaaggccagtcatgtaactgcctggtggcaggctgggaatagaaccaggcccttggttcccaggccacagttcttgcccttagctgatcagccttcctgagcatacaaagacttgcctaccatacttagcacagccagaagtaccagttttgtcataaagctagtcttgaacagattatgcctttggtttttaatttaaaggaaattaaagcctatcaacgtaaccttcaggatacttttgacagagccctagggcttatttttcattatttcagaagtgaaaacaccacttctaatgaaggtctattctgtgttacagattgcaacagaggcaatagaaaatattaggacagttgtgtctttgacccaggaaagaaaatttgaatcaatgtatgttgaaaaattgtatggaccttacaggtaatgaaccatatgattcctgctaagaacctagtgctttcctaaggctgaattattgtcccaaaaagataataaaagctctgctgctccaaacaatgatatgactataagggtggccttttttcaacaattctgtcactgaaaataagtagctttttgatgtgactaggacacagaattatattttttacatcttatgcaaacaacaagaataggtctccaagacgtaaaagatatagagaattgcacagtctttggttatcagtgcaggcaacataaataacctatctgggtgacttaagacaaacattcctttaaggaattgctcaaacctttctttgcagtgtgtagactgaaccaaaagtgagacttgctattgggtatgttccagaggaaagtatttcatttgttctctgaatgaggaccagatccaacctactctgaagataaagaaacacagactatttcagtggtttatagttgagcaattcaagaaactcctaatggcaccatttgccactcatttccactgcagcctgattttataaatgagtatgttttaacacaaagttgaacacaacttagattacaattttgcagactggaacagtagttttgaacacttgcaaatttgaacagatatctttgaaagtctcaatttatgccatctcctcagttatgcacacttcatatgatactaaataacatgcagctacacctttgtgtccatttgttgtttgacataaaacatgtatgcaccattaatgatgacctgtttttaacttcaaggagggttaaggaagaatagaaaggtgaagctaattatgaacttggttataatttaaagattcaatagcttcacagaatgctcaagttttgtaacaccatgttcacagcacataagttaaaccatccaaattagtaatactttgaatttttccttttgccaaaaacaccctcatatttgagagtaactcaattatagttcttttggaggattcagaagccaataaagtatagcatgaagtcaaattagaaactgtacaaaataaattatatacaggggcggctggcaggatctagcttgggaaaggacttctggtgtatatctatgtaaacttcagggactcaacttttgtgaatctgaaacatgaattttaacctaacagagtacaattagttacaggaaacaacataatagtagtaaatcacattcagataattcaaacttaaattcagatcctgacattttaggtatttttgaaacaacaactatgcttaataggagttgaacattggagtcatcagatattaatatgtaataatatcagttatcatttgaggaaccactatgaactaggcactgtgctagacatttatatggtttttgtcaaaacaattctgcattacagtgattatttccatggtataaatgtttagagaagttatcatttacccaaactaatataactggaggtggaacttaaacccactcggccagacttagaagccgtgctctttccactacacagcgctaaaggaggctgaagagatggttacaagtatactgatttgcttttcaggaattctgtgcagaaggcacacatctatggaattacttttagtatctcacaagcatttatgtatttttcctatgccggttgttttcgatttggtgcatatctcattgtgaatggacatatgcgcttcagagatgttattctgtaagtagctttagaaatattaagattattctataataaggttttagtaggtttatgcaaaagtttagagtaggaaaaaaatgactcctgtgtccaaagatgaggtcagggatttaaatttaccacagtttccatcctggcaggcacagagatctgatcttgttaatactccaagtgcagtttcattttgcgggctacaattaagcttatgaaaatgatcagaaagcacagttttagttgtacatatgatcctggtcaggatgatgcaaattttctcattatagaatataggcagaaaaaatcataattagaaagttgctggtgaccatggactcaaaacagggttatatagcttactattatctacaaccaaaacatggcctggaaaacaagatgggaatacttgttggaagtctggcaaaggcactctctccctaaccaggcctgagatgagacagccctgccaacatttgcctctcagcctctcctttttccttggtttccaaggcaaactactggtctttctgtttgatgccttctttcataatgtgctcagcacattccattaggttgcaatctgggcttgaaagagggaagcaactctttttaagatcatttggtatgtttctgctctggtgggatgattttaaagcagtggtgaacagccatttttgaaacagggtcaagacaaaaaagcgaaagtgtgttaagagctgggttttttttttcatccaaaattaaaattaccatgaaaaaatgtatctatataatctttgtatcaggatcccagcaggaaacaaatggcacagcaaatgggttaattgatgagtttgctaaagggtctatttacaaaggcctggaaagtgttaaggtaagcagtacccaagaaggaagttaacaccccagcaatacccagctggaaactgctaccaccctaagcctaaaggcaagagaagggaaagatagccagaactcagcataggtgctttctgtggtctttgatggagggacagcaactgcacaagcaatctgacaagaaagaagccaaagaaacaaataccttggcctcactcccttccagcctccctatcctctgctgtgccttccattggccaaatcctatgaaaccagaggacaagaaaaccttttgattcagttcatgatagttggaatccccagacatggagtagggggatagaaggtagagatgggtaaaaagtgaggagtgattttgggggacaaatggaactagcagctggggattacaacttagagtacaactatttattgtataaaaaatattgagaacatttctgaaagtgaaaaccgttggaaagtcacattattcctgcttcctttcttttttaaaatcattgaaatgttaaattatggaaacctagaagacagctttaggcagtacagggaagctatgcagccacatgtgggttgttcatcactattttaaaacttagtttttggcaactcaccttttcgtcaagcatttaaaggaaagttttactatacctctcatcccagcccctaggtattaaaacccatttttaatatcttagctttagaaatttgaaggtgaaaacttaaagttctccattattagtagagaactcccactcctttctctggggtagtgctggtatcagaagtaaattgctttgtgaagttgtagatctcaggatctttagcccttcctaaaagttgtcataatcaatatccatctttaaagagcatataattagaaaatagaactttagtttaaggtgacttttttttccagagtgctgtcaatagttattttaacttttattttaggttcaggggtacatatgcatgttcgttaatacaggcaaactcatgtcatgggggtttggtgtacagaccatgtcatcacccagatactaagcataataactgatagcatagttattttaattgtaaataaaaagctatttctagtaaaagcttattttccctaataaaaattatttacagtgatgatgattatcatttgtgtggtagtacagaagaaaccacaaactggaagtcagggccagagctttatcagaaaaagcttacttggaactgatcaaggcccttacacactttgtgcttcaattccctcaactctaaaaagagtataaccagcaactaaaattagctgagctcacagatcagattcagttataagcctcttcttgaaagtaaaaacctttgggaagtcacagtagtcctaagaaattaggggctactatgcaaagggaagtcagaaagcaagtcgagaaaaggtaaaccctcaggaagtggatcttgcccctctcctagatttctcttgttactagaattttatgaaaatgtatgtcggggagaaaggggatgattaaggagtaaagggaaaaaatactggtaagcactatacctttagactttcaaacatcatggagttaattataaaagctaatttttgaattcctctacttctgtctagggtgttttctgcaattgtatttggtgcagtggctctaggacatgccagttcatttgctccagactatgctaaagctaagctgtctgcagcccacttattcatgctgtttgaaagacaacctctgattgacagctacagtgaagaggggctgaagcctgtaagttctctgatgcctgatgatgcttgatcaatttttccctaaggtttgctgtctgctagattatagctacaggataagtttgtgatgattacaccaacatgtgtttcatttaatttgtaatatttatatagctaatatttgggcaacttgactgacatttaaaaattttataggtggtttcaaggatcctgaagtttagcacatcaaaataaaaaaaaaagggaaaaccagatatattagaactgaatagtttccacaaaaatttagtcatttctacataaaggtataattctgccatgttaatgcaattagtaatttgactttaatcactttttataatagttaagatgtaattggtaagaagggcagttcgttcacaatgagagtaataatcctgtgctttattatctataaaggtaacttaaactcacatctgagtgttctttgtatgacacaagatgctacacgttgtaatatacaagcagctgtgtaggtaaagaggctaggacttaacacagtctttccaggactttcccaggtatttcatgttctgataaaattgctgtgcccagtgagtgagataaagaaagtgaacttaagaaactgccagggtttgccatcagggctgcccactgaaactttgggtagaaactgttgctaaatttccaagcctttagagtcttttggacactggcttgattccagcttcagaataagcagttgggaaagctaaatgaatatcttaaagaaatcagaaactaagttagataacaactcatggtaatgactttttgtctaatctcacctatacccctatctctcaccttcatttcacaccataataacttgctatcaatattaactggcaccagaactataccaaatatgaattttatgtttctctactacagtctttggtaaagtttccttgaaataatatttcttattccaataattatcaggccaattataatagcaacatttaaacatttattcaggataaatttgaaggaaatataacatttaatgaagtcgtgttcaactatcccacccgagcaaacgtgccagtgcttcaggggctgagcctggaggtgaagaaaggccagacactagccctggtgggcagcagtggctgtgggaagagcacggtggtccagctcctggagcggttctacgaccccttggcggggacagtggtgagcacatttccttataacttgattgaaggctatattttaattggcccaaccaatattgtcataatggaaaatattggacaaatgtagacctagaatcctgtttgatacaatgaccacattctataaaccccaactggcaccatatctgggaaatatatggggacaataggacagaatgtctggaattcagtctagctcagaaaatactgaatataagtttaatttttaccctgtcatgggcctttccagtcagtctgattgttctaagcaaatactgacttactggcttataaaggtgaactacagactcctgcccaaattcaaagctgacttccaaaacagggtgctacctgcttattgcctccccaccgctttcagttttgctgccttctcttaccttgaattctcggctctcgaactttgactttgatcctcaacctccagccctttcatatttggcttttgtcattgattttctagcatgtagccccgtggctctcttccttgagtgaagaccaactcttactgataatgcttgtatctgccataaccttgggacagcacccatgacagagccctgggagcctgtccccattagacagtcaccaaagtgttaagccttgtttcttttattaatagttgttaagcctaaatcagccttgttaagcctaatttagttgtttctctctggaaatcttctgctttgctattatagctattctgcaggtaacataggcaaaccagctcaccaaaactctgtaaatatggtgtgctgatacgatggtgggaatttttttctttattgagatcaagactagctggacttgtgtctattcctttgcctgtaagctttaccttacacgaggctgtattttcaagtacatattacaacacttccctaggagcaccatgcctcctgcctatagcaagtaaaacaaaaacaaaaccatcactgccagcaaaaataatcctcccaaagacactgccctttgtaacttgttccttttccatgggattcttgtccttagtgctatcagagaggtgagggaaagttaaggctagtagttttcagggaaaagagaggtagaggtaggaccagagtcaaccagcttttggggccctgcttctgatcagctttttcactgctgtgcatgggggaaggggaaatcaagtcaaggtgaagggttaggattattctggggacagcagacctgagtgggacaccttgatgcaggcttctttaacgcagagtaggacacagatggctggaggagggcagacaaggacaaagagaagtgtgaaaaaagagggtcaaatgtgctaccattttgccagttagaccaagatagggatggcttaatcaccataaaaatcatcatgttggccatgctggcctcaatggtataagtcttggagggttgttgttttgaagctgctgacaccctcatgcaacgatcctccaaatggacaatctagtaactttttagtttttttttcttttttatacccttcttatagtttgtggactttggttttcagcttctcgatggtcaagaagcaaagaaactcaatgtccagtggctcagagctcaactcggaatcgtgtctcaggagcctatcctatttgactgcagcattgccgagaatattgcctatggagacaacagccgggttgtatcacaggatgaaattgtgagtgcagccaaagctgccaacatacatcctttcatcgagacgttaccccacgtaagttaaagagtagctgaaatcagaagagactactttttatcccccaaacaattaccaaagttatgccaacaaaatcttgtaacaaaatatgttgatttactaacattaacaacttggacaaggcacttcaggataccaagcttccttatttgtaaatgggaatacattatgcctacctcatacaaatgtagtgagaagctcaaaaccaccatacttcaggttacagactggtggttgagggctgcatttagactgcagtcatgtttggtttagccctatggtacttttaaaacaattatagtttttattttgagataattatggatttacatgtaattgtaaggaatacagagatcttatgtaccctttacctagtttctgccaatgacaatatcttgcaaaactagtatacagtatcacaagcaggatactgatattgatacactccactcatcttattcagacttcccttgttttacttgcattcatttgcatatggatttagttctgtgcagctgtattgcagatggggattcatagatccactaattaagaacactggccaggcacggtggctcacacctgtaatctcagcactttgggaggccaaggtgggtggattacgaggtcaggagattgagaccatcctggccaacatggtgaaaccctgtctctactaaaaacacaaaaatcaaccaggcgtcgtggtgggcacctgtagttgcagctactcaggaggctgaggcgggagaatcgcctgaacctgagaaacggaggttaaagtgatccaagatcacaccattgcactccagcctgggcgacagagtgagactccgtctcaaaaaaaaaaaaaaaaagatacagaacattctcatctccataaagatccctcatattgcccttttagagccatgcatatatcccttcctcccaccctcattcctctcaaactctggcaaacatgaatctgttctccgtttgtataattttatattttaaaaatgttttataaaaatatatacagtatgtaaacttttgggattaacttttgtctttcagctaattccctgaagttgtgtgtattcataggcattgctttttattactgagtgatattccacagtgtggatgtaccacagtttaaccattcacctgttgaaggatagctgggttatttcctgtttctggctattgcaaataaagctgctgtaaatacttgtatacaggtttctgtatgaattcaagtttttatttctttgggataaacacccaggagtagaattgtggagcagtatggcaatttcatgtttagtttataagccactgctaaactgttttccagagtggccatcccattttacattcctaccagcaatgtgtaagtgatgtagtttctctgaatctttgccagcatttactgttgtcattagtttttatttttaccactctgataagagtgtagtgatacatcactgtggctttaatatgcatttcccaatggcaaatgatgttgaacatagttttttatatgcttatttaccatctatatatcctcttggtgaaatgtctccatgttgtttgcccatattctaattggatttttatcttttactgctgagttttcagaagttttttttgtttgtttgtttaacatattgtaattactgttggatatgtagtttgtaaatgttttctcccagtctgtagcttgtttattcatcctataagaaggtctttgcagagcaaaagttttacttttgatgaggtccaatttaccaattcttccttttatggattatgctttcagtgtcaagtctaagaactcgttgcctagccctaggcccaaaatattttctccatgtttttttctaaaagttttatagctttacattttaaatttcagtccatgatccatttttagttcactttaaacatgtgtagccctggaaggatggcttgaggtccctaaaagtgatggtagggacaattcattttatggcattcttccagcattcggggttccactgggttacactgacgtagagcttaattatttttgcttttattttctgctatagttagaaatcactcacacccacaaataaaattttaaaaccctttcattttggttagccttaccaacctttaatgcacattgacctgaatcaaatattggatttgactgtgaatagaaaaatttacagcttcagctcttaatataagtgaccactggaccttaggaaattaattcacatgatatacatcactgcataagccctgcaaactgaactgactcaatttacatctctattcatatgctctttctcagcctagaatgctctctcaaaatctagctccccaaacttctctaaaaagatttctttcatttatttccccttttttctccttctaccctgtctccataacaacttctatctccttcttctgatctttcatagtgtgctgtgtatactactacagtcctgtgttacataacaacattttggtcaatgacagactgcgtataccacagtggttcccataagattataatggaactgaaaaattcctattgcctagtgacatagctgtcataatatcatagtgcaacacaaaattcaagtatttgtggtgatgctggcataacaaagcgactgcactgccagttgtataagagtatagcacatactactatgtacagtgcataatacttgataatgacaacaaatgacttattgattcatatatccgttatagcatttgttattttagagtatcctcctcctattttaaagaaagttaattataagatagcctattgtagaataccattgagaattaaagtcactagttttctagtttgattttgaaaataaacactctgttaagttgaaacaacgttatagaaactgttattgactctaaatgtttttcttgtaaatagaactgtcaactgttaagcaacagttcattcaacatatttataatttggttaacttgcagaaatatgaaacaagagtgggagataaggggactcagctctcaggaggtcaaaaacagaggattgctattgcccgagccctcatcagacaacctcaaatcctcctgttggatgaagctacatcagctctggatactgaaagtgaaaaggtgtgtgtggcctcccaacttatgtcttatttaatttatgaaatagaagggattttgctgtcaaccatgaaaaaaacacacacaagcacagggggaaaaacacagaacgttagatagtggtttttatttttatttttttgagacggggtctcgttgttgcctaggctgtagtgcagtggcgcaatccagctcactgcaacctctgcctccagggttcaagcgattctcttgcctcaacctcctgagtagctgggactacaggtgcctgccactatgcccagctaatttttgtatttttagtagagacagggtttcattatgttggccaggctggtctcgaatcctgaccttgtgatccgcctgcctcggcctcccaaagtgctgggattacaggcgtgagccaccttgcccggctgatagtggttattttgaagtaatggaatattttattctaaattttctaaaatgattatatattttataaagtaaagcattcaaaagaaaaaagctgcacaaattacatttttagcacattaggaatgaaaaactggaaaatactcaaaagggaactagttaaacagaagattagaaaatttaaatacttatgaatttttttacagcatgggaacccatttgtgttatatttaaaaagcagaacataactatgtagattaaatgttgattatacaaaatacacatgcataaagttcaaagattctaagatactagaaattaaaagttgattagaaaggtaacattttcaaatttacttgaatgttaaaactaatttatacaatttttgggataaggtgtctgtctgatttatcaataggttgtccaagaagccctggacaaagccagagaaggccgcacctgcattgtgattgctcaccgcctgtccaccatccagaatgcagacttaatagtggtgtttcagaatgggagagtcaaggagcatggcacgcatcagcagctgctggcacagaaaggcatctatttttcaatggtcagtgtccaggctgggacacagaacttatgaacttttgctacagtatattttaaaaataaattcaaattattctaccattttatctgacttgtaaaataagtttctggtttgtcatcataaaacataggtatgtctgtctcattctagatcaatttagaagacccaatttggggtttattacggcatttgaaatttgagagttagaagtgacacctgtcttgatgaagtattgaaacaacaggctagctctccctaagttattagaaacatccagaaaaagaacaaaattcaaggtaagtacaggtgtagaaatatagaagccacagacatagggaaatggtcttatggtcctgaatgggttgggtagacaggaaagtttgggaataattttcccaagtacaaaagaaaaataaattgttcaatagcctcatctctcttggtaattttctaaatcattctattgtggaatcaaagttttttaaatgaatgaatttccagctttatcatccaacatcaagagaaaatgaaattgccctaccgagctaactctgaaagcacatatcggttccataaagcaagaaagagccctatcattaagtatttttttaaagttttaaactcattaatttaaaatgtacaattatcagtataatttcaaacatcaaacatcaatgatacatgctgagtttctatagcaactgcgttctcttttataaatagactacttttcccagaaaatccgtttttcctacaatgaaaggtatgtttagatggaaagcaaaaaatatagacaacccctagaagctaaccacactgaaatgtttcaataattttccctttgttttctccacaattttctgcaacaaattagttcttagcgctctatcaggttgttaaattcagtaaatcatccaaagttcttctaactgtaataagccatattaccaaagaatttttcaaatgtgaccactgtgtgagtggatcaagtttcagattaaccaagataaaagtggggcaaaaagtacattactgcagtgacccaaagtagtgtttgacctattcctgtataatgatacccaaacttgcctgatcagaatcatggggcatctattcgtaaacaaaataattgattcagtaggtctgggttgaggcccaggaatctgttttttaaaatacactctaggtgattattcacatcaggcaagttaggaaaagtggtgaagtgtgagtgagaggaggtttctgtgcaggtgatgcagtctccaaaatacgcaactcattacacattataggttgagtattcttatctaaaatgcttgggatcagaagtgtttcatatttcagaatatttgcattatactcactggctgagcatcccaagtccagaaatcctaaatgttccaatgagcatttccttatgtcagcactcaaaatgttttggattttggagcatttctggtgttcaaatttggaatgttcaacctgtatttataaaccaaccaaatgattctaaatgtcctcgctatctagtttaaaaccctgcattagaatgaggggaaaaggttcttagttcagatctcatcttccttttctataccaactgtgaagaaatgtatcaaatgctactgaagccaactctgaatgttttcacagagaaatagtactgatgcttttcaggacagaggctggcacagtgtaaagggcttaattgttagcaataaaccagtcttatcaaattcagagcgtacatgtttcttaaaagggatgtatagaatcagtaccctgagtatgatgtaatctttacatatattaaaatgtctggcagattgctatagtacccataatcatgccctctgtgcccactcttttacaaagtgactttctcttatcaagatattactttttccccactccttgaatctggacttctcttgtgacttggtttaatcaacaaaatgcagccaggtgatggcatgtgacttcagggcctaggcctcaagggaccttcacctctcagaacactctcactaccaagtaaggaagctcaattctgaatactagatgatcagagaccatgtcaggagagacagtcccagccaccaaatttacagatagttggtgaggtgatcttaaactttccagcctcagtcctggttgcctgatgattatagctgtacaaataaacacaggcaagatgagcagaagaactgtctagctgttatcaatcaactgacaaagtaatgagaaacaataaactgattcaagacactaagttttggatggttaattacacagcaatatataactgaggtcaaaaagcaccagaaaagcaaacaggaatgaatcatttattcaaacaaaacaaaaagctatataattttgagaatttcattttttgagagtaaaaactacaaaattgaacagcgaggaggaaaaaattctgacaatgtgattcaacattaatcctttaaaagtcactgtaacaaatttaaacataagtgctttatttttctattcacaaaactaattataatacaccacaatgaattttgttacggttttatgtgtgtaatagagggtatacatctccatactactagctaatttgtctgtttgttcaaaagagttatttttctctttttttcttctttgagacagggtctcacgctcttgcccaggctatagcataagggcacatcacagctcactgcagccacaacctcctgggctcaaccgatcctcctgtctcagccttcaagtagcttggactacaggcacacatgcaccaccatacccggctaagtttttgatcttgtagagacaggaccttaccctgttgcccaggctggtctcaaactcctagcttcaagcaatcctcctaccttggcctcccaaagtgctaagattataggcatgagccactgcacccagcccaaaaaagttattttagatcaccattagattgtagtggtctttcccatcaaacataacaggcttgtatccctgtggtgaacatagaaggcattgatttcagggaaattagcatacaataatgtaattcataccctttggcagctaaaaaaattaaagtgcttgaaagatggactctacattgatgtccagagagaggatttataacccatgtaagtaccaacaaaaatacttaaaaattagagtaagacttgcattgttaaagtttgtagatttggattgttgaggcttaaatactgcatagttctatattcactatgtcataatttgcattgctgctgcatcagaggagcttaaaaatatttctaccttctatggcagaataaatttagagagcatgattctactaatttctacatttaacaagttttcttaacttgttaaaggaatgttagcaagtcaacattccttcccatctcatattaccaactcactcccagcactcagtttaatgatatgttttggtaagtgcttaatagatgattcatctctaaagatgagtagagttcatcagctgtatcatatcatgaaaagcacaaaaagtcagctgaactagcttttccgcatcagtctcgggacaggatttccaggctgaacaggccacaacaaacctgtgaagcataaataatgattaatgattacacaaaaggctccaaatagtgatggtgaatacaaccaggactttatttcatctggatattcatacatgaaatgtgaagtcttgctgacattaggtaaatgtaacctgacacaattgaaggtaaagccatatctgtagataatgctaagaaacacctcattcattagatgactagcacctagggacaaaggggaacaaattagctagagccctagagtgctctgaagctaggtcttactgcgtttaaaacagaacaaaaaacctccttcctagaaaagtccttcctaaagtgctactggaatgagttggaatatgaattcatgctacagtttttaatgaaatttaaactgtttttaaagagtacttgaagaaagtttgaaaaaaaaaaaaaggcagagaaggatgataggtgagaaaggctatttctaggagtcaaaaagagaaactcttgggatcaagtcatgccttccaccatctttctcgagatactcctaataagaaatcccagatctggcaagtgagaaaagtggccctgggaagctgaaataaataggagagaagcctgacttagagctagtcttccactttacagacagaagtttctatagcgaaatatgaattaggctcaaaattaaaatgtgcaatgtaatgcttctggaaaaccatgcaattttcacatcacttaaaaaaagagtaaattatgtcttcaacatgtgctttaagttaaacaaagagaaataaaaataagaacatgctctagcccagtatataatgatgaaaccaatgtctgagtggattatatttgcagaaaagtaatacagaaacctttaggaagtcctgccttgttttcacctcgtgattcatgatcacgaatcattctccagctacacttggcatggaattcccagatatttagcagcatctaaacatgtttctctccacagattaaccattcttattcaagtgtcaattttttaaaaaaatttcagttatctttctaaagaacagcctttcctacatgtacagacaattcatgaaagaaacacaatgccaaaaacaatgaaaacatgttttacttcataggtaaacaagtaatttatgttattttttgcctgtcaaatgagtaaatactttttttttttttgagaaagagtctcactctgttgcccagactggagtgcagtggcatgatctcagctcactgcaacctccatctcccagtgtgaagcaattctcgtgcctcaggttcccaagtaactcagactacaggtgtgtgctaccacaccagctaatttttgtatttttagtagaaatggggtttcaccatgttggccagactggtcttgaactcctggcctcaagtgatctagtgtaatccctcccaaagtgctgggattacaggcgtgagccaccatgcctagcctacagaatttttataataactagagttggcaatggtgtgatgaaatgagaaaggatacgtttataaccttatacattatttgtaatgatggaaaaacaaaatagtagagaagcagttagataaatcataggaatcctaagactggaaattatacaaccatcaaaatatctcaaagcatacttaatagcattgtaaactgcttgaaataataagcaagaatgaaattcacaaaaaaggacacaaatatttacagtgtaaatatacagtctacatacattataggttgggagcatcatataattatagtcttatgccatgtaatggaaatgtagataactttgttcttatgtagtttttatatttaacaacttttttttttttacaatcagcatgtaatacatttaaaatgcagtggtctagtcttggggtagaagagatgaaagaagaggcaggggaggctggcacactcagtgtaactttatgtaaatacattgtaatttctatctttttgctttttcatttctctaaaaatgtttctatactgtaccaacccttgccccacttgctttagtttcaatgctcctatcatagaagggtccagtgcatgtcataaaagccatcaaaaacagtcttgaataatcagaacgcttctgtgagattatctaacatcagttctggcactgcttctactatgtcttcctcctcgtcatttggctctggttcagaagcactcatctccttcaagtcaccttctgttaattcctctggtgtggtgactattagtgcgtgatttttcaaattttttaatagagatgaggtcttactatattgctcaggatggtctcaaactcctggcctcaagcaatcttcccaccttggccttccaaactgctggaaacacaggcatgagccactgaaactggcccaacatccataccttgaaatccttcaccctccacttttttttgccatatcgacaatctctttcatgatttcctagactggctctgtcgtaaatcctgtgaaatcatgtacatctggacatagttttctctagtagaaatttattgttttgggcttgactgctttcatgacttcttcttaacaacaatggcatcttcaatggtgtaatccttccagactttcatgatgttctcttccattggggtaaaagacaatccttggtgacaatcctttctattgagtcctgcatgtaatgagccttaaaggtccttataacccccgatctagagcctgaattagagacatgtctgggggcaagtagaccattttgacaccttgggtgtttaaatcatggggttctgggtggccagggtcactgtccaaaatcaaaacaactttaaaaggctaggtacttcctgacttcagtgacaaaacatcaaagaaaccagtccagaaaaaaaggttatcattggtccaggccttcttgtaaactagcagctgatgtttatcttttcccttcaaggctcaaagttaacagctttacagacaaaggcagtcctgatcataaaccctactgcatttgcacaaaacagtagtgttggcctatccctttctgccttaaagcctgatgcttgcttcttgtgatggttaatactgagtgtcaacttggtttgattgaaggatgcaaagtattgatcctgggtgtgtctgagacagtgttgccaaaggagattaacatttgagtcagtgggctgggaaagtcagacccaccgttaatctgggagggcaccatctaatcagctgccagcacagccagaatataaagcaggcagaaaaacctgaaaagactagactggcttagcctcccagcctacatctttctcctgtgctagatgcttcctggccttgaacgttggactctaacttcttcagctgtgggactcaaactggctttcttgcccctcagcttgcagctggcctattgtgggaccttgtgatcgtgtgagttaatgcttcttacatacttcttaaatatcctattagttctgtccctgtagagaaccctgactaatacacttctcttccttactaacaaatgtcctttgtggcattttttttttcagaatagggcacatttgtctgcattaaaaatctgttcaggcagatatcctttgtcctcagtgattttcttgatggtgtctgggaacttgtctgctgcctctacttctcctgttatcttgacatttttaaagccaaacctctttctaaaattatcaaactatcctttgctggcattaaattctccagcttcagatccttcaccttcctgtaaagttgtcatataataacttcgctttttctagaatcatagtagagtctataggtatgcctttttatagcaagaaaggcattttttttgctataaaaaatatagcacccaccaaaaagctgcatttttaattggagatcaaaaggcattttgcaaacggcaaagttttaatgcctgccagtgtagctgcagcaatagcttcacaaatttcctttttttttttaaatagtacttatactagatttatttatgttgaaatgatgggcaaatgcagctacagatctcaatctatgatacttatcaagcaaatcaactctttcttgtaatgtcatgacttttctctgcttcttgggagcacttgcagtatcactagaagcactacatgtgggtcccatggtattattcaatgtttacaatactgtactacccacaatgaaaaatacatgagaataaaccacgaaagatcactttttgtgatctgctaaagagacaaactgcttctgcagagatgattagcattatgtgacatcttaaggagatacttgcaactctttagctcaccacagtagcaacatgaggtagctacaaaattattatagtagtacagtgtgtaccacagttaatttaatgcaattatgattgaaaactgcatctttacatttgtttacatttctcttgactgcaaatggcaccatataaagtctgtaagggcttatgttcatatattttgataaatttcaactttgtatagtagatttgtgtatattttatggtagtaaatgatgaaatagactagtatctgtatatattttatgcattcatgaatactttagtttttgaatatttctacactacacagttttgagttttttcaaattgtctcaatctccaaaaaattttctcatttatttaaaatctgcatgtaagtgtgcccatgcagttcaaacccatgttgttcaagggtcagttgtattagaaactgaaatatgtcatgcatattactattccaatttttcacattctatctgaagtgcctccaagcctgccctcttcttattcacatagtgctaaatgtagtcacgtaatttttatgaagccaactatgctttgaaaagcccctgtaaagagactgccagactgtagataaggaccttacaagccttgctatcactttcattttatcttgttctccactactcttttttataccaggttttgatcttttctttctcattctttccataaacataagtcaaactccacacagcccaagtgaactgcatctgaattggtaaaactgttttaaaaagtataatttacccaatctcttttctctatctcattaatattgtctatgactacatgaaccaccatatatttaaacattttatctgagcttattataaaataccttgtacaaaccaaatatgttcatgggtgtactgattttgaggatgatgatatgattgccgaatcgacttgaaacagtgttctgcataaagacacctaagggactaatctgacaagtgtctcaaaagcaggacagagaaacatgaatatgcattaaatgcctaagtggaaaaaaatagttacttatgtagcaagtgacagatggcaatataagaatcacagtgtaggaaaggcatttaaaaacaaaagtaatacctttcctactctatagcacagaaagaataaaaaagagaagcctcacctgtcatctctgatatggtagaaaaatccataaccattgtgtaccatgggaactaccactccctggactcgtaaatagccaaccagacttgttgagagaacaaaatttccacctcctccgctgtgtggcacaataaaagaacattttactaggcctacagatgcttatattgtttctaaaaaccatttaatatacaaaaagaggaagccaattgatgaagctgtaaaacactacactatattaccttttggaaaaaagtgggtccgtaaagagttctggaacaggaagaccttcctcttttgctatgagtaagagacctaaaaggtgacgatcaaatcctgcaatgaaaccccaaatctcaggttagaaaaaaatttttcaccatgagagatttttaagtcagaaaaattttaacttaagtaccttttccagctgaacaatctttcatcattttattatgctttgcaaaagcttgtaacatcttttgctgccgctcacgaagctgtattaaaaatcgagagacacttcaataacacactgtgcaaaacccaactagaaaaaaatcctaagctcattgtaattaggattggggtaatttgggagaggaaagatttctaggaagatctataacacatactcctatatctttccatcagttattctatcgcctagtcttccctgtatatcctgcttcttatttctttcctggaataggaaactatgaacttgtgggcagcactgaagtgacactaacaagtataaagataaaagcaaccgatatttcaaaaatgaaagcataactaaaaatgacaataaagcagttctataaaattaagatacaggcactcatatataaccacatctagcaaaactaaagaaacaaatataatactaaaataacagtgagaaggaaatttgctgttgtctaaatgcttcaaaaaaaagagtatgaaacaaagcatacaactgtcctggttccactatatgaaacaagaatctgtcatttcaaaaacattcaaccacatcaagaaaaccttccttttaaaggcaccttgggatttctgcactttgttggtgttgttctaaaggtagattagaagtcctgaaatacctaaagtactgaagaccctttgcctagaaaataacacaaatgggatccttttcctgccttccctgtttccaattacacatttcactggtgaatgaacaaatgctttaaaaacctcagaaaagatgtctcaaagtattttaatgatccaggaaaactgaagcaaagaagttagttactcaaagaccacggttcctttagaacaattaaacaaatcttgtgagtttttttcctttccaatactcacattgacagaaggatcctgcatggactggcaccacctcactgcttcaactgtgcatgatcgcatagtctctgtacggccatgataaaaatgtcttgtcatagctgtttcatagcaacaaccagggctacaagaaaaaattaaaagagtgtatcataagaaagaaaatgctctaatatcattacagatatagttgcctaataaagctagctttgttcagagactaagccctttaacacagataggttggagactttcaacaaaaaagagcctatttccaataccaaagagcaaaaaatactctgataatgtgggctgtttcaaaggcgtggctgctgtcaggtcatatacattacagcctctaagatggcccccgtgattcctgcctcctgctatttatgctctgctgtaacccctcacttttgagcgcaggctagacagtgacttgcatctaatggggagagtacagcacaagtgatgggatatcacatctgcaattaggttacaaagagagctctctcttgttctcttatttctcatctgaagaaagccagctgccatgctgagggctgcccgatggagaggccctagcggcagaaaactgagggtgaccctctggacaacagctagggaggaactgaatgctactagttcccgtgggtgagctgagaagtggacctaccctcaggagagcagatgaaaacagccttggctgatactgactacaacctcatgaaaaacctttattaagtcagagttactcaactaagctgcatcacaaaaaatgacccacaaaattgtgatataaaattactgacccacaaaatatgtgatataaaattactgacccacaaaatgtgtgatataaaaaagtatgtgttttaagccactacgttttggggtaatttattacacagaaataggtaatacagagtccttgacctttagtgcctccatatagaacatgaaggactagaataaagtagaagtataatttaagaagttccccagggtgatatctgttttcctgggttggagaatgatatagcaattttaggtataaaactctcttactttcttattggttagaatttagagtcaaagagatcaaataaagtgagagtgaaaagtctctgaatgtgggtactaggagggctcaaacagttttcaagcctcttctgttcagtgtttctgtctctctggagtgaaatggtatcccttcaaagtgtgaaggagaaagtgtgaataatatttttaaatagcactaaaataacattctttcaggaaaacaaattaaaaataaaagcagtaaaaatgagtaataaaatattaccactgtaacctcaaatgaaataatgaaccttagcaatgatcttcaatgactactgaaacgttaggtaaaaaattcagggagtaaactttttataatagatgctggctgacaagtaaacacactcttaatcttaaaagatggagtagaaagcaaagagcattaactattggatttattattgtaaaacataaccaaaataggaactgatgcatattatcaatcctctagctctaactaccagtttacaagacatacaggagactgagcaacatgttaaatatcaccatgggaatacaatcaggaaaattcagaaaactctacaggataaatgacccagt

SEQ ID NO: 10 - DNA, 97659 bp, Homo sapiens
actgggtcatttatcctgtagagttttctgaattttcctgattgtattcccatggtgatatttaacatgttgctcagtctcctgtatgtcttgtaaactggtagttagagctagaggattgataatatgcatcagttcctattttggttatgttttacaataataaatccaatagttaatgctctttgctttctactccatcttttaagattaagagtgtgtttacttgtcagccagcatctattataaaaagtttactccctgaattttttacctaacgtttcagtagtcattgaagatcattgctaaggttcattatttcatttgaggttacagtggtaatattttattactcatttttactgcttttatttttaatttgttttcctgaaagaatgttattttagtgctatttaaaaatattattcacactttctccttcacactttgaagggataccatttcactccagagagacagaaacactgaacagaagaggcttgaaaactgtttgagccctcctagtacccacattcagagacttttcactctcactttatttgatctctttgactctaaattctaaccaataagaaagtaagagagttttatacctaaaattgctatatcattctccaacccaggaaaacagatatcaccctggggaacttcttaaattatacttctactttattctagtccttcatgttctatatggaggcactaaaggtcaaggactctgtattacctatttctgtgtaataaattaccccaaaacgtagtggcttaaaacacatacttttttatatcacacattttgtgggtcagtaattttatatcacatattttgtgggtcagtaattttatatcacaattttgtgggtcattttttgtgatgcagcttagttgagtaactctgacttaataaaggtttttcatgaggttgtagtcagtatcagccaaggctgttttcatctgctctcctgagggtaggtccacttctcagctcacccacgggaactagtagcattcagttcctccctagctgttgtccagagggtcaccctcagttttctgccgctagggcctctccatcgggcagccctcagcatggcagctggctttcttcagatgagaaataagagaacaagagagagctctctttgtaacctaattgcagatgtgatatcccatcacttgtgctgtactctccccattagatgcaagtcactgtctagcctgcgctcaaaagtgaggggttacagcagagcataaatagcaggaggcaggaatcacgggggccatcttagaggctgtaatgtatatgacctgacagcagccacgcctttgaaacagcccacattatcagagtattttttgctctttggtattggaaataggctcttttttgttgaaagtctccaacctatctgtgttaaagggcttagtctctgaacaaagctagctttattaggcaactatatctgtaatgatattagagcattttctttcttatgatacactcttttaattttttcttgtagccctggttgttgctatgaaacagctatgacaagacatttttatcatggccgtacagagactatgcgatcatgcacagttgaagcagtgaggtggtgccagtccatgcaggatccttctgtcaatgtgagtattggaaaggaaaaaaactcacaagatttgtttaattgttctaaaggaaccgtggtctttgagtaactaacttctttgcttcagttttcctggatcattaaaatactttgagacatcttttctgaggtttttaaagcatttgttcattcaccagtgaaatgtgtaattggaaacagggaaggcaggaaaaggatcccatttgtgttattttctaggcaaagggtcttcagtactttaggtatttcaggacttctaatctacctttagaacaacaccaacaaagtgcagaaatcccaaggtgcctttaaaaggaaggttttcttgatgtggttgaatgtttttgaaatgacagattcttgtttcatatagtggaaccaggacagttgtatgctttgtttcatactcttttttttgaagcatttagacaacagcaaatttccttctcactgttattttagtattatatttgtttctttagttttgctagatgtggttatatatgagtgcctgtatcttaattttatagaactgctttattgtcatttttagttatgctttcatttttgaaatatcggttgcttttatctttatacttgttagtgtcacttcagtgctgcccacaagttcatagtttcctattccaggaaagaaataagaagcaggatatacagggaagactaggcgatagaataactgatggaaagatataggagtatgtgttatagatcttcctagaaatctttcctctcccaaattaccccaatcctaattacaatgagcttaggatttttttctagttgggttttgcacagtgtgttattgaagtgtctctcgatttttaatacagcttcgtgagcggcagcaaaagatgttacaagcttttgcaaagcataataaaatgatgaaagattgttcagctggaaaaggtacttaagttaaaatttttctgacttaaaaatctctcatggtgaaaaatttttttctaacctgagatttggggtttcattgcaggatttgatcgtcaccttttaggtctcttactcatagcaaaagaggaaggtcttcctgttccagaactctttacggacccacttttttccaaaaggtaatatagtgtagtgttttacagcttcatcaattggcttcctctttttgtatattaaatggtttttagaaacaatataagcatctgtaggcctagtaaaatgttcttttattgtgccacacagcggaggaggtggaaattttgttctctcaacaagtctggttggctatttacgagtccagggagtggtagttcccatggtacacaatggttatggatttttctaccatatcagagatgacaggtgaggcttctcttttttattctttctgtgctatagagtaggaaaggtattacttttgtttttaaatgcctttcctacactgtgattcttatattgccatctgtcacttgctacataagtaactatttttttccacttaggcatttaatgcatattcatgtttctctgtcctgcttttgagacacttgtcagattagtcccttaggtgtctttatgcagaacactgtttcaagtcgattcggcaatcatatcatcatcctcaaaatcagtacacccatgaacatatttggtttgtacaaggtattttataataagctcagataaaatgtttaaatatatggtggttcatgtagtcatagacaatattaatgagatagagaaaagagattgggtaaattatactttttaaaacagttttaccaattcagatgcagttcacttgggctgtgtggagtttgacttatgtttatggaaagaatgagaaagaaaagatcaaaacctggtataaaaaagagtagtggagaacaagataaaatgaaagtgatagcaaggcttgtaaggtccttatctacagtctggcagtctctttacaggggcttttcaaagcatagttggcttcataaaaattacgtgactacatttagcactatgtgaataagaagagggcaggcttggaggcacttcagatagaatgtgaaaaattggaatagtaatatgcatgacatatttcagtttctaatacaactgacccttgaacaacatgggtttgaactgcatgggcacacttacatgcagattttaaataaatgagaaaattttttggagattgagacaatttgaaaaaactcaaaactgtgtagtgtagaaatattcaaaaactaaagtattcatgaatgcataaaatatatacagatactagtctatttcatcatttactaccataaaatatacacaaatctactatacaaagttgaaatttatcaaaatatatgaacataagcccttacagactttatatggtgccatttgcagtcaagagaaatgtaaacaaatgtaaagatgcagttttcaatcataattgcattaaattaactgtggtacacactgtactactataataattttgtagctacctcatgttgctactgtggtgagctaaagagttgcaagtatctccttaagatgtcacataatgctaatcatctctgcagaagcagtttgtctctttagcagatcacaaaaagtgatctttcgtggtttattctcatgtatttttcattgtgggtagtacagtattgtaaacattgaataataccatgggacccacatgtagtgcttctagtgatactgcaagtgctcccaagaagcagagaaaagtcatgacattacaagaaagagttgatttgcttgataagtatcatagattgagatctgtagctgcatttgcccatcatttcaacataaataaatctagtataagtactatttaaaaaaaaaaaggaaatttgtgaagctattgctgcagctacactggcaggcattaaaactttgccgtttgcaaaatgccttttgatctccaattaaaaatgcagctttttggtgggtgctatattttttatagcaaaaaaaatgcctttcttgctataaaaaggcatacctatagactctactatgattctagaaaaagcgaagttattatatgacaactttacaggaaggtgaaggatctgaagctggagaatttaatgccagcaaaggatagtttgataattttagaaagaggtttggctttaaaaatgtcaagataacaggagaagtagaggcagcagacaagttcccagacaccatcaagaaaatcactgaggacaaaggatatctgcctgaacagatttttaatgcagacaaatgtgccctattctgaaaaaaaaaatgccacaaaggacatttgttagtaaggaagagaagtgtattagtcagggttctctacagggacagaactaataggatatttaagaagtatgtaagaagcattaactcacacgatcacaaggtcccacaataggccagctgcaagctgaggggcaagaaagccagtttgagtcccacagctgaagaagttagagtccaacgttcaaggccaggaagcatctagcacaggagaaagatgtaggctgggaggctaagccagtctagtcttttcaggtttttctgcctgctttatattctggctgtgctggcagctgattagatggtgccctcccagattaacggtgggtctgactttcccagcccactgactcaaatgttaatctcctttggcaacactgtctcagacacacccaggatcaatactttgcatccttcaatcaaaccaagttgacactcagtattaaccatcacaagaagcaagcatcaggctttaaggcagaaagggataggccaacactactgttttgtgcaaatgcagtagggtttatgatcaggactgcctttgtctgtaaagctgttaactttgagccttgaagggaaaagataaacatcagctgctagtttacaagaaggcctggaccaatgataacctttttttctggactggtttctttgatgttttgtcactgaagtcaggaagtacctagccttttaaagttgttttgattttggacagtgaccctggccacccagaaccccatgatttaaacacccaaggtgtcaaaatggtctacttgcccccagacatgtctctaattcaggctctagatcgggggttataaggacctttaaggctcattacatgcaggactcaatagaaaggattgtcaccaaggattgtcttttaccccaatggaagagaacatcatgaaagtctggaaggattacaccattgaagatgccattgttgttaagaagaagtcatgaaagcagtcaagcccaaaacaataaatttctactagagaaaactatgtccagatgtacatgatttcacaggatttacgacagagccagtctaggaaatcatgaaagagattgtcgatatggcaaaaaaaagtggagggtgaaggatttcaaggtatggatgttgggccagtttcagtggctcatgcctgtgtttccagcagtttggaaggccaaggtgggaagattgcttgaggccaggagtttgagaccatcctgagcaatatagtaagacctcatctctattaaaaaatttgaaaaatcacgcactaatagtcaccacaccagaggaattaacagaaggtgacttgaaggagatgagtgcttctgaaccagagccaaatgacgaggaggaagacatagtagaagcagtgccagaactgatgttagataatctcacagaagcgttctgattattcaagactgtttttgatggcttttatgacatgcactggacccttctatgataggagcattgaaactaaagcaagtggggcaagggttggtacagtatagaaacatttttagagaaatgaaaaagcaaaaagatagaaattacaatgtatttacataaagttacactgagtgtgccagcctcccctgcctcttctttcatctcttctaccccaagactagaccactgcattttaaatgtattacatgctgattgtaaaaaaaaaaaagttgttaaatataaaaactacataagaacaaagttatctacatttccattacatggcataagactataattatatgatgctcccaacctataatgtatgtagactgtatatttacactgtaaatatttgtgtccttttttgtgaatttcattcttgcttattatttcaagcagtttacaatgctattaagtatgctttgagatattttgatggttgtataatttccagtcttaggattcctatgatttatctaactgcttctctactattttgtttttccatcattacaaataatgtataaggttataaacgtatcctttctcatttcatcacaccattgccaactctagttattataaaaattctgtaggctaggcatggtggctcacgcctgtaatcccagcactttgggagggattacactagatcacttgaggccaggagttcaagaccagtctggccaacatggtgaaaccccatttctactaaaaatacaaaaattagctggtgtggtagcacacacctgtagtctgagttacttgggaacctgaggcacgagaattgcttcacactgggagatggaggttgcagtgagctgagatcatgccactgcactccagtctgggcaacagagtgagactctttctcaaaaaaaaaaaaagtatttactcatttgacaggcaaaaaataacataaattacttgtttacctatgaagtaaaacatgttttcattgtttttggcattgtgtttctttcatgaattgtctgtacatgtaggaaaggctgttctttagaaagataactgaaatttttttaaaaaattgacacttgaataagaatggttaatctgtggagagaaacatgtttagatgctgctaaatatctgggaattccatgccaagtgtagctggagaatgattcgtgatcatgaatcacgaggtgaaaacaaggcaggacttcctaaaggtttctgtattacttttctgcaaatataatccactcagacattggtttcatcattatatactgggctagagcatgttcttatttttatttctctttgtttaacttaaagcacatgttgaagacataatttactctttttttaagtgatgtgaaaattgcatggttttccagaagcattacattgcacattttaattttgagcctaattcatatttcgctatagaaacttctgtctgtaaagtggaagactagctctaagtcaggcttctctcctatttatttcagcttcccagggccacttttctcacttgccagatctgggatttcttattaggagtatctcgagaaagatggtggaaggcatgacttgatcccaagagtttctctttttgactcctagaaatagcctttctcacctatcatccttctctgcctttttttttttttcaaactttcttcaagtactctttaaaaacagtttaaatttcattaaaaactgtagcatgaattcatattccaactcattccagtagcactttaggaaggacttttctaggaaggaggttttttgttctgttttaaacgcagtaagacctagcttcagagcactctagggctctagctaatttgttcccctttgtccctaggtgctagtcatctaatgaatgaggtgtttcttagcattatctacagatatggctttaccttcaattgtgtcaggttacatttacctaatgtcagcaagacttcacatttcatgtatgaatatccagatgaaataaagtcctggttgtattcaccatcactatttggagccttttgtgtaatcattaatcattatttatgcttcacaggtttgttgtggcctgttcagcctggaaatcctgtcccgagactgatgcggaaaagctagttcagctgactttttgtgcttttcatgatatgatacagctgatgaactctactcatctttagagatgaatcatctattaagcacttaccaaaacatatcattaaactgagtgctgggagtgagttggtaatatgagatgggaaggaatgttgacttgctaacattcctttaacaagttaagaaaacttgttaaatgtagaaattagtagaatcatgctctctaaatttattctgccatagaaggtagaaatatttttaagctcctctgatgcagcagcaatgcaaattatgacatagtgaatatagaactatgcagtatttaagcctcaacaatccaaatctacaaactttaacaatgcaagtcttactctaatttttaagtatttttgttggtacttacatgggttataaatcctctctctggacatcaatgtagagtccatctttcaagcactttaatttttttagctgccaaagggtatgaattacattattgtatgctaatttccctgaaatcaatgccttctatgttcaccacagggatacaagcctgttatgtttgatgggaaagaccactacaatctaatggtgatctaaaataacttttttgggctgggtgcagtggctcatgcctataatcttagcactttgggaggccaaggtaggaggattgcttgaagctaggagtttgagaccagcctgggcaacagggtaaggtcctgtctctacaagatcaaaaacttagccgggtatggtggtgcatgtgtgcctgtagtccaagctacttgaaggctgagacaggaggatcggttgagcccaggaggttgtggctgcagtgagctgtgatgtgcccttatgctatagcctgggcaagagcgtgagaccctgtctcaaagaagaaaaaaagagaaaaataactcttttgaacaaacagacaaattagctagtagtatggagatgtataccctctattacacacataaaaccgtaacaaaattcattgtggtgtattataattagttttgtgaatagaaaaataaagcacttatgtttaaatttgttacagtgacttttaaaggattaatgttgaatcacattgtcagaattttttcctcctcgctgttcaattttgtagtttttactctcaaaaaatgaaattctcaaaattatatagctttttgttttgtttgaataaatgattcattcctgtttgcttttctggtgctttttgacctcagttatatattgctgtgtaattaaccatccaaaacttagtgtcttgaatcagtttattgtttctcattactttgtcagttgattgataacagctagacagttcttctgctcatcttgcctgtgtttatttgtacagctataatcatcaggcaaccaggactgaggctggaaagtttaagatcacctcaccaactatctgtaaatttggtggctgggactgtctctcctgacatggtctctgatcatctagtattcagaattgagcttccttacttggtagtgagagtgttctgagaggtgaaggtcccttgaggcctaggccctgaagtcacatgccatcacctggctgcattttgttgattaaaccaagtcacaagagaagtccagattcaaggagtggggaaaaagtaatatcttgataagagaaagtcactttgtaaaagagtgggcacagagggcatgattatgggtactatagcaatctgccagacattttaatatatgtaaagattacatcatactcagggtactgattctatacatcccttttaagaaacatgtacgctctgaatttgataagactggtttattgctaacaattaagccctttacactgtgccagcctctgtcctgaaaagcatcagtactatttctctgtgaaaacattcagagttggcttcagtagcatttgatacatttcttcacagttggtatagaaaaggaagatgagatctgaactaagaaccttttcccctcattctaatgcagggttttaaactagatagcgaggacatttagaatcatttggttggtttataaatacaggttgaacattccaaatttgaacaccagaaatgctccaaaatccaaaacattttgagtgctgacataaggaaatgctcattggaacatttaggatttctggacttgggatgctcagccagtgagtataatgcaaatattctgaaatatgaaacacttctgatcccaagcattttagataagaatactcaacctataatgtgtaatgagttgcgtattttggagactgcatcacctgcacagaaacctcctctcactcacacttcaccacttttcctaacttgcctgatgtgaataatcacctagagtgtattttaaaaaacagattcctgggcctcaacccagacctactgaatcaattattttgtttacgaatagatgccccatgattctgatcaggcaagtttgggtatcattatacaggaataggtcaaacactactttgggtcactgcagtaatgtactttttgccccacttttatcttggttaatctgaaacttgatccactcacacagtggtcacatttgaaaaattctttggtaatatggcttattacagttagaagaactttggatgatttactgaatttaacaacctgatagagcgctaagaactaatttgttgcagaaaattgtggagaaaacaaagggaaaattattgaaacatttcagtgtggttagcttctaggggttgtctatattttttgctttccatctaaacatacctttcattgtaggaaaaacggattttctgggaaaagtagtctatttataaaagagaacgcagttgctatagaaactcagcatgtatcattgatgtttgatgtttgaaattatactgataattgtacattttaaattaatgagtttaaaactttaaaaaaatacttaatgatagggctctttcttgctttatggaaccgatatgtgctttcagagttagctcggtagggcaatttcattttctcttgatgttggatgataaagctggaaattcattcatttaaaaaactttgattccacaatagaatgatttagaaaattaccaagagagatgaggctattgaacaatttatttttcttttgtacttgggaaaattattcccaaactttcctgtctacccaacccattcaggaccataagaccatttccctatgtctgtggcttctatatttctacacctgtacttaccttgaattttgttctttttctggatgtttctaataacttagggagagctagcctgttgtttcaatacttcatcaagacaggtgtcacttctaactctcaaatttcaaatgccgtaataaaccccaaattgggtcttctaaattgatctagaatgagacagacatacctatgttttatgatgacaaaccagaaacttattttacaagtcagataaaatggtagaataatttgaatttatttttaaaatatactgtagcaaaagttcataagttctgtgtcccagcctggacactgaccattgaaaaatagatgcctttctgtgccagcagctgctgatgcgtgccatgctccttgactctcccattctgaaacaccactattaagtctgcattctggatggtggacaggcggtgagcaatcacaatgcaggtgcggccttctctggctttgtccagggcttcttggacaacctattgataaatcagacagacaccttatcccaaaaattgtataaattagttttaacattcaagtaaatttgaaaatgttacctttctaatcaacttttaatttctagtatcttagaatctttgaactttatgcatgtgtattttgtataatcaacatttaatctacatagttatgttctgctttttaaatataacacaaatgggttcccatgctgtaaaaaaattcataagtatttaaattttctaatcttctgtttaactagttcccttttgagtattttccagtttttcattcctaatgtgctaaaaatgtaatttgtgcagcttttttcttttgaatgctttactttataaaatatataatcattttagaaaatttagaataaaatattccattacttcaaaataaccactatcagccgggcaaggtggctcacgcctgtaatcccagcactttgggaggccgaggcaggcggatcacaaggtcaggattcgagaccagcctggccaacataatgaaaccctgtctctactaaaaatacaaaaattagctgggcatagtggcaggcacctgtagtcccagctactcaggaggttgaggcaagagaatcgcttgaaccctggaggcagaggttgcagtgagctggattgcgccactgcactacagcctaggcaacaacgagaccccgtctcaaaaaaataaaaataaaaaccactatctaacgttctgtgtttttccccctgtgcttgtgtgtgtttttttcatggttgacagcaaaatcccttctatttcataaattaaataagacataagttgggaggccacacacaccttttcactttcagtatccagagctgatgtagcttcatccaacaggaggatttgaggttgtctgatgagggctcgggcaatagcaatcctctgtttttgacctcctgagagctgagtccccttatctcccactcttgtttcatatttctgcaagttaaccaaattataaatatgttgaatgaactgttgcttaacagttgacagttctatttacaagaaaaacatttagagtcaataacagtttctataacgttgtttcaacttaacagagtgtttattttcaaaatcaaactagaaaactagtgactttaattctcaatggtattctacaataggctatcttataattaactttctttaaaataggaggaggatactctaaaataacaaatgctataacggatatatgaatcaataagtcatttgttgtcattatcaagtattatgcactgtacatagtagtatgtgctatactcttatacaactggcagtgcagtcgctttgttatgccagcatcaccacaaatacttgaattttgtgttgcactatgatattatgacagctatgtcactaggcaataggaatttttcagttccattataatcttatgggaaccactgtggtatacgcagtctgtcattgaccaaaatgttgttatgtaacacaggactgtagtagtatacacagcacactatgaaagatcagaagaaggagatagaagttgttatggagacagggtagaaggagaaaaaaggggaaataaatgaaagaaatctttttagagaagtttggggagctagattttgagagagcattctaggctgagaaagagcatatgaatagagatgtaaattgagtcagttcagtttgcagggcttatgcagtgatgtatatcatgtgaattaatttcctaaggtccagtggtcacttatattaagagctgaagctgtaaatttttctattcacagtcaaatccaatatttgattcaggtcaatgtgcattaaaggttggtaaggctaaccaaaatgaaagggttttaaaattttatttgtgggtgtgagtgatttctaactatagcagaaaataaaagcaaaaataattaagctctacgtcagtgtaacccagtggaaccccgaatgctggaagaatgccataaaatgaattgtccctaccatcacttttagggacctcaagccatccttccagggctacacatgtttaaagtgaactaaaaatggatcatggactgaaatttaaaatgtaaagctataaaacttttagaaaaaaacatggagaaaatattttgggcctagggctaggcaacgagttcttagacttgacactgaaagcataatccataaaaggaagaattggtaaattggacctcatcaaaagtaaaacttttgctctgcaaagaccttcttataggatgaataaacaagctacagactgggagaaaacatttacaaactacatatccaacagtaattacaatatgttaaacaaacaaacaaaaaaaacttctgaaaactcagcagtaaaagataaaaatccaattagaatatgggcaaacaacatggagacatttcaccaagaggatatatagatggtaaataagcatataaaaaactatgttcaacatcatttgccattgggaaatgcatattaaagccacagtgatgtatcactacactcttatcagagtggtaaaaataaaaactaatgacaacagtaaatgctggcaaagattcagagaaactacatcacttacacattgctggtaggaatgtaaaatgggatggccactctggaaaacagtttagcagtggcttataaactaaacatgaaattgccatactgctccacaattctactcctgggtgtttatcccaaagaaataaaaacttgaattcatacagaaacctgtatacaagtatttacagcagctttatttgcaatagccagaaacaggaaataacccagctatccttcaacaggtgaatggttaaactgtggtacatccacactgtggaatatcactcagtaataaaaagcaatgcctatgaatacacacaacttcagggaattagctgaaagacaaaagttaatcccaaaagtttacatactgtatatatttttataaaacatttttaaaatataaaattatacaaacggagaacagattcatgtttgccagagtttgagaggaatgagggtgggaggaagggatatatgcatggctctaaaagggcaatatgagggatctttatggagatgagaatgttctgtatctttttttttttttttttgagacggagtctcactctgtcgcccaggctggagtgcaatggtgtgatcttggatcactttaacctccgtttctcaggttcaggcgattctcccgcctcagcctcctgagtagctgcaactacaggtgcccaccacgacgcctggttgatttttgtgtttttagtagagacagggtttcaccatgttggccaggatggtctcaatctcctgacctcgtaatccacccaccttggcctcccaaagtgctgagattacaggtgtgagccaccgtgcctggccagtgttcttaattagtggatctatgaatccccatctgcaatacagctgcacagaactaaatccatatgcaaatgaatgcaagtaaaacaagggaagtctgaataagatgagtggagtgtatcaatatcagtatcctgcttgtgatactgtatactagttttgcaagatattgtcattggcagaaactaggtaaagggtacataagatctctgtattccttacaattacatgtaaatccataattatctcaaaataaaaactataattgttttaaaagtaccatagggctaaaccaaacatgactgcagtctaaatgcagccctcaaccaccagtctgtaacctgaagtatggtggttttgagcttctcactacatttgtatgaggtaggcataatgtattcccatttacaaataaggaagcttggtatcctgaagtgccttgtccaagttgttaatgttagtaaatcaacatattttgttacaagattttgttggcataactttggtaattgtttgggggataaaaagtagtctcttctgatttcagctactctttaacttacgtggggtaacgtctcgatgaaaggatgtatgttggcagctttggctgcactcacaatttcatcctgtgatacaacccggctgttgtctccataggcaatattctcggcaatgctgcagtcaaataggataggctcctgagacacgattccgagttgagctctgagccactggacattgagtttctttgcttcttgaccatcgagaagctgaaaaccaaagtccacaaactataagaagggtataaaaaagaaaaaaaaactaaaaagttactagattgtccatttggaggatcgttgcatgagggtgtcagcagcttcaaaacaacaaccctccaagacttataccattgaggccagcatggccaacatgatgatttttatggtgattaagccatccctatcttggtctaactggcaaaatggtagcacatttgaccctcttttttcacacttctctttgtccttgtctgccctcctccagccatctgtgtcctactctgcgttaaagaagcctgcatcaaggtgtcccactcaggtctgctgtccccagaataatcctaacccttcaccttgacttgatttccccttcccccatgcacagcagtgaaaaagctgatcagaagcagggccccaaaagctggttgactctggtcctacctctacctctcttttccctgaaaactactagccttaactttccctcacctctctgatagcactaaggacaagaatcccatggaaaaggaacaagttacaaagggcagtgtctttgggaggattatttttgctggcagtgatggttttgtttttgttttacttgctataggcaggaggcatggtgctcctagggaagtgttgtaatatgtacttgaaaatacagcctcgtgtaaggtaaagcttacaggcaaaggaatagacacaagtccagctagtcttgatctcaataaagaaaaaaattcccaccatcgtatcagcacaccatatttacagagttttggtgagctggtttgcctatgttacctgcagaatagctataatagcaaagcagaagatttccagagagaaacaactaaattaggcttaacaaggctgatttaggcttaacaactattaataaaagaaacaaggcttaacactttggtgactgtctaatggggacaggctcccagggctctgtcatgggtgctgtcccaaggttatggcagatacaagcattatcagtaagagttggtcttcactcaaggaagagagccacggggctacatgctagaaaatcaatgacaaaagccaaatatgaaagggctggaggttgaggatcaaagtcaaagttcgagagccgagaattcaaggtaagagaaggcagcaaaactgaaagcggtggggaggcaataagcaggtagcaccctgttttggaagtcagctttgaatttgggcaggagtctgtagttcacctttataagccagtaagtcagtatttgcttagaacaatcagactgactggaaaggcccatgacagggtaaaaattaaacttatattcagtattttctgagctagactgaattccagacattctgtcctattgtccccatatatttcccagatatggtgccagttggggtttatagaatgtggtcattgtatcaaacaggattctaggtctacatttgtccaatattttccattatgacaatattggttgggccaattaaaatatagccttcaatcaagttataaggaaatgtgctcaccactgtccccgccaaggggtcgtagaaccgctccaggagctggaccaccgtgctcttcccacagccactgctgcccaccagggctagtgtctggcctttcttcacctccaggctcagcccctgaagcactggcacgtttgctcgggtgggatagttgaacacgacttcattaaatgttatatttccttcaaatttatcctgaataaatgtttaaatgttgctattataattggcctgataattattggaataagaaatattatttcaaggaaactttaccaaagactgtagtagagaaacataaaattcatatttggtatagttctggtgccagttaatattgatagcaagttattatggtgtgaaatgaaggtgagagataggggtataggtgagattagacaaaaagtcattaccatgagttgttatctaacttagtttctgatttctttaagatattcatttagctttcccaactgcttattctgaagctggaatcaagccagtgtccaaaagactctaaaggcttggaaatttagcaacagtttctacccaaagtttcagtgggcagccctgatggcaaaccctggcagtttcttaagttcactttctttatctcactcactgggcacagcaattttatcagaacatgaaatacctgggaaagtcctggaaagactgtgttaagtcctagcctctttacctacacagctgcttgtatattacaacgtgtagcatcttgtgtcatacaaagaacactcagatgtgagtttaagttacctttatagataataaagcacaggattattactctcattgtgaacgaactgcccttcttaccaattacatcttaactattataaaaagtgattaaagtcaaattactaattgcattaacatggcagaattatacctttatgtagaaatgactaaatttttgtggaaactattcagttctaatatatctggttttcccttttttttttattttgatgtgctaaacttcaggatccttgaaaccacctataaaatttttaaatgtcagtcaagttgcccaaatattagctatataaatattacaaattaaatgaaacacatgttggtgtaatcatcacaaacttatcctgtagctataatctagcagacagcaaaccttagggaaaaattgatcaagcatcatcaggcatcagagaacttacaggcttcagcccctcttcactgtagctgtcaatcagaggttgtctttcaaacagcatgaataagtgggctgcagacagcttagctttagcatagtctggagcaaatgaactggcatgtcctagagccactgcaccaaatacaattgcagaaaacaccctagacagaagtagaggaattcaaaaattagcttttataattaactccatgatgtttgaaagtctaaaggtatagtgcttaccagtattttttccctttactccttaatcatcccctttctccccgacatacattttcataaaattctagtaacaagagaaatctaggagaggggcaagatccacttcctgagggtttaccttttctcgacttgctttctgacttccctttgcatagtagcccctaatttcttaggactactgtgacttcccaaaggtttttactttcaagaagaggcttataactgaatctgatctgtgagctcagctaattttagttgctggttatactctttttagagttgagggaattgaagcacaaagtgtgtaagggccttgatcagttccaagtaagctttttctgataaagctctggccctgacttccagtttgtggtttcttctgtactaccacacaaatgataatcatcatcactgtaaataatttttattagggaaaataagcttttactagaaatagctttttatttacaattaaaataactatgctatcagttattatgcttagtatctgggtgatgacatggtctgtacaccaaacccccatgacatgagtttgcctgtattaacgaacatgcatatgtacccctgaacctaaaataaaagttaaaataactattgacagcactctggaaaaaaaagtcaccttaaactaaagttctattttctaattatatgctctttaaagatggatattgattatgacaacttttaggaagggctaaagatcctgagatctacaacttcacaaagcaatttacttctgataccagcactaccccagagaaaggagtgggagttctctactaataatggagaactttaagttttcaccttcaaatttctaaagctaagatattaaaaatgggttttaatacctaggggctgggatgagaggtatagtaaaactttcctttaaatgcttgacgaaaaggtgagttgccaaaaactaagttttaaaatagtgatgaacaacccacatgtggctgcatagcttccctgtactgcctaaagctgtcttctaggtttccataatttaacatttcaatgattttaaaaaagaaaggaagcaggaataatgtgactttccaacggttttcactttcagaaatgttctcaatattttttatacaataaatagttgtactctaagttgtaatccccagctgctagttccatttgtcccccaaaatcactcctcactttttacccatctctaccttctatccccctactccatgtctggggattccaactatcatgaactgaatcaaaaggttttcttgtcctctggtttcataggatttggccaatggaaggcacagcagaggatagggaggctggaagggagtgaggccaaggtatttgtttctttggcttctttcttgtcagattgcttgtgcagttgctgtccctccatcaaagaccacagaaagcacctatgctgagttctggctatctttcccttctcttgcctttaggcttagggtggtagcagtttccagctgggtattgctggggtgttaacttccttcttgggtactgcttaccttaacactttccaggcctttgtaaatagaccctttagcaaactcatcaattaacccatttgctgtgccatttgtttcctgctgggatcctgatacaaagattatatagatacattttttcatggtaattttaattttggatgaaaaaaaaaacccagctcttaacacactttcgcttttttgtcttgaccctgtttcaaaaatggctgttcaccactgctttaaaatcatcccaccagagcagaaacataccaaatgatcttaaaaagagttgcttccctctttcaagcccagattgcaacctaatggaatgtgctgagcacattatgaaagaaggcatcaaacagaaagaccagtagtttgccttggaaaccaaggaaaaaggagaggctgagaggcaaatgttggcagggctgtctcatctcaggcctggttagggagagagtgcctttgccagacttccaacaagtattcccatcttgttttccaggccatgttttggttgtagataatagtaagctatataaccctgttttgagtccatggtcaccagcaactttctaattatgattttttctgcctatattctataatgagaaaatttgcatcatcctgaccaggatcatatgtacaactaaaactgtgctttctgatcattttcataagcttaattgtagcccgcaaaatgaaactgcacttggagtattaacaagatcagatctctgtgcctgccaggatggaaactgtggtaaatttaaatccctgacctcatctttggacacaggagtcatttttttcctactctaaacttttgcataaacctactaaaaccttattatagaataatcttaatatttctaaagctacttacagaataacatctctgaagcgcatatgtccattcacaatgagatatgcaccaaatcgaaaacaaccggcataggaaaaatacataaatgcttgtgagatactaaaagtaattccatagatgtgtgccttctgcacagaattcctgaaaagcaaatcagtatacttgtaaccatctcttcagcctcctttagcgctgtgtagtggaaagagcacggcttctaagtctggccgagtgggtttaagttccacctccagttatattagtttgggtaaatgataacttctctaaacatttataccatggaaataatcactgtaatgcagaattgttttgacaaaaaccatataaatgtctagcacagtgcctagttcatagtggttcctcaaatgataactgatattattacatattaatatctgatgactccaatgttcaactcctattaagcatagttgttgtttcaaaaatacctaaaatgtcaggatctgaatttaagtttgaattatctgaatgtgatttactactattatgttgtttcctgtaactaattgtactctgttaggttaaaattcatgtttcagattcacaaaagttgagtccctgaagtttacatagatatacaccagaagtcctttcccaagctagatcctgccagccgcccctgtatataatttattttgtacagtttctaatttgacttcatgctatactttattggcttctgaatcctccaaaagaactataattgagttactctcaaatatgagggtgtttttggcaaaaggaaaaattcaaagtattactaatttggatggtttaacttatgtgctgtgaacatggtgttacaaaacttgagcattctgtgaagctattgaatctttaaattataaccaagttcataattagcttcacctttctattcttccttaaccctccttgaagttaaaaacaggtcatcattaatggtgcatacatgttttatgtcaaacaacaaatggacacaaaggtgtagctgcatgttatttagtatcatatgaagtgtgcataactgaggagatggcataaattgagactttcaaagatatctgttcaaatttgcaagtgttcaaaactactgttccagtctgcaaaattgtaatctaagttgtgttcaactttgtgttaaaacatactcatttataaaatcaggctgcagtggaaatgagtggcaaatggtgccattaggagtttcttgaattgctcaactataaaccactgaaatagtctgtgtttctttatcttcagagtaggttggatctggtcctcattcagagaacaaatgaaatactttcctctggaacatacccaatagcaagtctcacttttggttcagtctacacactgcaaagaaaggtttgagcaattccttaaaggaatgtttgtcttaagtcacccagataggttatttatgttgcctgcactgataaccaaagactgtgcaattctctatatcttttacgtcttggagacctattcttgttgtttgcataagatgtaaaaaatataattctgtgtcctagtcacatcaaaaagctacttattttcagtgacagaattgttgaaaaaaggccacccttatagtcatatcattgtttggagcagcagagcttttattatctttttgggacaataattcagccttaggaaagcactaggttcttagcaggaatcatatggttcattacctgtaaggtccatacaatttttcaacatacattgattcaaattttctttcctgggtcaaagacacaactgtcctaatattttctattgcctctgttgcaatctgtaacacagaatagaccttcattagaagtggtgttttcacttctgaaataatgaaaaataagccctagggctctgtcaaaagtatcctgaaggttacgttgataggctttaatttcctttaaattaaaaaccaaaggcataatctgttcaagactagctttatgacaaaactggtacttctggctgtgctaagtatggtaggcaagtctttgtatgctcaggaaggctgatcagctaagggcaagaactgtggcctgggaaccaagggcctggttctattcccagcctgccaccaggcagttacatgactggccttagtcacaacccctttgtggcctggctttcttcacaaggcagagtcctaaaagaaaggattaggctgtgatttctaagggcctattggagctgccaattatttcctccctgagtataacttcttataaaagctgtccacccacaatgggaaggagatcccaattgtcaacaacatgagcatgctttaaatccgtgattaaatcagagtcagacatctgactaatctgggtcaatcagatttggtttcctggccctggacacaagtttgaaccgtgaggccctggggcttcagaggctgatgtcacattgggtatgtgtaagaagctggtctgaatatacagcatccgaggaatggaatagatgtataggaagactcagatattagagcctgtggctgtaagagccagttacacacaaactgcctgtatttcttgcactttggagtgtccttatatcaaatcgcttttacccaaaccagccagagcagttctctgattcttacagccaaaccacccttgacaaatgttgattgtctgtgacttagctatttagtctaaatcttagttctgtagttgagtcatctaaaccaacagcacatggagcataagatcttaattttaggtttttaacagctttaagacttttttttttacctcagttcttagcttctgcaatgagctgaaaggaagatatgtgatgcttgagactgaataaccatagatttttcatttgtaataaagatataacagatagcaattacaagaatagagaaaaattactgagcttttactatgtccaagtattacctcattcaccaatatgatctcatttagcctcacaaccttgaaagggaaatagtattcctatttacacagatgagagaaccgaggcacagagaagttaactgaattgccttaagttctaaagttaataagtagcaaagcaagaattccaactgagactatctgatgtggagtccatgttcctaagccataatgctattctgctacccctgctgtgtaatttacacaaggagaaaccagtaatgacttgacactcctcttgacattctagtcatggatcaactcccttacgggttagctgtggcacagagggcccttaatctcagtgaccagacaagccctgggtcaagatggttatgaggcagtcttccctccccactccctgcccagtaaccaacaccctcactaccaagccctttttggaaaattgggatgggaatacctcaaaccctgttgtactttaatgatgatgaaactgtacccaggtaaatgagagtgtttctttttaaatagtgatttggggtttttctagaaccttctttccgactcttaagcaagtgctgactgagtaaacaatattaaactatgattgaactgctgatattaacatttaaaacatttttaatctttcatatttaaaatctttcatatttcatatttaatctttcatatttcataaccctattaggttaaagtagctactaaaaaaatttaaactggccagtctgagttattcaatctctgatgcttagaataacagggttttagctggaaggaacttggggcagtatctggtacaatttctcattttactaaggtaggacatgaggactagagaagttggggatcttctccagcctcacacactgtgaatagcaagaccaaagctaataacccaagattttgttttgtttcaatactgctcaattctacctgctctactctgacaaaattctaacaattaatggagctaagactattaactagattcaagatgttttctatcatgtaacttgtctaagaaaagtttattttcattccatccaactgaccattctcccatatgaaatgtggaaagaagcaggattgaggggcaggggaggaaacagagctacacagtgtttcttcagcagttagttgagacactcagaagtcaaggaaatgatgccctaaagtacccacagccagcagccaagagaatcttcaagaactctagacacccaggggttcccaagtcctgggaaccacatattgtcctagcaagctccaagtcttggagaggatgcagcgtgaaaatgaggagagtgaattctgatggaaacctggagatactattatacctaacgctgcatgcagcggcagctgatgctgattacaagaggacaagaaaggatttcaccagacataattggtttagtggaaacatggttagtccgaatgttaatcttccctcttaatatggtgcctctgaagctagtcactcacccagtctctgacgccttcttccctatagagatactgtctgttccacttctcataactagttaaggtcagttgcagtaatgcttgtaaaagggctttgtaaagtgcaatgctataaaacctatatcacaatttatatttattatctgcttcacttcctcatgtttcaataaaggataataattacataaataagactaagaatgttcatggttataatctacatgtgaacatttcagtgcatgtacttgtaaataaaatgtttatgtgtagatttagacacttaaacacatataaagagaccatatagtagaggtaagagctttgaaactagacctgaacttaaatcccagccaaatctctaacttctgtttgaatctcaggttctgtatttctgaaattgggataacaatagtgcctgccttataggattattgtgaagatgtaataaattggtgcatataaatatgtagcacaataactggcacgtagtaaggctcaagtaaatgttaagcccaattgccattatagtgagaaccacaaaattgaggcattactgccatctggtggctgccatcttaattatagaaatcacagccaaaaagaagaggatctcttaaatgccagcacatgtccgaccctgaacaattcacttacagtcttctgcatgaaggtttgtgaaacagggatgacatttgtccaaacagtagcatttggacatgaagtaaaatgaaatgcactttgaatattcagaagttctttatcataactatgttaagtgctttctataggctcaacgttttatgttaatcaccttatatttaagttctagacattaatacagtaaaatatttcatacacaattgacaattattagttgtagtgggcacaaacatttaattattaaagcctgcatatcatgataaataattcaaataaaacacatgtctaaaaacaacacttaacaccaattgaaatcttatttgacctacctttccagcagcttccagttcttttttatctcttttggcatttccagccaacaatttcatttcaacaattcctgacacagcaataattggaacaactgctaatagcaatagggttaactgccaaccgtagataaatgatatgataataccagttccaaggttagctatattctgtgcaattaaagccaacctggttcctgtggcctgggagagaaaaagcacaaagcaactgtagttttaagctccaaatgcatgcgctccagccttagcctcttggtcagaatgatgagtgggttctatgcctgagctacattggcttactttcattacaataaacccacaacacctgtgcttaactcatgaggctctgcagacatttcttcattgtgcctttacactctcattcctctcctgcccacctgaaccaacattctagaaccaagtaatcaacttctctgctttgtggatgggcactgggggtgcatgtattttttcatagatgcaatgttcaaagaggaaactaactccaatgtacctgggtaattttaaagaccatttaattcaaaagtgtaaaagggaaagagaccatctgttgttacaaagggtacgtgtcctaagagacatccaccacaaagcacatataaggatgaattagtgttgtaccactcagaaaacaaaggtggctgtagcaacattgcagtcagctctctgcatccattcctccttctcctgttgtgtggaagcagtgagctgcaaagtaacccacctcagctaaaggggtgggggacgtaggccactcagaacaccaccatcccctggagacagtggttcagggtggggcatgtgacccaaattagcccaaattagatttcagcaaagggtttttgtttggtggttgaggtagaggtgtgtgctctctttcactggatgggaaataaggaagcctgtagttctaattactattagcagccatcctgtgactgcagggaatcagccttgggataaagccaaagccaatgagggaacctggattctggattaaatctggagggggcagtgggtcaatcaaccttgaagtttaatcttctgcttattgtttacagcagttttgatttgagctttctgctatttctagctggaagcatcttaacaagtgtgggtatgctacatgcttatctaaaaccatgttatgtaaaaaactacaagtagagtgcagtctacctactccttggacttgggcagcatctgtggcaagtcttgtagaaagtgcaccagtactgtttttatggtcatcaaaccagctcatgtcctatggcataaaatacacgtttatgttagttcaaaattaaaacaagcaaagaaaaccagacaaagcctcccaaagctccaatgctgaggaaatttaggggagacctcatatgcagtgtagagtccctggccttgctctgagcacacacccccagaatctagcagaacccagcttcctgactgctctgtggtagcagggagggcatctctggtctaggggggcagggctcacccagatggctgccatgctccttgccagctcctcccaaggctgggaggctggtaggcattccattcacccaatcatcaggtctttcactatggacacttctgccctgatatggtgttgtctctcataaagggtggtggagctgtcttggacatgttgttctgatagattctaggcaggagaaaataagcactggtttctcaccaagcttttgtttgattttttgttaaacactgattgaaagtgtgtctgatctccagttagccacagggataaaaaaagaagcatgtctgagacttaattttaattgtaagctactcatccatggcatcttttaccttcacataaaataatttttcctgcatagcaagagtttaggagatactgaaataggatttgtagacagatttaatcagaatatactacctactatgtgcccatttgtgaacagaaatgtaatcagttcctgtcaattgaatggataatattctggccctctcttaggcattttctataaaaatagataattcatgtttgcatattttcctatgtcaggcactagaatgtgaacttacgaggagagcaaataatggattatacagtaccagccaccagcacagtgtctggtacatgataagtaatgtttgaataaacaaacaagtgaattaatgtgaaaatagacctcaaataagaaataaacaaaactcaattattaacatttgaggatacctacagttagtatggtagattgtggtacatgagattaaatgctatcaactaggtttttcttggtttaaagacatcctggagtctcaatggactcaccagggcctgcacaggatccagaaaagagatacaggtcttcgaaatgatagtgtctacatggagagagatatttacagaataagccaaagctacccaaataaagcctatttctatgaaaaaaaacaaaaacaaaaaaaaaacaaaaaaaacatgagaagtctttagctcttgaaggaccaggacaatttgcaggactctgccccatccttgcgtgaataccctggggggaaaacatgcatatcgacataacaataagaacagtaagaagcttaatatggaagaaatgtgaaagatcagaaggcattctccagcgcacactcctacctgtcttagcattgctttaaaagccattgaccgcagtcttctggtgaggatctcgccagctttcccaaacgtgaaaccctggttgagaaaaaaggctatggtctcttttgatctttatgtatgtaattgcaccagaccaatcatgttcaacttttatgtagcaaagttatgagttgttttacagttgccacggatcctcaagtcatgttaataacctgagcagccccagatgaatcaagcatgcaaccatagcaggaacctaagtgctccgaaacaagaatcagggactgaattaagaagcagacaccacatggcaggatgcaggattcaatcagattgagctctgacaccaccccatggcaggatccagtcagatggtgcttcccggcatcacttcattgcaagatccaatcagatcacacttcattaccatacgcttataaaacctgacccagcctccagcttggggagatactgctttgggaactaagctctgtgagcttctcacttgtgacaagttataaaattcctttgctaaatcctccttgatgtggtcattgggttgaaacccaccaagtgaccaaacctgcccgttgtgtgggtaacagttgctagtattctgacacaggtgcctatattcacattgattttacattatttgtatgttaactatttaaataacaaaagtccaggaccaaatacgaattcaaagcccccacgtcaaattcatgtactgcaaaatcatcagtatgcattacaatcaaaggccaaaaatcttaaaggtgtccagttctggcttctaaaccattctaaataggtttatttttcaaaactttgaaggacaacatctcagtgacaaagatactgtgtttaactacaaaattcagtgtgttcctactacttccaataaaccagttaaatacagaagtaacaaagtcctacacacgaattcattttggctcatgcagtgtaaaggaaggatgaccttagaaacaagatccaaatgagtatgctggttcctggtcacagctccacctgcactcagattggggaacaatcagggtactcttccttccccagcctctttgggacaatttcctactttctaattaccacatccaaactggagaggagtccagatatccagaagtgggcttacttctgggacgtgtgagtctccagccacagtgtgagtgttggggtagccgtgccgagggcacacgggggagtgcacatcagaactgtttactaagccagggggatagatgatcagtgcacccagtgaatcggccccaggtgttccttgtccaggaccagactgccctccccctccatttgctggtggattgctacaggttctatgcatcagcccactgttcctgcggcccctgaaacacattttctagctgcactccctagcatgccagggactggggctggatcaaatcattgagttgtgtctagtagggcaatgatttctaaataaaaaacttggtttactttgccattggttcaacaataataaaagagaagcatgctggcatgactaggaaacactattttgctgacttgatggattgtattatattcgaaaggcctatgtggtgcccactgggttaaagagacaaaagaaattacagagaagtctaactgggtagaaaagtacaattagagagtttgactagtttattttggccaggtctacaacgttagaatgcaaaatattatgttctttcaaatagttcatcaattaagtaggaaaagatcagagaagttacttgatattctataaagagtaacaacagaaaagagaatgctattggactgtactttcccagttcccaacctgttgaatttaagttactcttatgttctgcagtaaactgaggtctcttgtccttggtaatgaatgtctgctgagggcaaacttgtaatgtaatataagttaggacacagggaagtcacacttccccctgataaggagtctaccctccagcagagccttatgccaatcatgtttgcaatttatttcactgtaagaatttggaagctccattaggtttaatttaatttctctaattaaattataaacttgatgagaaaggcaaatcatgggtacctacctgaaggaagaaagtaaaaaaagaaataattcccagaaataagaaaatcaaagagaatatgttgcacttctgctgcttcactgcatcatcgcctggtccaaaaatctacaaaagaatatttaaaacgcccacttggattacataactgatccttcttcattcctctcataaatagtggcttgagtgtcacatgtttaaaactaggcttcaaatatgtagggttttggtaattgtggtaaaatatacataacacaaaatttaccattttaaccatttttaagtgtataattcagtggcgttaagtacagtcacattgttgtgcaaccttcaccagtatccatctacagaacttttcgccttcccaaacttcccaaacttgataccattacactgactccccattccctcctcctcccagctcctggtaatctctattctactttctgactgcatggttgttaacataggttgacatactgcatatggactgtgagtggttgcacattttagcatttgttcctcttcctatatgtcccttgctccctgtgactcctccctgtcccagccctccacttctcattccatcaggcttccacccagaggggcctttcctgagcatcctatctgaaacagcacccccagctaacacctctctattaccctacccatcttttaaaactcttgttatccctcaacatgttacatgtttgtggggttatttttttgtttgtccattgcatgtcttccccgacagaaaccgctgtttgagggcacaacttggtttatttgtgtaccactgtatctccagtgcctggagcagcactaggcagacagatgccccaaaatatatagtccacattgccttgaattgcaagagagccagagcttgctttgttttgaaactttaaaagatttggaggaggatcttttctaatttatttattttttggcttgtggtcttaattgtggatcgatgtccaacatcacaaaaataataaactcgtaacatgatggagaattatttatcctcaacaacaaagtctctccaataacattagagcttgactgaaattgtagaatatgaattctggatttcatggaattgatggaggctttatatttgtgataacttcctttaaatatcccccaattaattgaatgattggctagtatgttttctttcttagtcttggactccccaagccttggaaggattgctaaaatggggtggctatcgctttttgaatacttactacaaggcacacactcttaaatgctttccagatagttacctatataatctcttaatcctcagccatgttatgaggtagatttattgtatagatgaagaaactgaggtaccgagagctattgagtggtgaggccagtctatacccagtgcctggactcttattaaactctatgactttaacccctccctgctccactctctctccacctcactgtgcgacttgtaccagcttttctacacaaacagattggggatcattgtctgacaccagtttcaccaaatgaagagagctcattagaatgccttcttcattgattttacattttataatttcattaatatcataacttagagtgattcaaaggctacttatcttttccctcacagcttttctcaaaagggatttaaggactttggcttagtttaatttaaggctgcttaatcccagaatggagccagtcagtgaggttgggagaagcagcagctgatgaattgatctaattcaggctgttatgtggtgtttgcaaacttaccgctatgatctctgagaatatgactgaaaatgccggctgaagccccccattggcaatggcacatactgttcccacgacaaagtagggccattctgttttattcagtttcaggaccttcagaaaggacactggtggcacatttgcttcctagaacatataaacatcagggcaaactggtgatgacacaacagttaccagagtctgtagacatagaaaaggcatggccattgccctcaagggactcgcaaactaggtgcagagaatgacaagcaaactactagagagtaggacagtatattataacatgttaacaatgtttactgattacacatcataagctgagtatgggttgttcggccaagaaataaccttcatgggatgcttagcccgtccctattctggcctcagcagactgcgaggtagcaggatctgggcacaaataccttggcatccagctctggagttacacaacactgtattggtgtgacagtcatggctggaccacataagccgagctgcagttttctcatatattatgatacagtcctgcctctctaacagggatgatatctgggtcaaatgagacaatacacctgagtagatggataaacatctttgcaaatgtaggaaaccattactaactggagaacatgggcttggcctcctcaccccaaaaccttgccttttctgtaccatatttccaactcacaaaaccaaattaattacattccttttctcttaccacacttttccctgtgcagacttctcttatttcatagcttagcttgtctgtgatttttttgtttacatatttccatttctagtatgtaactttttttaaggtaaagattatgtctttatattcctagaaagtagtccaattcctggcacatataagattctcagcaaatgtttaattaaatgtctggccaagcatgcaggatttaggtctcataaagaatgttttgatgatagaagcagtttaacattaaacttgagacagaggtgactatggaatcccaaaaacttgaggtcactgagaaaggttatatttatatctctataaaacagagaatatagaagtaggttctactgagccttctttcaaattacccattttttctgtatttcagggtttttttttttcctccctagttaacattatctttaagtccctatctccagcataatgaatgaatctttttctttggttactgctcttcagcacacaaacaggtccctctaatcagacttaatctctccctctcctttggcatgttgttttctccctatgatggtacttgggacaatcttgttgattgcagcatttcctgcctccccctcttctctgtgcatttcttcaagagacgtgctcctataaaatactggagtttaaagagatagcaaaataactctcaaaataaatgaggaaatgaaaagtggataatttcatagccaaaagaggggaaattgcttatctgacttataataatgacgctccaaaatggtacaattgttattcttctttctataaatataccaagattaagacctctaagagagtccttgtaatttctgcagtaatagcatgcacagataaaaacagatgcaataaattattggtagaattagttttctcaggccaacacaagagtaaaaataaactcagtcttcattaacaaataacatcaaaatatatcaaaactatatcttgaaataaggaaatctttttttggaatggattccctctgtataataaaattatttgttccagcctgggcaacatggtaaaacctcgtctctacaaaaagcacagaaaaattagccaggtgtggtggcacacacctgtagtcccggctactaaggaggctgaagtgggacaatcagttgagcccgggaagtggaggttgcagtgagccaagattgcaccactgcacttcagcctgggcaacacagcaagaccctgtctcaaaaaataaaattaaaaataaataaataaataaaattatttgttaactggagttaataatctcctaaatccaacgttgctatttctcaccattctcctctttttctaagtaagagaattccaatctaatttagaatgtcaatgcatacagcaaaaaaaaaaaattgaattttccatactcattgctaagtatggccatgtgatcgaattatgaccaatgacttataagtaatagtattgtgtgggaattctggaaaacctctttgtttcttcctgttgcttggaccacagatgtgataggtagggcttcaggagccaccttagatcataagtgaccctgaggatggaaacctgatgccagggtagtgcagataaagatgaagggagcttgtgtctatggggactgtggagctactgttctagccctgggtttttcacctctaagattttggcatgtgaaacagaaataaaaactcttaatttgcttaaacggatgctattctgggtttcctaatatagataatcaaatgtaatcctacccaatagagtatgcaaatatcagggcctctcgttttggaccagtcttattacctctggacctcaaagatgaatgtcaaatttaattttaatattaagcatctcagcgtaaagactacatttctggattttttttcccttgaaaacccatttataattggaactgatttcaattcattgtcaaatacatttaaaatttgaaaatttttttctttacaaagagtatggctcatagtagcagtcatctgtgcctgaaaaatatttgcaaggctaagaatttcaataattgtagcaaaactacaaagtaaaagacttaatttaagtgaaaaacaacttacaagtccatcggtttccacatcaaggctcttctgacacatttgtgaatttttaaggtttttctgagtagaatgcctaaataggcgagatttccagccatttggggccattctagtggcagccttttcatcatttagttcaaattcttctgactggatctggcttcctgatgtctgaaagaatatcaagacattaaagtgtgtgtgtgtgtgtgtgtgtgtgtgtgtgtgtgtctccaaatggatgtaacctccaagtttagaatcataaagcaatttggaatattacatgtatcaagattttcagatttcctaactgcttctcaatcaaggatagctagaaaactataaagtatagaaaggttaaattcaatttgaacaataagaaaatcggagtataagaatattttctaaaaatttaaagacacatttttcgtaatccagaaggtatataggaatttacttaatatgcaataatccagggaacaagtcatggccaccaagaaagggaagaagactacatggaaacactaacaagggcttgtttttaaagctacaaacaagaaaagctgaatcaaagggcctggtcactacccacgggaggtaaaactgtcttcctcgactggctgagtatggtcatcttccttcctcacagtcctgctctcatgcacacaacgagacccaacatgcaggctcagcctcattgctggctgtgagatcagttctctttttaatgggaatgggggtgggggtgctgatctaaggacttctagttcactgcctagtaagggtgagggaacatcaagccctgctggagttggactttggactggttccctatttgcttcctccactattaagatgtgtccaactacacatcttaatagtttgttcagggtcttagtccttgtagtagtgtcttgttcttgctcctcccttcaagacctgccctgaacccaatcctttggctagtgccttactgtacatacaatagccaatcatgatctcttagttttccagttgctcattcaacatctgacagaacactgcccatgtgcttatatattgccttgaaccacattgcagtgatatgttctgcttggtggatttccttatttgctcattactgaatcagttttataccatctctcaacaaaaaccaacctaggctgcagactttgtaattgatcccttgcattctcactgccatctgttcccacactgctaccagatttattttcctaaagggcagctcaaaatcatccccagcttcccactacctgcccaagcctggatccccaaaaatctagctcatggcaagtcaaaccagaccacctctcatgaatacctccccagaacttttcctcttttggtaatctcatccatgctatcaagaggtccatctcaatggacagttcttccaataagcccattcagattttagcttccttctatgaccaaatgaacattacctgtctctttcataatattttttctgtgccttacctaaaacactcagttggtgttgggtgcttcagctgaaaggtcattgagctccaagccaagatagccacttttccaccaggtgttaaaaagtatctatttaaaaccaatagccctcatttcttccacccaggtatacttcagttgtctcaaagatttaattgtaaaaaagcagaacaaaaaatgctgaaaggaaatggggtaaatatcctttcggagaacaacctcaaatcctgaagacatggaggaaaaaactgacaacctaattacatacattttaaagcttctttatggcagccaaatacaacaaagtgaaattgaaaggaacaaagcaggaaaaaaaaatctctccaatacacgcaagagaagagtgtattttctttttatgtaaagagttctcacaaatcaatgagaatatcatgaacaacacaacagaaaaatatcctaatacaggaacaaatactttcacagaggaagaaaaatataaatggccaataaaaatgtagaaataagctcaatcttataaatagttaaatttgaagatactgtttaactctttaggctggcaaagatgaaaaataaatacgaaatagctatcagtggctgtttgtagggatttggcttatgatgactttcaagtttctagaatgtaatgtttggattttttaaaaaaatgcttgatttttaaaaagaatgcattacctttataatcagaaaaaaattaagatacatttaaaagaaacaactaagagccaacagtctacctaatggaaaagcagtgatacttgttagaaacaataccaaaacaagggtgaatgaaaaccaggttggtctttgaaacttgagaaaagagtactgcattagcttgagcatctgctgactctcaggctcacagtgggtctttccctcatctctccagcctcaccaagtaagtgggagggcaaaactcaaatcagaaatgggaaatgtgggggtacccaggtggaactattcaaaggggctgagaatcacagaatgccagagctggtagaaatatcagaggtcatcttacctgaagcccctgctcatttagcaagtgaggataacaaaacccaatttggttaaatgacttgctcaaagctattgcctagttggtgacagatttctatcatgccagaccactgactgttcagtcttcaaatgtacaacttttcctaagaaagtaagcttgggaatttgatatagaaaggtcagagctgtctgcatctctttagcagtctcccaatccaagtcctgatggaagcagaggtcattcttacaagagcttatggcaataggacagccaagtggttatttcacttgaggattcaacatgtcattatgggcaaaatcacagacccttggtaaccactcatgaaattaaaactaaaatggatttaaagtaacattttatgcattcctaactagtgaaatgacaaagaccctttatggtggctaggccatatggtagcattcggcagagacactatcattgattccctccactgtagaacaccctctggcacatgcaagcctgagttataaaacttttcgtcatttcatttggtattttcatttgggggaatttgcaaattttagtaaccaccatttatcatcatctaatttgtgtcaggtctttttttttttaaaaaaaaaaaaagaaaaacagctttttaaaaatataattaacatatcacaaaatccacccttttaaacatttcagtaggttgtttttagtacacaagtattcagatgtttatttttctaaacttatagcaacctctcatggtaggtttggtattccaaatgtagaaacgaaggctcagaagagttacttgtcagaaagcaaggcaaaattttgacaaccttttttgatctacttgtgctcacagtggcaatatttagaatagagaaatactggaaacagaccaaatatctaactttagaaaaatgactaatttcacacattaataaaatgaacttctgagcacccattaaaataatagtatgtggatgacgtatatctgaaatgttaagaaaaaagaacaaaaatatgtgtgtacatgctaattacagttgtatcaaagcaaatgtatatactttcacaaatagaatcgttcatagaataaaatattcttaggttatttattctgcaatgttgctcaagtgactgagtataataacatgtcttaataatatgaaaaaccaatcattatcaatataacctgttttaggaactagaatgaatgagtgctcttttctttcttttttctctgagacagagtctcgctctgtcactcaggctggagtgcagtggtgtagtctcaggtcattgcaatctccacctcccggattcaagcgattctcctgcctcagcctccaaagtagctgggactacaggcgtgcaccaccatgcccagctaattttttgtatttttagtagagatgggggtttcacaatgttggccaggctcgtctcgaactcctgacctcaggtgatctgcccacctcagcctcccaaagtgctgggattacaggcatgagccactgcacctggcctgctttttccttttaaaagacaaactattcacttcctagagccacaaatcttgatgatggtcttattaggatcatctgggaaacaattttagatcacatgagacctccctcaaccactagagatcctggctggtcaaaaggaaccctacagcagtgctctggaaaaggcggtcacttgtcaatgacttccctaaaatgtttctggtaaagtctctggcattccatataactcagagccggggctcctcggacaagtcgaaacacttttctcgtcctctgactcccaaaactctgaccatcccattatggtagaaaggaccttttagtttgaccacattccccaggcaattaggaatctgtcctaaggaatatatccatgatgtttttggcactttcccctattttctcacctgctacctctttacagattctgatttaaagtctcagatatacacttttaggcatcttgttgaagtttcttcttgctcagtatagcattcactggatcatattttaatatttaaagaacactatattgaggagcaaatagcagaaaaaattcctgaaaagcaagtacctgcatgttgacaagtttgaagtacaccccttccttcttcatcagttcgctgtggcttccttgctccacaattactccatcctcaaacccagcgatgacatctgcatttcggaccgtagacagtcggtgtgctatcacaatggtggtccggccttctctggcctaaaagaacaaaaatgtggtgcatcagggttacagtattggcacactgtcaattaacatgcacagttaagcacttggatgaatgctgtttgtagatgattagagagtagtttatactccagatctctgcgtgattatggcaaaggcatcactctttatgaaaaattaaagtcagacgagtttgggaccagacaagtggctaaccccttcagtaggaggatgggtgatttctccagaaacctatggtagtgtcagtgtttacttaagaaaaataagggtttgatccttcttcagtgttttcacacttgtctgagaagccctagctctaagttatatggaatgctagagacatcaccagaaatattttagggaagttgttgccaagtgacagccttttccagagcactgctgtaggatctctttttaagagcctgatcttaactaattctgatgaactgaaagcaggcagtttaggtgaaaatgtaccttgggatcaggactattaaaattatggttcaaaagccatccaaagcataatctctagagtaaggcaagtaaatctgctctttaacaagtgccctaggtgatttttatgcatgctaaaatctacaaatcacctgtctaactagtttagtggcctcatatgtttgctgggtggatttataaatgggcatttaaaccctggataatgccaataaaagtattgatattatgtcattaataatggctactctttctgacactcattagcccttttacccaatagcttaagatcactcctactctgagacaatcaaaccacatcattaggatggttattagagaatagtctaattcacctaagtggttaacatataaattaaaaatgagaggctagattcataataggcaaaaagtggaaacaatccaaatattcatcaattggcaaacagatttaaaatgtggtatatccatataatggaatattgttaggccataaaatagaatgcattttgattcacatcacaacatagatgaactttgaaaacattgtgctaagtgaaagaagccagtcacaaaagatgacacatggtatgattttatttatatgagatatctaagagtaggcaaattcatagagacagaaggtagattcatggttgccaagggctagagtgagggtggaatgcagagtgactggtttcttaatgaggtggtgaaaatgttctggaattcgatagcagtgatggttgtacaaccttgtgaatattctaaaaaccccggaattgtatatttttaaagggtgaattttatggcatgtgtttgtatctcaattttttaaaaatagccatgaaaattctgaaaaagaagttaatgagaggagtaatgagaaggaaatatctctaacagatattagcatataaaaagctacagcaattaaaatagtaaaacctaggaaaaaccagcacgtgaatgggtaatttgatcaatagaaccaaatggagagtccagaaatagacataaaccatctaagaatttaattacaataaatatggtactacctattggtaaagaaaaggtgaattatacaataaatggtattgggacaattgtgcagccatttaataaagtaatgtggtatttctactttagtccttacattaaaataaatccagatgaatcaattgtttttaagtaaatataaaagagaaacatcactggaaagagagagaggctagaacacagctctcttggacaacatttaagactattatttgatttttagtatataagccccaaagaagcactcacaaatatttacttatatggaagctgggtttagtccatatataataaggcatatacaaaataatttgattactgtaattatattcatgatgctaacagtgatgaataaattgctaacaatgactatattatcatgatgatgataataggttgatgatatgtcaacatatatacacaaaggaattggaatcagatgtatgagtgaatgattgctatgtaaaagaaataaagtacgtgttcatcaatttagaagtaagcaactgtcacctttgaccaagagaagttggccaaagtagagctttgacacaaaaaattgttgttgtttttttttttttttttttcagagctcccagacaccctgatgatgacaggacattgataaataaatatcctagatttagggacaccagctattatgaaatttagacctttgactaatttgggatgttcagggatgaaaggtgggcctaaacaaagggaggactaatctactagcctttctggaactttggtaaaacagcatcagaatgaaaccttttggaatctttttataaaaatcaccataaaatcaccgttttcattcttttttttttttgagatggagtcttgctctgttgccaggctggaatgcagtggcatgatcttggcttatgcaacctccacctcctgggatcaagcgattaccctgcctcagcttccccagtagctgggactacaagtgcccaccaccacacctggctaatttttttttttttttttttttggattttaatagagacagggtttcaccatgttggccaggatggtctcaatctcctgacctcgtgatccgccagcctcagcatcccaaagttgtgggattacaggcgtgagccaccacacctggccaccattttgtttcttttcctgttcttctatgataacaccatgatcaggagtgtgcatgtaggtatgaaactgtattgcctttctttaaaagagtcaaaatacaaaatctgctgttatatctttcttcaagatcttatatttaatagcattttatttattttgacaaatagttgctatctgtagagtcaaaagctaatatggtcatcactattaaaatttattttagggccgggcgcggtggctcacacctgtaatcccagaactttgggaggccgaggcaggcgaatcacgagatcaagacattgagaccatcctggccaacatggggaaaccccatctctactaaaaatacagaaattagctgggcgtggttgcatgtgactgtagtcccagatactcaggaggctgaggcaggagaattgcctgaacccgggaagcggaggttgcagtgagccaagatcacaccactgcactccagcctggagacagagcgagactccgtctcaaaaaaaaaattattttaatgtagacatattttctcaatgagctgggccatcatagtcaatttagtaaatatttatttagcctctactatgtgcaaggcactgggctgttgaagagattcaaatatgaatctttttattaattctgcctcctggggtggtttattcttcctaggaaagagaaggcataaaaataagtaggtaactacagtaagctgttgccacacaaggaaggcctgatcaatgtataaaggatccacaaaataaaaatattattcttccaggatgggtaattgagtagaaataacagtagatataatagtgatacatccttatggtcctcagaggcaagactacaatttatgaaattcaacttttcatcattaaaaagagagttggattgtaagttagagtgactggctaactgattgattggtatcttctttggggacatagtaataaagggtttatctttaaaggtatggtttattgtctgtaaaaatattagcataattaccttgcagtgtggagccaattagtgcagattataaactgttttcatagcaactatggcagattaatatggccacaaacactttgcagcttctcctatacagaagtggagccaatttctctgcctcctcatatctgggcaggccctgtaacttgttttgacaaagaaaatgtaaagaaattgatttctacaatttctggagcccaggcctcaagggatctcacacagctcgtctgtttgccatcttcggatgttaccctggaaccgcagtgaaaggaagtttctctagcctcctgaaggataactggcttcagggaggaaaagcaacctgccttaggcaacagccatccccaactgccaggcacatgagtgaggccactttgaatattccagcccaggtgaccctgagctgaaataagactaggcaaaaccaacagaaaaaccactttaccaacccacaaatttgtgggcaataaaagttgtattttaagtcactaaattcttggcttaaaacaactgatacagaaattagtaattagattggtatgctgctgtaaccaaaaacctaaaacatgtgacattggctttgggattgagtggtaggtggtggttgaaaggaaggtgataatattgttagtggagactgaaacaagagtaaagaaattgctattagaggatagaaaaggagtaccttcattatgtaaccttggaaaatttgacaaaaatatttcctgcagtgacttggaagaaagacattttacttaatgaacctgtacatctggctgaggagatttcagacatctctagacagactataggagagacaagtggattcccctagctgtgtacaatgaggtttgggaagagaatgatcagctaaagaatgagctacttggttacaaggagaatttaagacaataaagcagaccccagtactcagttggaaaatgaagttgttagtcatccaataaaattagggcaaaaatcagagtgtgtaggtgtaagatttttagcaaaaatctctgaaagattttaggcagagcctagtggacactttcagctacaaaaaaaaaaaaagccttaaaaactatttaagagttttctgatggcaggttcacttgcagcccaaagaagagaggagcctgtctcaaaataaaatatataggcataacttctggggcttgagtaaatgacagctagattctaagtaaactcacaaagtctttaagacagtccttcagcttagtctaaaagagactgaaaaaaatacaaaatgaaaagggccccaaatttctatgggcagaaacatgcaaagaaatccactcagctgcagatacagatcatttcttatgaaaaaggaaagccctcttagagggaaggtaaaagaccctggaactaaagagaacaatggactagggaacccactcctggggagcagaatcaggccttaatcaagaaacatcccatttccctggagtagtggggtaattggctgcatgtcagaattgctatggccaaggactgctatgagctttctgttctcatcctttttgaatgagtatctgctatgattatcctgtccctgcaccgccactctatgttgagagtatgtgttgatgataacttgtctttttcataggtctgtgggtcaagatgagctgaaaatgaagaccctcatctgtattagaccacatgcagatcttcagatactggtctttgagccagatgctatcactgtatgaacattttgagggtctgaggaagaggtgaccttcttttgcatgtggaagaaatgtaaataattgtgacagagggcatgctttagaagattcaatatggtcacagattttttactgctcacccattaagaggcacagtctgttatctcctcaaatctgggctagcctatgacttgctgtgaccaacaagatgagttctggagtctaatcctctggacacttcacacattagtctttgctctctgggtacactgccctgaaactttcatataaggaagccaggttagcctattgtatgagtgtgagaagtcacatggagaattgagatggccagccaacagccagcgtgtgagtgaggccaccatggaccattttaatgaagccagccctccaggtaaatgcagccatgtgctcaggtggaaagaacagaggatctactcagccaatacactgaattgttttaagcgtggactcaagatagtttcttacatagcaataggtaaccaatttagcaaccaaaaaataataataataataatcctggtaatgctaatcaccataataatagcagcagccaacaatatcaagtgtttcatatgtgctaggcatgtgctaataactttacatgcagtatcttggttattctttaaataatcctatgatactatttctgtcccctcttcccctattacttcagagatgtctcaggcttagagaggttagttaacgtgcccaaggacacagctagaaaagaacagagccaggactccaatcccagcctagcatcaaagcctgtgctcttaaccatcaccctaagctgctaatggcttttcctggagactttaaaaaattatgagtagttcatcagctatttttaaagtaaatataaaaaaggttatcaactgaggagtgtgctatgatcctatagaacacgaagaaacagctaaaattgaatgaattgacttgtccaaatacgtactaaaacttgcaagatcacagtttttctggcagaggtcatattatgaaaaacaatacatactggtcatctccaataattctattcttttagcacagcaagaactatattgtatattgaatatctgtatcctggaaatgattggaacctagactccagggctgaataggactcttttttgtttttgattttttggtaaatatatctctcattctacccgactttactctaaaaagtctatgccaatacatgaatgtctaattatatttttaagttagaataacttatgcatgtattactttatgatgtactgctttaagtaacttcagaataaccaaccatataccagtctcatatgcattatattttgactccttaatatcatgatttaatatacacaaaagcagtataattcagtgcaagaatttgtaaggaataattattattgtgttattaatcattattaaattatataaaataagtcaagatattggttaggtgcagtggctcacatctataaatcctagcactttgggaggttgaggcaggatgatcacttgaactcaggagtttgagaccagcctgggcaacatggcaaaaacccatctctaccaaaaatacaaaaattagctaggtgtggtggcgcacacctgcagtcccagctactcaggaggctgaggtggaaggatggcttgagcccaggaggtggaggctgcagggagccataatcacacgactgcactccacgctgggtgacagagcaagaccctgtcttaaaaaacaacaaaaagagtcaagatattaagctgataaaccatgaggcattaattaactacagtttacagcataaaagggaattaggttaacttaggattcagatataaattttcctgagaaaataaggttcgtgcagcttgtctcttaaattgtaagaggtggttcagatagaattccttaaggaacttgcacatattattactgaactgtcttaaatcaaatatatttatgatatttatgtgtttgaaactaatttctatggtgtcatctgactctggtatttacattgtgttgttaatacagatgacatcagcattacccccaaaagtgtaccaagataaggtctttcctgtgacacttcagcttagtaaaaatgctaatgagagacttagaaatatctgagctggacagatgaactcagcacccttaaaatgaattgtttatttatatgcttagacaagtacagagttgaactttatttccagaaaagcacctggtcacctacatgaatagataaagatgatgtcactgcctacaaaatagggtgagtattctgaattagttttcagctggaccagtgtctgggtaaccggatttaaaaatatatatattttaacatgactacttttggtcaaaagtagtcttgcaatagcccatgtgcaagaaataaacaaagctaaatggcttgttataaagacctggatctgggctcactgcaccatggtcaaaacaagtcagtacccttcacctgtctctgaagacaatgtaacctgacagaaaggagaaatcaatacagctccatgaggtagctccatttgctatgtttctgtttctcagcccagactccggaagcactggcaagaatcttcaataggtttcaatgtggtggtccttcagctttttagagtctactgaccttatccagagctgcctgtacctcagcttcactttctgtgtccaatgctgacgtggcctcatccagcagaaggatcttggggttgcgaaccagggcacgtgcaatggcgatcctctgcttctgcccaccactcagctgggcccctctctctccaaccagggtgtcaaatttctaacacagaaaacatggatcagctcttgaagtaacttaaatttaaaaaggctaggaattctatagaactacataaagacaacatggagctttgtcttaactattttaatgtatcataaagtatgataagataaatgaattctgaattataaaaaactgacacatgctgtataaaattttatattaatcatctaccatgctataatcctttaacccctaactgagtcattcaggggacttatctagcaaagttggacaatcttgcatctcaaacattattagctaaacctttgaagaataaactcagtcctatgaggtgaaattctaatttcaaggacaactactttatcagaggctttacctgtggtaatttcatgataaactcataggcgttggcctctttgacagctttctttatctcatccatggttacatttccacggccataacaaatattttcagcaattgtggtggaaaacagcaccggctcctgactcaccacaccaatgatttccctcagatagtttacattaaagttcctaatatcctgcccatcaatgttaatctgaaagaaagaaatatttcctattaagtatttaaccatttaatagctgaagtatcaggaccattcatgaaaaacatcctacctaatatttaacttggttcagtgtttagaaataataattagaaataaacagcaatatgcaagaacaaaaataaaaagcttatgctctctcctgatatttattttcatatatacagttttttcgtggaaggattatttgccataaacaattttgggttttatgtttttggcataccattatttttatgttccaatattaaatttaaataaaaatgcacacttaccttcctggtctacatataattttgatagcttatggtgttctgctttttttttgaaatggagtctcgctctgtcgcccaggctggagtgcagtggcccatctccactcactgcaagctccacctcccgggttcacactgttctcctgcctcagcctcgagagtagctgggactacaggcacccaccaccatgcccggctaattttctgtatttttagtagagacggtgtttcaccatgttagccaggatgatcttgatctcctgacctcgtgaccgcccgccttggcctcccaaagtgctgggattacaggattacaggcatgagccactgcgcctggcccatgttttgctattttttacatgctttaatttacttcctttcttcttaaatatttgacttacttcaatatttattgcaagagtagagaattactaagttgaagattatgatttattttttctcccttgacaacaattgcttacatgtacaatgactggatttgctgggcatttgttgcttgttaataaaaggctaaataattatcttaaaacattttaataacttacattgtcaacaggaatatataaatatatctgtttcattgtaatttactagcactgggttttatcattttaatctgttttcttccaattaataggtatgaggtgatagcttatatctgttttcatttgtatacatttataaagttgaccatttcttgaaactttttacaaatctttatatattccagagagtcgcatgttcataatgagcagggttaccttcatatattcatattaacttctctaataataaatataatactttttccatatataataaatcttttgttccaattcattatttttgtccttttttttttttaaatttagagacagagtttcattctgtcactcaggctttggaggagcatagtggtgcaaccattggtgcaacaatagctcactgcagccttgaactcctgggctcaagtgatcctcctgcctcagcctcccaagtagctaggactatgggtgcacaccaccaggcctggctattttaaaaaatattttgtagagacagattctcattagttgcccaggatgatctcaaactcctggcctcaagtgaacctcccacctcaatctcccaaagtgctgagatcacaagcattagccaccatgtcaggcctttattgctttctttcatcatagttttattggtttttattggaaagaggcttaaggaacaactgaattaatcaattatgccactgggcatttttttctattatttcagtggtaagaaaattgttaaatcatgatgttaacagtgaatatctctgagttatagaatttctgaagatcttttttttctgttaacatatgctttctttaaaaatgtcagttgtttcaataataatttaattctcaatggttggtattttaccaggttctttttaaaaaataaagaaaatatttacacttgaaccaacccagagtttactttagtaaatgagaatgggcctatgttcccccatagtaatatcagatttttccaataatattaattttattaaattaaataaatagttccatgtattgtagaaaattatgtattaattctggagatctctgttctgtcccaatgcctttttatgatttttggttttggcatgccattatttttactttttaccttataatcttctgttttcacaattattgaattataatccattttaatatcagataaactcaatgctctaaaattgggacaactgaggaaattctgaatatagctcgtggacttgtatattgcattaatgttaaatttactgatttttaatcattgttttgtggtaatctaagagaatgtcctttttaggaatgtattctgaagtataagggtatacataatacacacacacacacataaacacacacatacacacacacacggagaaagagaagatgataaagcaagtgggtcaaaatataaacaatctaaatctgggtgaaggatctgtgagttctctagttacaattttctgtaaattcaaatttatagcaaaacttttaaatggcaaaaaaacataccctaggctattactgtctctgtgtttctagaattttctcaagagactagtttcttaagagaccatcccactttcccccttagatattcctaagtttaagaaaactcaactgtcttggatgaatttaattgctgtcctaaaatatctggtgaccctaattgtcatcaattgttcccaacaattgctatatggagtatgtttgaccaaactctaactcattgaaagtaatcctctcagtggtttgtagactgctttgcagtaatttaatgtgttatgaaagcttagtcagaacagaggagagctttgtccagcttccacagcttttatgacttttatttaatgcatttgtgaaaccagcccaagggtgtgaaggcattatccatcggcattgccattttgtaggctttttaccaaaactggattcacacgcaaatttgttactgaaaaaccaatttcaaagggccaatttgtatccagcttcccactctggaaagcttggttcttcccacttactgtgccctcatcagggtcatagagcctctgtatcagctggaccgttgtgctcttcccacagccactacttccaaccagggccaccgtctgcccactctgcaccttcaggttgaggcccttcaagatctgtaaggaaaatgagaaaaaagaacacacttcacaacaaagccctaaaatgggaataattcgattcagtttgaaatttgaaaaaaaagtatcaaataagggaatataacccccaaaggaaaaggcacataagtatcaaaataatagagactttattctttaaaatgattcaacaatcaacctcagttaggaattcctataaatattacttacagtaccttgacgttagctcgagaagggtaagaaaagtgaacatcattgaactccaaattccctttgatgctgtctggtttgtgtcctctctctgaaaaactgtcaattttaggattctaaataaaacaaaatgtaatgactattccatcatagcacaaacaagttgcatttttaaggaatatgattcagcaaattccaaaaataggacctggaatgtcacaatcccctttacataagaaaaacccaagatgaagattgtgtgtatatgtatgtgtgctgtttaaagaaatactccttttcagaaaatagtgttttcctgaaaagtacgtaagagatattcatctcatttcatataatatttccctttaagtttttggcatatcctcataaattttctaaatggtcagatatgcatatttatacaagtgcaataacaaaaatatgctataattgatatatattatagccaagtatttcagcatttagtgaaaattagctcattcctaaataataaatgtaatagattgaattgagaagattgaatggttgattatagcagttatttagaaataatgtaaacttttaatacaatcagaaactgagcacttttctcacgacttggatcaatgaaaaaggaaattgcttagattaaatgatcaaatttcacttagctaccttgcaatatttgaatgcagtgacttacttttttacgtcaaaactttttctttttcactgtagtcagtttatttaatgtagtttatttaaaatcataccaaacatgcagtgataattttttggagagggggaacccacagcaaaatatactgtcaattttggtcccaccgataatttatctaccccccatcccatatagaaatcataagattctcagtctggctacaacatgaaagtgaaaaagataaaaactaggaagagaaacgtctttgctctgcactagtgcagatgtccttttccaaaatgagatcagtattattatattatctaaagatacatttaaaaaatattaataagaggtattttctttcatttattactaacaggtcattcatttcatataattaaatgtcactttagtcagtacaacttattcaatgtagttgattcaaaaatatgcaaactaaagccagatttaattatacaagctcaaagacttcttttggcactaaaataataaatgacttacattatcaataatatcaaagatcacatatgctgctcctcttgcattggcaaaagcatcaatacatggggcagcctggccaacactgaaagctccaattaggattgaaaaaaaaacctgagcaaaataacatgaggaaaagtttaagtcacattctggcattcattattatctaaaatgtgatgtatatgtaacatagtacataaaggattaagtttaggtttatcctttccttttttttttgtggaagagcaacatttgcaaggctaatatagcattttattgcctgagtgggtctattttctcaaactacctattgttctcctgaatacatacagagttaaaaagatttttcaaacctatttcattgactcactcacaaatgccaccagaaagaaacattttcagtcagtattattattccatcctatatgattttctctaactatgcatggaattacatagacggttcaatataaaacatggcagattttggccctatgtaatgctcctaaaaagcaccatgtcacatatatttttaaagatttttaacataaaaagtaacagtttgcacatcataaaacataaaatcactccagtgtgcactggttagcaattcctttacacagttattctgtactgtagcatacaacacttaacacatttcccttcacagtattttttcactaggaaaatgaattgatataaagaagctcagaatacagcttcaggaatccagattattagcataacttaactgagaaaaacataagtgaagataaattatttttttctctcagggcatggtaaaacttctacatataatttggcttttctcaaaacacagcaacacttcatgttacccataactcaaatatcagttaaatatctatcccccatctgcaatacagataaggaccagtaagaaagaaaaataatgttgaccaaaatagttgccataaggttaatgcaatagagtccctgccctctatgcagagggctttgcttgggctccctctggggatagcaatctcagccctaccggataggtgtcattatccacatactacaaatgaggaaattaaggccatagaggacaaactcatcaccaaaggtgaacggttgtcaggattcaacctcccttcttcataaaacatcaatagtaaatgaggaagtgaagaaagggtagcaagcttccaaaccgactgccagagagaagatggaagtgagaaaaattagactcagcattaatgagggctcaccaagtcgaacacccacaacctctcaatgaagtctgaagataccactgcataaagcattctgaaaatattcactttcataatgaccccaagtcatcatcaaagggccaaattatgctcagtatcctcattttagcaagatagggaagtacagatgttaaaagatttctatttaaatagttacatattgttctgagtctctgacatgaaaagatggtcacaaaatattggtagttcataaatgtggttacaaaaagatatacatagtatgatcccagttttgaaagaaaacaatgtgtatatatatagaaaatgacctggaagatatatgccaaaaattatcatcaagagaatataaattattagattgtaagtaattttaattttaaaaattctgtatcctaatcctttgtaaaattagtatatattattttaacaatcataaaatgaagctatcttcattttgataaataaaaacaaactaacataacatctcttcttgtatttcagagagctgattgttttaagtgatataaatgtaacattttcttgtgcaatgacctattctgtaataatgatgcttactttcttatacaataaaactcaacggcagagggaggatggctcccatccatatttgtttattcctaaattcatcccatttttatttccttttatacattgtatatgtttcacaaatggtctaaccacatgctattttcttatccacactcataattatgacttgtatatactagaaagtcagctctgcccactggacagtggaaagattcaccaaaaacaaaaacctataatcatgttcatctttcaaaaaggagcgatatcaaagaaaagagaaggtagatggagaaataagattttcatattcttcataaatgttaggagaactacttactgtcattgcatttccaatagtatattcttttgatatgactagagtggatccataccagaaggccagtgcatatgatgcatatattaacaggaaggcaatacccatggaaatgtttgctgaaatagcttttttaattccaatctctttggcattttctaaatgtttctgatacctaccagaaaaatgagagggaaaacattataattaagaataacaatccatagtccgagtcacactcggctcctatatagttggaggtttaagtaacaaagtcagtcaaggtaatgaacccatggtgagacccagatctttgggaattgaactaattcaggatcagccaggcctagaacagatccaagccttctctttactggcccggttccatttcccttcatccattccaagccaaccaacattcctgtggttattccagaattgagggctcaccctgggatatggaagagcttctccatcaccttcacggcaatatcacaagtcagggttaagagggaatgagagaaaccaagccaaaccagaattgattgtaaatgtcactggaactcataaacagttagattcttaactctggtcaatgtctcttctctggagaaaagaaaatcgtccctctattgtccactgggtgagggatgaaaattttacatgttgttgtacataaacataggcttctctctttgacttttttaaaaatcaggctgaccttcatctgtcaagctagatacaggttataaggtagtcactacttatggaatatgagttcttattcaatttttccagactttagtttcatatatgaaaaatggatttaataatgcctaatttgcaagataattgtgaggttggtagataattgtagaaagtagtacagtagctggttcatagttagcaagcctgatcatttctcttactattatattagtatcattgtgttcaacttttatctcttcctgagttttgctcattctattactatcatatctttgaatcataattcaaatgcattattactggctgctggcatttgatataaagtttaaaatatctagaatgattctgttaaattacaattttttttcatcaagttaaatcaaatctactttttcatactagacccagagggtatgtaaaatttaatttgggctccctgaaatttaaagaaaaatccaatgggtatgcaatgacacttcgaggggaaaatatcacacaaactaggatatttttctttgtgacaaaaaaaaacaaaaaacaaaacacagcaacaccagttttagtgttgaaccaaataaaacatgagaattcattagtcttttaaaaaacatattctgccatcagaaggtttgtcttttttattgcgtaaagcacccaggtcttcagggtgctttcctctggttgggggctgcattcatagagcacagctgcatctctgggggtagccagcaggccacagctagcgctgtgatttctcctgtgtggctgagcctcaaggcgtggcaggaagacttgcatctgcccagtgtgacacacagctccagtgacagcagcggacacactgtaattacctttgcttaggtggctcgcttaccggggctaatggagcggcacagattacactgacatcctgaggtccaactgagggttagtgtggtctgtgtggactattatgtacaggaagcagcagtgagagagaaaaaaggaagaggttagaggatcagaaacatgttggctttgaagagggattaaggaatagaaaagtagaaaattaaatggggggaataagggaaactttgtttttaatgctagagaatttccagagaatttttatatccaagagttgtgagtatcaagagtcccatagaatagccaaagaaaatactttatatggaatcatacttcaactacagtaggggatattgttatttaaataaaaccctaagtaattattttcatttaagtagagcagaatagcctttttcataggtgtattcttatccccaaactcattgagatatacacactaaagatgtatacacagcttttcatatgtcaatcatgccttgataattttttcagagaagagtttgcaacatgcctccagatactggtcaattttccaggcttatcctggatcattaaagttgaatgccagaggcctgggtgggaagccctgcctcattgttatggaggacccacaaggccctacaaagaattctgggctataactaggaagtcgatgttttctcaggtttttctcttctatattccagttcatagtcattaaggagtaaaataaaataaaaaatattttgataagtatttttaatataattattttcctttgtaaccctacttattttgttttttggggcttttatttatttattttttggtttttaaaaaatttttactctttttttgtgatagaggctcactctatcatccaggctggagttcagctcactgcacccttgacattctgggctcaagggattctcctgcctcagcctcctgagtagctgggaccacaggtgcacaccaccacactcagcttattaaaaaaaaaaaaaattgtagagccagggtcttactacattgcccaggctggtcttgagctcctggattccagctaccctcctgccttggcttcccaaagggctagcatattttggtttatgcatttaaaaacaagggagtccatttgtattatcacatagccaaaagagtccatggaacataaatgattaagaatcttgctttagagtctgacattcaactatagccatcagtaaagggtgcttataatttatgcgagaagggttaatattaggaaagggaaggtaaaaaacacataccacaaagaagaagcaacaaaatgtaaaaacacattccttaaaccagtggctaaagaaccttcctgacctttccagctctttgttctggcccccgaaagctatcacagtcctgatggcccccagagcctcttctgccacggcgcctgcttttgcataagcagctagttctttgtcactaaatgccgagagtatctggacagaaaagaaacagtgatcacttttgtatagggagaaaagtttaaaggcactctggtcaaccctttaacctactttttcttcccaaaccctctcctttaacaaatattaaagtcatgtagcaaatgccagtgttctggatccaatggctgcgtccacatccctcaaaggctatatctgacccaccctggtgataggctccccaagagtactcaggaaaaaagaaaatccacacataattctctaaatagcactcttgggaacactgtcaagttccacatctactgtttttctttgttagttgtaaggtaaaataaaataaaactttactgctttgaaagaatttaccattcttaactttattgtgtcacaattttttttttttttttttttgagacggggtctcactctgttgcccagactggagtgcagtggcacgatctcggctcactgtaacctctgcctcccagtttcaagtgattcttctgcctcagcctcccgagtagctgggactacaagtgcacaccaccacgcctggctaattatttgtatttttagtagagacagggtttcactgtgttagccaggatggtctcaatctcctgacctcgtgatccacccactttggacttgtgtcacaatttttaattactataaaaacaatacttccagacctcctcatgggcattctgctgaataataagatagccaaacaagatgtttcaggagaaaagcaaaggaagaatcaaaacaaaagagatacaggtagttcactgtgtaaatcatcaacgtcaggatgagcaaaaattgccagtaaaatttctcaactctgaagtgttggctaaagtagaatacattttgtgtattttattgccaggcaaaactggcagagtgccacttaaccatcacaggtaatgattaaaacaaatagaacaaatacaaactctatttaaaatttttatgttcatgcaataatttgagggaaatgttatattttaaagttgcacttccttaactaagggtaatcgaagtaagaactgtgaattttttttttttttgagatgaagtcttactctgtcacccaagctggagtgaagtggcatgatctgggctcactgcgacctccacctcctgagttcagcgattctcctgtctcagcctcccaagtagctgggattacagtcatgcaccaccacgcaaggctagtttttcatatttttagtagagacagagttttgccatgttgtccaggctggtctggaactcctgacctcaagtgatttatgtaccttggcctcccaaagtgctgggatacaggaatgagtcaccacacccagcctgtgacattttgaattatgttaaaaattaatttccttatgaaagcatcatattaacaccatgttactggatgtagtttcaactgacatttaatgtagacctgaacaggtacaagtacgagacttctgcatattaaagattactgtgtgcaggggttaacacacataaaaaggcccagctttcacatacctttgcccaaacggctgcagagagtcctagaatagggctgatggccattatcacaagggtgagcttccatcctctgatgaatcccactatgaatcctgcaaaaaacgtggctactgcttgaaagaacattccaaccttgtcaccaattccttcactgattttggagatgtcactaaaaaagatcacacctaagtggttacaggcaggaggtttcagttagaaagatgaagtagacatccaacaaacacatagacaagtaaaatttgttcactgactgcaagcctctttcagagtcttagcctcttgaataacatcttccccacctaaacaccgcacaaaggaagaaattcaggattgatcaatgcttctaataagttagtatcattaagttgatactattaaatgagtcaatcctatgagagaagcattaacattttgagcataaaaatgtatctgtttaaaagcaagaattaagaagaacattgcaacaataataagcaacagtagtagggaagtattactgcatttcttcttatagggaagtaatagggaagagatctttgcttctactcttgtccctattcccaaccaagtctattctcaacacagcagccagtgggatgctttgaaaatgcaagtctgaccatgctactcctcagctcagaaacttccagcggctgccatttcactgggtgaaagctgaagtcttgaagtctttgtggaggtttacaaggccctaaatgtcttgcttttcccttttttttttttttttttttgacttatttgctcaggatgcctttgccaggactcccagtcaggaaagtttatcatctatctccctctactggaatgtaagcaccaaaaggacagagatctgtgctttgttcactgatatattacgaacacacagaatggtacttcgcacatgaaacaccctcaaatatttgttgaataagtgaagagttgacaattactaaagcaagtctctttgtaaattaattcaatcatctattcattgattcaaccatctttactgacagtctagcacctgtcacgtcctgcagtagaaagttccatgagaaataaacaggtataagatgtgaattcagtcctcaaataaacctactatgcaccttgggggaaagccaacatgcaatggcataggctatagatgctgctagacatggctgccagatgatcgatttctaatatagatcagatgctcaatctagtaacatttttcatttaaaatctttccttgacatattttcacacagtaattaatttctatatgaaagtgtgacattaacaatgtacctactctgttagccgcgtattgagttcagtggtgtcgttgatgtcaaaccatcctatttcctgtcgtagaatagcatgaaaaaacttctgcctaattttcctgatctgtcgaccagctgccaaagtccaaaatgaaacttgtatataggcagcaacaagaactccagcacccaatcctgagtagtaatatgcatatctgaaaaaaaagagaaaggctctattaaataccttctcttttcttttttcttttcttttcttttctgaaactgagtctcactctgtcacccaggctggagtgcagtggcaccatctcagctcactgcaacctccgcctcctggattcaagtgattctcctgcctcagcctcccgagtagctgggattacaggcatgcaccaccatacctggctaatttttgtatttttagtggagatggggtttcaccatgttggccaggctggtctcgaactcctgacctcaagtgatctgctcacctccgcctcccaaagtgctgggattatagcatgagccaccacccccaccctaccatcctttattcatctctttcaggagaaattttcagaactggaaattaatcaatttactaaacttaaaacaaaaactgtataggacattataacaaacagacattacatttttctttttttaaattataaagtgatgagctccatgatggcaaatctatttacttgaactgttagccaaagaaaatggataaatttttgttgttaactgcaaaaaagttaatgatttgtttttaactgatattgataacttgtggatacaatttaactcctctttaataattatattctagacttgtatatcttattgtactgaaaagttcactactatttacatattgcaaatatagtaataagcagattgaacatgtgaaatcgccctttccatattgatttttccacattctttataaaaagaaccaaaaaactttgttcctatttgtcagaatttgaaatattttaaaaaaagatatgataaaatgtcatgaattcaaacgaatttggaatgttttaccaaattagtagaaagttagtattttaaaaaataataagtacatatcaatactttcaaatttttattatctaattttataaactgcttccagatagacacctttcaggccttttagcatacagacagcactcgttacaatcagcaacactgctatgcagacatacaaacatcatgcttacaggctttagagatttctattgagaaactagaaggaggagaaaatgccataaatgacattattggatcaaatgacaaaattggaatatagatgttatattagataaaagtactgaaatttactgaagctaatagctgtactgtgattatgtaagaaaatatccttattcttaggagtcatactgcagtaaagggccatgatgtgtgcatcttactttaaattgggatttgggagcaaaaatgataataataggtgaatctgggtaaagagtacacgttatttgtatattcttataactctgtaattggaaattatcttcaaatgaaactttaaaaaagtagaccatatatatgagttacctagtcatttcttcttccagaattttgcctggatttagcagcgacaaggaaaagttcactaaattaaaaaataaaataaaacatgttaaaagatcaaactattaataggcattgccaggtttttaaaaatctgttaataatttaaatgtatgaaagctagaagatgctattgttaagtttctctttaaaaaacacttttctttgcacacttaagtgcattcttttcactttactcaagtaaagagcccaagggtttaggtactggacattaagggccaagaaaggggaagataagccctcccaggtctttcccccatcctggcggtctcagcctttagcaaagcagccttctaaggaggcacagaggagccactgaagagacaaggaagccacaaaacacacagaagacagaggagggaataagaaatatttaaaatagaaaacacaggatttaagaggcattttttttttttggtggctcaaagcactttatagaacttcaataaattttatttttatatctgtgtgttttttctttacatgtctcatatgacataagtaagggaaaggctaagttacatccatcgcaaaggaggaaaaactagacagggaagataacttagttgctcaaaggcatgtcagtgatcactggcaattagtgaacatcctgcattccacctcttgtttaccagcactgctgtattctagtattttttgaagcagtattaattggaaagaaatctattgtctattaatttgagctaatttgataaaatgtcaatgtatctttcctgatttccatgttttaataatagctaatgtttattgagcatttattaaataccaggcactgctctgaatactttaggtgtgttaattcatttaattatcttatgaggtgagactatttcacaaaccccattttatagaataggaaatggaggcacagataaataaagtaacttactcaatgtcatacagctagtaagtggcagagctgaaagtcagcccaggcaatttggcctatgctcgtaacactatactatactgatttattcatgtgacaatgacttatttttattttttagaaaagacaaatgaaaaaataagaaacagcctacatctactgcattcacaaaataataggataaaatatcaccacagcattgttgagaaaacacatcagggtacatatttctcattttccatggtcctaggagagaaattggtctctttgttcctttgccatgtgtaaatagcccaggggtcgtgttttcgtgttttcgtggtgctgtgtatcctccttatctttttccaaagaaagataaggttgaaacttatttaaaactcaaactactgtcaggatcaattaccaggcatctggccccaactgcagcatcatctttcccccaggattataatttctactgatgttcacagtgaaatttccgattattaatctagctctttataagctatcagaaccttgaagattcataccctattttacttttcatcttatcagttcctttctgtgtgttcatttccatcctgaagttttaaatagggcaaattggaagagtatttggaactagaggcaggcaagctattctaaagctgtggcatttgtaaaaatcattgtggtttttttatttccctgaactgaaaaattgggtgaaatcttaaataagtttttcctctctttcaacacctacctcaaacttttaaattctctcaataaggatactgatatggtttggatatttgttccctccaaatctcacgttgaaatgtgatcctcagtgttggaggtggggcctgatgggaggtgtttgggtcaaggggacagatcccacatgaatggcttggtgccctccctgagataatgagcgagttctcactcagttcatgtgacagctggttgttaaagagagcctggcctctccctcctgctccctctctctccatgtgacacatctgctccccattcaccttccctcactgagtaaaagcttcctgaggctttgccagaagccccaaacagatgtgggtaccatacttttacagcctgctgaaccatgagccaaataaacatattttcttcataaattacccagtctcaggtattccttcctagcaacacaaaatggactaacacagataccaactcaaattgactctccctcctaggaaagaatctatgagcgttccagattggacccgctcctttctcagagtctcaagaatggaaatctagtgctgggttagtaacctgaggagctccagagtccccggggaaactcagagtttctgctgcctgggacaaaggtgaactaaacatatgttggtgtgttgcctgaaaagtcatggcctgctagatctgaaaagagcctactcctggtcttgtcagatgctacctattctgcttcagtctcataaacgatatctacatggtcatttggcttggtggtacttaacgctgtctgtgcattagaattacatggggagcttaagaattacagatgttcaggctccactcaagcccaatgcagccagaatctctggttgagtccagagcatcacatttttataaagtgccccccgccaggcccggtggctcacacctataattacagcactttgggaggctgaggcgggaggatcacttgaggccaggagtttgagaccagcctgggcaacgtggtgaaatccacctttacaaaaagttggccgggcatggtggcaggtgcctgtagtcccagctacacaggagactgaagcaggaggattacttgagcccaggagctcaaggctggagtgagctatgatcacttcactgcactctagcctgggcaacagagcaagaccctgtctcaaaaaagaaaaagtaccctggttgattctaatatgccaggatggagaacttacaccccagtccacctgaatgcctcccgtagtaaggaactggggaactcctgaagctgcctgttcattttagagagtacctatataacctatccattttacagatgaagagacagagtgggttgtttcatttccaagttcttatagctagtttgtcccaatatttattgatcatttactatgttccagacactttacacaaatcatctcacttaattctatcagtaaattgatgcttacctctcaaagatgagaacagtaaggattatagaggttaagagacttgctcatggtcacacagcttatgggtgaagggtctgaataagcagtgtatacattaaggattagatagggaaacatagtcttcattttcacttttgagtctcaaagtaaatcaatgtctgccttcccggattctgcccaagacttctttttttttcaaaggggaagaaagagaggtatccatcacctcaagcatctctcctttctttgtgttacaaacaatccaattatgtacttttagttatttttaaatgttgcctaggacttcttttaacacatagaactattcattataaaataaagagctggtgtttgttcaggcaccctaggcactatggacagttatgaagatatcttgggggctcaaaatggcatttttcccctcaaacaagaggcaatgcaaggacaatcagggtgcagctattttcccgcagaattttctagactattatagtcacagagacagcataaaagatatcaagtccttgacactctgcagaaaaactgttttctccaactccgtccttaatgttttggatgcagaatgttgtgtgcatactttctgcacaactgactcattgtgagggaacaaccctgtcatggagtggctttattctgttgacaaggacgagctttgctcacaataagtcattgtcagaccctcttgtaatatgaacctttttttcttctaacatgcctttctcatttggctcctattaagtctggttgtccaagcatccaacaattctaaagaatagactaagtaaacatctctaagagataagctggaacctcagctaagtacctcactctatctgttcccaacccccatgatttttgttaaactctacaactctcaacacatcaataagcagtctggatttagagtgagtatcctttaaagatttcattgtcttctaagaggtatgagaatattatttttacaaacgaccaaagagtggatgctggaaattcataacatttgaggaactttccatctaaatactccatagcatccagtaagcctaatgagaaacatggctacagggtaccaagcatcataacaggagtgtttataattcggaggctaccaaaacaaagttggcaactctcgcgagtttatctctgtgtcaaccacagttctgtaagtgacttgcttgtgccattccccagagagaccttgaatttggcacctctctgccatgtccagcttaaagccattcagtttcataattaggcacaagttaaaaaaaaaaaaaaaagcaaactgctccaaataagaaagttgggaattattctggtattagtaaaaacaaaaacagaactaataaaattggtccaaaagagaaatgatgtgtgataagtgaattgcattgctttaatctgactttaaaaattttaattgtgataaaataccttacataaagtttaccatgttaactatttttaagtgtacagttcagtactgttaagtatattcacactgttgtccagccaacctccagaactttttcaacttgcaaaattgaaattctatacccattaaacaacagctccccactgctcctccccacaacccctattaaccaccattccacttgcgttcttatgaattttactctagatacctcataaaagtagaatcgaacagtatttatctttttttgagtggctcatttcatttagcgtcatgtcctcaaggttcatctatgacatagcatatgtcagaagttatttcccttcaaaaggctgaataatattccattgtatgtatctaccatatcttatttttccattcatctgttaatctgatttttttaaccctgtgtagaagccatttaaaattttttttttactttaaatttattttttcttggtaaaggtgtatacgtcaacagttacaagcgagaatacagggagacatcacacccacccattttcaaagccactcactttctctccctagaagtaatcatcagtttctctacattatttcacagatattttatggacatataagtgcttcgctggaaggctaatgtgagtcaccaagagataatatctgcgacacttgaaaagaggtgctagaccatacatgaacagataaagttgggtcttattccacaaaaatattccattggtgctctaataaatggtgctttatggtttgaagatcaggaaatgtgaaacccaaagataatttcaaagtaggggcagtggagatatggtgctgacaattcaggagttggagaaacgtctttgtagtttctttgattttttttttccagatgaaataagatggaaatcaaaggcagctggtgtaagttcctatacagtcattgtcctgctactaaagggatgggtgagaaacccagctccgcatctggaaggtcagaccatttaatagacccttgagtattaatgtgcataaatgcatctctgattcactgtggggaaggaaatgtcttgctaaaataccattgctaattcagtgggtccagatgtggcctgggagtctgcatttcttttttcttttctttttaaaataatttcaatttttattttagattcagggggtatatgtgcagttctgttacatggggatactgtgtgatgctgaggtttgggatatgaatgatcctgtcacccaggtagtgagcataatacctagtatttggtttttcaacacttgctgccctccctcccctctctagtagatctcagtgtctattgttctcatctttatgtcaatgtgttacccaatgcttagctcccacttataagtgagaatatgcagtatttggttttctattcttgtgttaatttgcttaggataattgcctccagctgtatccatgttgctggaaaggacacaattttgtatttatttatttatttatttatttatttatttatttatttattttgagacaaggtcttgcactgtcgcccaggctggagtgcagtggcaccatctcggctcactacaacctccacctcctgggttcaagcaactctccagcctcagcttcccaagtagctggtgatttcgtattttttataggtgtgtagtattccataagaaatagatttttaactgaggtgtcttaatatgggcatcatcctgctctatatgtatacaaaattaatatgttgtagatctgtagattttctaggaaaacaaatacacaatagaaaattcctacctctcccatttctttaaagactttttttttcttgagacggagttttgctcttgttgcccaggctgtagtgcaatggcaacctccgccccctgggttcaagcgattcctctgcctcagcctccagagtagctgggattacaggcatgagccaccatgcctggctaattttgtatttttagtagagatggggtttctccacaatggtcaggctggtctcgaactcccaaactcaaaacttaattgccaccaccttggcctcccaaagtgctgggattacaggtgtgaaccaccaacacccagcctctttaaagactttttaaactatctgtcctaccacaacttcacaatgtttatgttaaagttttggtcactagtcacaaataagcaatccatttaaaactttcccaagcacttttttttccgaatcatctatattgacactatactatatatgataataagcatggtttggatggcagaaagaccagcagtgtaactatggaaaagttatttgccctctccaagccttggttttgccatctatcacagaagataacattacctactgtgtagtattgttcttgtgagggtaaagtggaataatgtatgtaaagtgctcagcataggacctagcacatagtaagcacaatgaaaaatcaccattattgttatttttattataaagaggtttttttcagaaactatattacttgagaataaataaataaacttttataggagtttgctttaaatattcaaaggatgcttttactggatttttaaaaggcattaatatttatcaatatttatgtaaacatattctgctgtattaattaaacaatcctattctcttaggaaattacacgtaaggcctacaatagtaactaaatatgtagttctcagtcagtgaacactgtaaattcttattcaatgctgtctaaatgatagagtaatttttcttacatatctttgctaagaaagctgcctttcctttaccagtgttttgaaaatattctaccatctgtgcaacagtaaagcttcactcagtcttctccagcccagtgcccacaaggtctcttagagaaaagaggcttcaggcttggtagaaagcatgaaaattttcctttctatgttgaatttcgttactatgaaaataaccatgtctattggagccccactgtaatgctattgtcagggcctctcgtattgataacattaacttatgggacacttggctcttcagtaatcatagtcctttgggtgagttccaagggacgtattgaatccattcactctttagtgaaatgccatctcaagttccagtcaatctggttgatccaaaattagagacagaaaatgggtataattttttttaaggtgaaggggagagaagaaaagaaaacccagaaacagatctacaagctaaacacagctaagaagtactgccatgtttaactgatgtgctttgaaactcatcagcaattactaatgggatggatactgcatagagatactctcattacatttccactgttctcaagtagagtgacttccttactttatttagaagcttcctgtgtatttccttcacctgtattaaaagtcaaacaacaatacacatatttctttaaatttaaacgagtatttgaacaattttctgagaattttacaactccttctatgatatctggagtcaaccagatatccaaatcattaaataagatggtaatgaatagcaaaatcaactcccaaatttttacccagttaaagaaatgctatggatttttttaaaaggtaaagaaatgcttacctggaaaggagaagtttcctgcagtatcaacaaatttgtcagtcatctctccaaatactatcatcatgagggggagacctgatccgtgagctatggccatgatggtacccagcgacataaacaatttatcctgccaatcggagtatcgaaactaaaaaaaggaaataaaataatacttagctgtggaatggaatttctcctcttccataattatatattctttggatttttatttaaagtcagtacttttttaagagttgtaaatgaatgtcttagaaaaggaggccttcaaatcattaacaacttaatttcatgattctgtttattttgtattctgtgaagaaatcaatctaattatgtttaattggtatctgatttgaataaataattactatacaatcaaaagggataaaggtttaagaaatattatttgatatcccagagctcctgtggtaataaagaacggctagggaaagacattaagtttaaacacacacacacacacacacacacacacaccacatcctttaaaaaagcattcagaatatttcagagggagaatttaaaatagaggaaaatagatgctctgagttttgagataagatccctttagaaggtttaagttagctttaaaaaggcaactcagtagtgaagcacaataaacattacagtgtgtctatatatgcaccttagggaagtcttgcctatggagatccttatgcagaaccttttttaaaaatttagttttcaccagtgtcacctgccaagtatgcagaaccttgaagggtaagagggagttcgctggagaagaatcggcgagtgtaaaagaagtaggaagaatttaggcttagaataagaaggtaactagaaactacatggaatgcttaagtaacccctggcagtggaattcctgaagggcacagtacaaagtgtgggagaggatgttggagagagatagaaggcctgcgctggtgggccacaccaagaatcttggacacagtactacctacagaggggaagggtgataccagttgtcacagtgaagtgcacaaccctcaagaactaaccagcagttcagtgttctaacacttcaaaggactttgttactgtcttattagtcctcttccatttctcaccttttctttctgtttttgattgacccatttatggctctctttctctttgttcttctttcctcctctgccttctagactacattttcctcatcttacatttccatttctatagcttcctatcttttttttctctcctctcttttaaaatgctttactctgcccattccccccacctcagccccttttggggacaaagaacagttattgggagagagggtgatgagccaggcttggcacagtggagcctttgagggctgaagctaggtcagactgggtcaataacccgggtgaggctgaggttagaggcacatggtggaaagtggatatgtgtgtacaccattctcaaagatttccaggagttcaggcaaggtttcagggacagggacaaactccatcatcaaacacacagggcaagcaagagaaccgaaagagacaaagggtcagaaaccaggcagagcttggataaaacaatgggagcaggtaaagtcaagagccaatggagctgggtccctaaaattgtcacaaagggaccagtgtcccaaaggttcatttttagtggttctgggaaaaggaaaacagaacacttgagtctgtcagctatagttaaaagcacagggtcaggttgttaacattaaaaagcattttaaatgttttcatattaattgaatacaattttacagcctctaagcataaatttaaaacgaggtgaatttcacagcaacatcctaagtaaacctaggtttgttttcagtgattttccagaaaataatatatttctaactcctgttagagcacagttttatcctcaacctctttcaggacaaaaaatatctattaagatatctagtaagaggtgaaaataaatattaaatttaagtttaacttaagctaaaacttctaaattcaaatgaaaatttctgttcctacattaaggtttgtaggattgtattttctgtaggaggcagatttaaaacctatgcattaaaaccagctttcagaggcggttccaagatagctgattaggaacagctccagtcaacagctcccagtgcaagtgacacagataacaggtgatttctgcatttcctactgaggccccaggttcatctcactgcggcttgtcggacagtgggtgcaggacagtaggtgcagcgcaccgagcatgagccaaagcagggggaagcatcccctcacccgagaagcacaagaggtcagggaattccctttcctagccaagcaaagctgtgacagacggcacctggaaaatcgggtcactctcaccctaatactgcgcttttccaatggtcttagcaaacggcacatcaggagattacatcccacgcctggctcagagggtcccacacccacgaagcctcgctcattgctagcacagcagtctgaaatcaatctgcaaggtggcagcgaggctgggggaagggtgccctccatagctgagacttgagtaggtaaacaaagcggccaggaagctcttgagtaggtaaacaaagcggccaggaactgggtggagcccaccacagctcaaagagacctgcctgcctctgtagactctgcctctaggggtagggcatagctgaacaaaaggcagcagaaacctctgcagacttaaatgtccctgtctgacaggtttcaagagagtagtggttctcccagcacagcatttgagatctgagaatggacagactgccttctcaagtgggtccctgacccccgagtagcctaactgggaggcaccacccagtaggggcagactgacacctcacatggccgggcagccctctgagacgaaacttccagaggaacaatcaggcagcaacattcgctgttcatcaatattcgctgttctgcagcctccgctgctgatacccaggaaaacagggtctggagtggacctccagcaaactccaacagacctgcggctgagggtcctgactgttagaaggaaaactaacaaacagaaaggacatccacgccaaaacccatctgtacgtcaccatcatcaaaaaccaaaggtagataaaaccacaaagatggggaaaaaacagaacagaaaaactgaaaattctaaaaatcagagcgcctctcctcctccaaaggaatgcagctcctcaccagcaatggaacaaagcaggacggagaatgactttgatgagttgagagaagaaggctacagatgatcaaacttctctgagctaaagacggaagttcgaacccatggcaaagaagttaaaaacctagaaaaaagaatagatgaatggctaactagaataaccgatgcagagaagtccttaaaggacctgatggagctgaaaaccatggcacaagaactatgtgacgaaagcacaagcttcagtagccaattcgatcaagtggaagaaagggtatcagtgattgaagatcaaatgaatgaaatgaaacaagaagaggagtttagagaaaaaagaataaaaagaaacaagcaaagcctccaagaaatatgggactatgtgaaaagaccaaatctatgtgtgattggtgtacctgaaagtgacaggattaatggaaccaagttggaaaacactctgcaggatattatccaggagaacttccccaatctagcaaggcaggccaacattcaaattcaggaaatacagagaacaccacaaagatactcctcgagaacagcaactccaagaaacataattgtcagattcgccaaagttgaaatgaaggaaaaaatgttaagagcatgcagagagaaaggtcaggttacccacaaagggaagcccatcagactaacagctgatctctcggcagaaactctacaagccagaagagagagggggccaatattcaacattcttaaagaaaagaattttcaacccagaatttcacatccagccaaactaagcttcataagcgaaggagaaataaaatactttacagacaagcaaatgctgagagattttgttaccaccaggcctgccctaaaagaggtcctgaaggaagcactaaacgtggaaaggaacagccagtaccagtcactgcaaaaacataccaaattgtaaagaccatcaaggctaggaagaaactgcatcaactaatgagcaaaataaccagctaaaatcataatgacaggatcaaatccacacataactatattaaccttaaatttaaatgggctaaatgctccaattaaaagacacagactggcaaactggataaagagtcaagacccatcagtgtgctgtattcaggaaacccatctcacgtgcagagacacacataggctcaaaagaaagggatggaggaagatctaccaagcaaatggaaaacaaaaaaaggcagggattgcaatcctagtctctgataaaacagaatttaaaccaacaaagatcaaaagagacaaagaaggccattacataatggtaaacggatcaattcaacaagaagaactaactatcctaaatatatatattcacccaatacaggagcaccaagattcataaagcaagtccttagatacctacaaagagactcccacacaataataatgggagactttaagaccccactatcagcattagacagatcaacgagacagaagttaacaaggatatccaggaattgaactcagctctgcaccaagtggacctaatagacatctacagaactctccaccccaaatcaacagaatatacattcttctcagcaccacactgcacttactccaaaattgaccacgtagttggaagtaaagcactcctcagcaaatgtaaaagaacagaaattataacaaactgtgtctcagaccacagtgcaatcaaactagaactcaggattaagaaactcactcaaaaccgctcaactacatggaaactgaacaacctgctcctgaacgactactgggcacataacgaaatgaaggcagaaataaagatgttctttgaaaccaatgagaacaaagacacaacataccagaatctctgggacacatttaaagcagtgggtagagggaaattaatagcactaaatgcccacaagagaaagcaggaaaggtgtaaaattgacaccctaacatcacaattaaaagaactagagaagcatgagcaaacacattcaaaagctagcagaaggcaagaaataactaagatcagagcagaactgaaggagatagagacataaaaaacccttcaaaaagtcaatgaatccaggagctggttttttgaaaagatcaacaaaattgattgactgctagcaagaccaataaagaagaaaagagagaagaatcaaatagacgcaataaaaaatgataaaggggatatcaccactgatatcacagaaatacaaactaccatcagagaatactgtaaacacccctacataaataaactagaaaatctagaagaaatggataaattcctcaacacatacaccctcccaagactaaaccaggaagaagttgaatctctgaatagaccaataacgggctctgaaattaatagcttaccaaccaaaaaaagtccaggaccagacagaatcacagccgaattctaccagaggtacaaggaggaactggtaccattccttctgaaactattccaatcaatagaaaaagagggaatcctccctaactcattttatgaggccagcatcatcctgataccaaagcctggcagagtcacaacaaaaaaagagaattttagaccaatatccctgacgaacatcaatgcaaaaatcctcaataaaatactggcaaaccgtgggcgcggtggctcacgcctataatcgcagcactttgggaggctgaggcgggcggatcacaaggtcaagagatcaagaccatcctggctaacatggtgaaaccctgtctctactaaaaatacaaaaactagccaggcgtggtggtggggacctgtagtctcagctactcgagaggctgaggcaggagaatggcgtgaacccgggaggcgcagcttgcagtgagcccagatagcgccactacagtccggcctgggcgaaacagcgcaactccgtctcaaaaaataaataaataaaataaaataaaataaaataaaataaaataaaatactggcaaaccgaatccagcagcacatcaaaaagcttatccaccatgatcaagtgggcttcacccctgggatgcaaggctggttcaacatacacaaatcaataaacgtaatacagcatataaacagaaccaaagaaaaaaaccacattattatctcaatagatgcagaaaaggcctttgacaaaattcaacagccattcatgctaaaaactctcaataaattaggtattgatgggaggtatctaaacataataagagctatttatgacaaacccatagccaatatcatactgaatgggaaaaactggaagcattccctttgaaaattggcacaagacaggatgccctctctcaccactcctattcaacatagtgttggaagttctggccagggcaatcaggcagaagaaagaaagaaagggtattcaattaggaaaagaggaagtaaaactgtccctgtttgcagatgacatgactgtatatctagaaaaccccattgtctcagcccaaagcctccttaagctgataagcaacttcagcaaagtctcaggatacaaaatcaatgtgcaaaaatcacaagcattcttatacatcaataacagacagagagccaaatcatgagtgaactcccattcacaattgcttcaaagagaataaaatacctaggaatccaacttacaagggatgtgaaggacctcttcaaggagaactacaaaccactgctcaacgaaataaaagaggacacaaacaaatggaagaacattccatgctcatggataggaagaatcaatatcgtgaaaatggccatactgcccaaggtaatttatagattcaatgccatccccatcaagctaccaatgactttcttcatagaattggaaaaaactactttaaagttaatatggaaccaaaaaagagcctgcattggcaagtcaatcctaagctaaaagaacaaagctggaggcatcatgctacctgacttcaaactatactacaaggctacagtaaccaaaacagcatggtactggtaccaaaacagagatatagaccaatggaacagaacagagccctcagaaataataccatacatctacaactatctgatctttgacaaacctgacaaaaacaagaaatgggaaaaggattccctatttaacaaatggtgctgggaaaactggctagccatatgtagaaagctgaaactggatcccttccttacaccttatacaaacattaattcaagatggattaaagacttacatgttagacctaaaaccataaaaaccctagaagaaaacctaggcaataccattcaggacataggcatggtcaaggagttcatgtctaaaacaccaaaagcaaaggcaacaaaagccaaaattgacaaaaatgggatctaattaaactaaagagcttctgcacagcaaaagaaactatcattagagtgaactggcaacctacagaatgggagaaaatttttgcaatctactcatctgacaaagggctagtatccagaatctacaaagaactcaaacaaatttacaagaaaaaaacaaccccaccaacaagtgggtgaaggatatgaacagacactcctcaaaagaagacatttatgcagccaatagacacatgaaaaaatgctcatgatcactggccatcagagaaatgcaaatcaaaaccacaatgagataccatctcacaccagttagaatggcaatcattaaaaagtcaggaaacaacaggtgctggagaggatgtggagaaataggaacacttttacactattggtgggactgtaaactagttcaaccattgtggaagacagtgtggtgattcctcaaggatctagaactagaaatatcatttgacccagccatcccattactaggtatatacccaaaggaatataaatcatgctgctatacagacacatgcacaagtatgtttattgcagcactattcacaatagcaaagacttggaaccaacccaaatgtccaacaatgatagactggattaagaaaatgtggcacatatacaccatggaatactatgcagccataaaaaatgatgagttcatgtcctttgtagggacatggatgaagctggaaaccatcctcagcaaactatcgcaaggacaaaaaaccaaacacctcatgttctcactcacaggtgggaactgaacaatgagaacacttggacacaggaaggggaacatcacacaccggggcctattgtggggtggggggatgggggagggatagcattaggagatatacctaatgtaaatgacaagttaatgggtgcagcacaccaacatggcacatgtatacatatgtaacaaacctgcacgttatgcacatgtaccctagaacttaaagtataatttaaacaaatttaaaaaaataaagaaaaaaaaacttctaaaaaaataaataaaaccagctttcatttgataaacaatttattctccaaagtgctaatttttttttaaattgcccttactgaggctttttaaacaaataaaaaaagaggagagaagacaatgaataggggcttttggttacatgagaagtatgcagcagtgtttgagagtgtggatgttttggtgtctttttatccatttaattactaagttggatttcagctgacatgacacttaattctaacttctttgctaccaaataatggctgtcacagtttgaaacacgtcatatttaccaaaaatgggcaaatgctttcttgagctgcctctgtaagacatatttcaaatgaaaaccagatgaggagacttcttccaaaaatattgtcttgtcttgtaccaacagaaaagcaccgaaaactgttttaagcataatcagaattcctaatagttaccccctatttagccaattttttggaaaccaaatgtgaatgtagattccttaaattaaaatttatgtacttaacaattactttcttgaaatgcaagcttattttaagctaaatttggggtgggggtctgtgaagcaaatgcagaaatgcattttcttgaaattgttgagtttgcattgtgctactaacacaattcccattttcactttccttgcacaccagttagctctgtccggtgtcatcgccagcctgtctctactttttaaaaaatcatccatcttaagaatgtgggtcattgactataataagccaaacttatacagcacaggtgcagcaaggacaatttattgctgtctgcagacagttttttgttgtcgttgtttttgagacagggtcttgctctgccacccaggctggagtgcagtggtgtgatcataactcactgcagcctcagactcctaagaccctcctgcctcagcctcccaagtagctgggactacaggttcatgccatgacatatgctattttttaagatttttatttttattattttgtagagatgagatctcactatgttgtccaggctggtctcaaactcttgtgctcaagcaaccctcccacctcagtctcccaaagtgctgggattacaagtatgagtcagctcgcctagctagacaatcttaaagtatttgctttaaaggtaattgattcaatacctcaaatttgaataaaaggtaggattattcacatttaacatttcacagcttaccaatgttaatactccaatcattttcactgtcttcgtttttttccttttttgtttgctgtaaaaaatagaattgcttcaatttaaaactgttacaaaatgttttacaatcaattgaacataaatatgtttagttacaatattcaactattatattttcaaatataagagtgatgttcacaaaatgtcaaaattattcagttcaacaaacatagcaagcacaaaagtaactgtcgaaggtactacaaagatacatggatacataagaaatggtcgcctgccttacagagctcacatacacaggaaagataagtatgctaacagtgtcgctaagtcaattaagttatttgttttctaaaattaaaaaaaatcatgatttaaaattaggaatgtctattcttctgaaggattgtggagagtggtgtcaggcaatcttgttggtgatacattcaaagtacatctagaatttaaccacttatcaccagtttcattgctgtcaccagtagggcagcctcctgcctagtctctccacttccacctatgccgcttcagtctatcttcaactagcagtcagagtaattatttcaaaatgccaagccatacactacttctttgctcaaaaacctacaatggctttcctttttcttacaataaaagccaaaatccttgcattaacctctgaggtcctacacgatctgtttgcttatttcctctctgaccacatccctactcccaaacctgcttactctgctccaaccagcctggactctctgctgttccatgaactcaccaaacatgtacctgactcagggtctttgcattgccagttaccttttccgggaatgctctccccttagatacccacacagctgtctcctctcatttctttcaagtctttgctcaaatattacctttaaaataagatctaccctaaccaccctacttaaaattacaaagtactccccttttgtactcctgatccccttaacctggattaatgcttttttccatggcgttaattaccttctaacattggctgtggtttacttatttagtatgtacattatttatgtctgtcctccgtactataatataaactctatgagggagtgtgtgtgtgtgtgtgtgtatgatgatttatatatatatgatgatttttacataaatatgatgcatttatccaggtaaatgataaagttttactcataagatgattccaaattatgtaaagtattgactaaaatcactggacaaacatctgccactaaatatgttcaaaagaatgtgccatgggcaatagcaacataattagaacaagaatataactaatttgattgaagcaggcttaacttcctttaaatatattatctttggtctgcttttataaaaattagtttcactacatttgatttcataatcatgtggtcttaacttattgttaactttctgtatttctcttttgagctgctttcttctttccagcagaagctgtgggcttcccctctgaggactttcctgggttctgaagtgttactacaccttttgtaggaatagctcctttgcacacgcatcaaatgttaagccagtgcaatacataaatagacttcttcatgaaaatgccatctattaatagactcacagtcaatccctgcctaaacagccagctgatgaaaaccatatttttctattgcgtgtgtaagtacttccattggaagtaacaccatctatcactttttcaattctacatggcaaaactaaattttctatgaaaaaatacaatggtgcttagaagaaatacagcaaggttactgcacaaccacattaacaggctaaaataatgcttcagtttaagcatcaggtaggcatgttttcagttagctaatcaagcccctagcagcttgaggacaaactacagagactgataaatttgtccctctgggtgatcacttgacacaggtcaattttttctgggtagcctggtatgaactcagagaccgtaatagcctcataaactatttcaggctaaaggcgaaaatgattcactattcccacagtgaaagaggaaacaaagacacacgccattgactgggaacttctgccccgctcataaagcctgtgaagtgagtttaacaagggccaggggaaccgagaaagacatgaaggcaaaggaagcgctgcttccccctaccacttgaacaaaactgattcggatgtacagaagttccccctccccacctatcctcccagaaaggagaaatacaaataagcctggcgatgagaggagggggaggggtaagacaaggaggaagagacataacaggggatgggcaggaggggagggagtttttgcttcactgcccttgttcaaaaagcacagccatcaacagcagatgtctgacaccctttaagtctgaacaatcagatgatgtatatgaaagtcatttgtaaaagtttcaagagttacgtaatacaatgaatgttatacaatgcagatattcattgaatcccccctgcacaaagggaagggagcacttttcaagacagccttttcttcctgaatctgttccaaaaggagcctcagtgacattctttgaggccacacaacacgtttgctccaaggtcagaaccggatgcaagacccttcaaagaagcctccaaaacaaaggtcttcaaaggcatcaaccgatttttacaacttctttccaagggtgaacttagtcctgctgattggcgtgtaacggaaaagccagtggctgctggggatgtacctgctgatgcccagttcaaagtcgccctccgcgctcgtggggcgccaggctgttccgttctttgccgcctcaagatccatctcagcctgaggagaaaccacagcctcagaaccaagtacaccctctccggcggcccggcgcacgagtcgcggggcccgggggcactgggtggaggtccggccactcccgccccgcgccccacgtcccgggtctcccttcgaggccagacgcgcccggacctctctcacctcgaacctcgcgcgtgtctggcagggcctctggacgcgcgggcgctgcagcagaggggcctggactttgctcgccgcggcctcgcccccgcccccgcccccgccccccacgcgcgtccggcccgggaaacgcctaccgttgcagccagggcgagggccgcggcccgcgagagcagctcccgccgcccgcccagctctctccccaggctaggcgcgggccaggggcgcagcctgccgctcttgccgccggggcgcccggctggggccgccgcccaccctggcgacccgccagaaccagcccggtcgcaggataagaccgagatcaggctggagcctcgggtgccgagaaagcctcgcctgatgggccacccaagcccctgcagatgactgtcacaccccatgggcgctcagttttgtttttaaacccataggggagacagtttccggacgcccaacaatcacagggcggcccaggaccgagagagagcaatagactcgcctcttgcttccgcatccccagttctggtccaggtggcactgaacccaattatctccaaggacggcgagagtcagccagggccggcaggaaccatcacattatgctccttggggaggaggaacgctgttggtgccctcttagcacttaagagacacagagttttagggctagaggggtcttcagcgatcatctaattaaaaccccgtatgtttaacatatgaagaaacggatgcccagagaggtgaagtcctgcctgaggctgcatcggtggaaccagagtctaggggaagcctcctgagtcccagtccagtgccctggctcactgctctcatctaagacttctgtctgtattgaattgtctctgctcctaccacctatttgagtatgactttcttctttctgattaattcctccacactcttcccaaaaggaagtgtctaaaacggggagccataagtttcatggctttgaaaccggagactttcaaactcagagcttcacatcttattaactatgtgactttggacactgtgctcatttctctaggcctgtttccttatatgtaaaatgaggataaaaacatctcccttatcaggttattgcgaggaataaatgagttgaggataagggaattaagtactaggtaaaagcacctagtactatgcctaaaacatagtaggtgagcaacaaatacaactttccttccttctgatcaggtagcaggatgaccagtgggtccttgcacctgctatgtcctgttaacacaattgttagcccaaggcttgtctgagttctcagagaaccttaaagcagagcatggtataagtagagatgctgggtggaccctggtgtgaatctcacctttcccatgtaccagctgtctggccaggttatgtaattcttgactcagtcattggatctataaaataagggtgttattaggattagggatactgtgtgtaaagtgtcctgcacgtaggagacacctaataaatggtgactattattatagtaaaagttcaggcgaggccaaggaagaaagactggaacaggagccagcagcttcggcactcaccccttacttgtgctgtgcctctgcatcctgctctgcctgccacctggagctaaggtggaacttgacttgaaactgcatgctggagtagaaatgaatttagttgagtatttttcctcaaaatgttttctctccatatcagtctaccatgaccatgaggattctcttcttaaatcaacccaaattccttcccttcactggtctaacaggcggtcagatcattatttcaagatactctgagacggaagcagttggaattgtgtagtttgaaagaaggcttgtggtgactggaggacattattaaactcattagcacataaggagatgacagtttcttcagtctctaataaaagagaatttgataaagtaaatgcagatacttgaaggagtaggaaggttcagaacaaaaactaaagcaaataacatgtatgaggcaatgaggtgtatttgcctgtctgtctgtctgagccgattcacaaagttgtccctgcaagaagccatgcctatatggctgtgtttacttctttacctgtattacatccaattccaggagctccttttatatttatttgataacagtgcagtatcactgagaattccatcatttattcatcaactagaagttgaagacttacaatatttaaagcactatgataaactagatttctccattacactcaggctgtaagaaatctttactttccctttacagtagaatattgagatacttatgcattgatgtaaggctggaattaatgccctaccacgctatcttactttttctatttgccccattggttccatctttcttttttatcctcacttttgccttattttagatctgtttaatattatcatttagatttcctttctataagatgtattcttttattttctatttaataatgatctcctttctagggattatgacatgtatctttgactaatcattgtactttttcctcttccaggacaatgcaatgattttagaactcttaagtctcttttttattcacccctaacttttacattgccattgtcatgtactttaattttctctgtatattcatgactcttctgggaatattatttctttatgagttgatacttatttagctttatcaaaacatttatcattttcttgctttttgtttcttcctacatctcaaagctaccctcttggatcattttcctttcacctaatgagcactctttcatctactgtctctttcttgttttctttagtttgtgacaaattttctcagcttttttttcctgaaaatttatttcacttttatcttgaaaaattatcagttatttatgggtttgccttactaaataaatatcaaaactcattatcaaactatggtaattagagacatgtgttttggaatgagacagacaaagtaaaacagaatcaatatcttataactgatggaactagaattcgaatccagggagtatccttatccgctatgactagcagggaagtggagatggagaacatacgtcagatgtatcagagagttaaacacagtcattctttaatgcatccttcagtccactgatcttaccacctttttactgttcctcacctccttcatgtcttctctcttaactcagcctgaaaacacccacaaccctctagccctctctctttatcaggcttgcttagtaaaaccacaatcctggataattcaagttactgagctactgtgaacctacaccatgcagcagaacatgtctgaagaaaaatacaaagtcatcgggcttgcctcgccatgaacttacatggccctatactgtatacataatgtacttattatgtttattatttattgcccactctgtgggatgcaagacttatgagggcaaagattttgtaaaattcactatgtatcccaacgtttactgaccaatagtcataagatgttttcttagttcattcactcacctgcttttctaataattatttcatatcgtctgttttctcaaattctgttcttttacatcttcacattctgctaaattaccgtgcttatttcactgatgaagttgaagtgtttagaatggaactccataacctcctaccatgatatttttccacttaccagcatctgtaccaacactctgcctttgctgtttctgtaaatgaactattcatgcctctctttgcagccagtctttgtttgcatgttcatcctgtagatcccatcccctttcactttcacaaggagccattcttccctttctgtcctatatcatcaatttccccatgcctgctggatccctcctgtgagcttacatacatactgttatttcttccatcttgaaaaacaaacaaaaaacctctcttgaccacacttcccctgccagctaccatcatatttccctcttttcctttggagctaaactggttggcaaagtttattactttcttcaattcctgttgttctctctgaaacccactctaaacagaagtttgatctttccacactaccgaaactatttttataaaagtcactgataatctctgctttgctaagtccaaagatcaattctctgttcttattttacctgacaaattcaataatttgacagatttatcactctgtctttctgaatatatctttttcatatagattccaggacaccatatgtttctcggattttcctatgctttcctgatcactcttcctcagtctcctttgatgccttctctctctctctttttttcaactacttacctaacactggagtggtccaaggctcattccttggacttctcagtctattctcgccacttctgtcatgtcagtcagtcacacagctttaaataccatctgtatcgaataatttctaactttttgtttctagcctaaaattccctcttgcattcctgactcttaaacacaagtgcatctttgacattcctatctggatgtttaacagacatctcaagcttaacatgcctaacctgctcctgatcctttccccaggctgggccctccagtgaacttctgcatccagttggcagctccagacttatagttgtcaacaaaaacactggaatcatcctgcattcctctctttctttgacacaccataatcaatctgtcaggaaatcttgttgcctttactttcaaaatatattcagaatctgacctttgccctgcacctccagctctaccaccatcatgcaagccactatcatctccacctgattttctataatagcttgttaattgtctctctgcctctgtcctttcctcctcttccgcctttgtccattgtcaaaagcatggcctggatgattcttttgaaatgtgagtcacatcacatcactcttctcttcacatttctgtggtagcccccaattcactcagtcatggcctacaatgctgtgccctctccgtgacctctctgatctcatttttatttattttgtctttgcctaactccactccagccacactggcctcttggatattactcagacaagagaggcagcactccacctcagggtgtttgtactagttgttccccctgtccaaaattatcctccccaaaatactgacatggaggacactctcacctcctaaaaatctcttctcaattagaagttggatcttgtaccctcaggactctcagttcctcttatcctactttgattttcttttccacagcatttatcaccttctagtatactatatcattaaagaatttattatgcttattgtctcttgtcatcttagtagcacataagagccgtgagagtaaaaatattaatatgttttcatttcattcgctggaatatccaataattgctgcccacacttactatgtgcaaggacctgggctaaggttttaggataaaaagttttaggcatataaagaaggatttaaacaaggctaatgcaaaagttactcagattatatagtattttatgaatttacagagcctatcacacatatatatcatctcatttgattctcaaaacaaggagcatgttcaaggtaaacaagtgaggaactattattctcagtttagaggtggggatatcaaagtgaattttacacagctagtaaacaatggaattaggcttccagctctggccacgtgacttcagcttctcattctgtattcctattgaagaccactgttagacagaagccttacctgttgtatttctagtgcccacagcaccagtgggctcagtaaatgtgtattgaatagatcaatatttttgaactatagcataaaagggtttgtacaaaaagaatttcctataagtaagagtcaacagagaataacaaattccatctaccaaagtattttcaaattatattcaaatataaattaattagcaacaatttttcctaaagagggtgctatgatggactctattctctgtcctgttgacttatatcttgacaaatatgctctgtggtcttttcccccactatattgcatttgtggctatctaacaattctccaaattttcatgtctgaagatagtgaaaatttgactattctgtttgcacttggctgcacttaactactcttgaatcatttccaaacttttggtcactaatgttttttacttctgctcaaactaccttctcagagtttatagatcttaatttttcctgcctttacttccttcaacccatgttacatcttatacttctcccaaagtttttttttcttttttaaaaaacccttctcattgcttgactcagaaattttttgctttgcctttgacctttctcttaaaaatattatttccttttggtttcgttcttcttttgttcattataaaattcatctaattcggcccagcacacccaaaggcactcataaagatgttgaagacaagggtaatactgattcagctctctctctctctgttttccactaaactcttccttataccttcataaactagggtggacttgcaaaggtaccatgacaagaagtagttagaagaatttgctattaatcactatgttatatcatttctgccaacgtggattaatgggcacattgagagttccaaggtcacattgcctaatgaaattcttgtgttctgtgagagtaatgaaaaccactgggtggacagggagggctgcaaggtgccaaggccaacgatgaaatggataagcaagagtagggtcactaggcttaaggttattgacatttactaactcttaaagttattctaaagctaacgcttttcaaaataaaagaatgactaaaggaagttctctaaatagaaaattataaacaggagaaacttagaatatctagaataaagaacatggtcaagaaaaatattggtaaatacaagaaactttcctcttcctattgagttttctaaattattttttatgggtgaagcaaaaattatatcactgtctgatgtggttctaaatataagtaagggaaatacataagacaattacaagtgaatgagagagagtaaagggatataagggagataagatttctacacttcactcaaacaagtaaaatgatgaaaatagtaaagtatgataagttatttatatataatgcaatactcagaggaccactaaaaaatctacacaaatagatatagtcaagactaccacaggtagagaagaagggcagggcaagatggctgaatagaaggatctactgattgtccctctctacaagaacactaaatttaaacaactatctatacacaaaaagcaactttataaaagccaaaaatcagatgagcactcatagttcctagttttaacttcatatcgctgaaagaggcattgaagagggtaggaaagacagtcttgaattgctgatgccacccttcatcctcccagcagtggccacattgtgcggagagaaaagctatgtgtttgggagagggagagcacagagattgtgagactgtgcattgaactcagtgcttccctgtcacagtataaagcaaagctgggctgaactcagttgacacctgcccacagagggagcatttagatcaggcctagccagaggggaatcacccatcccagttgtcggaacttgagttccatcaagcttcatcactgtgggctaaaatgccttggggctctaaataaacttgaaagtcagtgtaggccacaaggactgcaactcctaggtgatttctagtgctaagctgagctcagagccagtggacttggggaggcacatgacctacggagacaccagctggggcagctaaggaaatggcttgcaccacccttcccccaaccccaggcagcatagctcatggctccaaaagagattccttccttctgcttgaggagaggaaagggaagagtaaagaggactttattttgcatcttggttaccagcttagccacagtaggataggggactggtcagagtcatgagactcacatcccaggccctagctcctggacatttctagacatacgctggacaagaagggaatctactgctttgaagggaaggaaccagtcctagcaggactcattacttgctgacctttgggccccgaataaccatcagtgatgcccagatagtacgccatggacatggaccttgggtaggactctgagatgtgctggctttaggtaagatccagcacattacccgctatggtggcggtggtgagagactctttgcttgagaaaagcaggtggaaaagtaaaggagactttgtattgcaccttaggtaccaattcggccacagggtcaaagcaccaagcaggctcttggaatccaggccttggctcttttatggcatttctggacccgccatgagcagagggtgcccactgccctaaagaatgagttccagaccgggcagcattcaccacaagctgattgaaaaacctttgtgccttaagtgaaccgtggcagtagcctggaagtactcccctgggcctgtggtggtgaaggccagggggcgaggctctcctgcctgtggaaaggggagggaagaatgtgtctagtggtttgagtgccaactaaactgcacaccaagtagatttctaaggattctgactccagtctctggctctcagactacacctctcaacctacccagggcctgggggaactcaccaccctgaagggaaggatacaaacgtggctagatttactaccagctgattatagagccccaaggtcttgagcacacattggtagccaggtagtggttacatcaggccttgagcaagatgcagtactgtgctgatttcaggtctgtcctagtgcagccccagtggtgtagccacagaggaacttgtgtcatcccaccccaagctccaggatgtccagcacagaaaaagagagagggagagagagagagagagaatttgtttgtttgggagaaagtaaaagaagacaacaagagtctctgcctggtaagaaattttctggatcttatccaagaccatcaaggcagtacctctataagtctgtaagaaaccacaatgttactgggcttagggtgctccctaatgcagatacagcttagatcaaaatacccaagtactttcaaacacctagaaaagccttctcaagaaagatgggtacaaacaagctcgggctgcaaagaccaaaataaatacctaacacttcaatgcccatatactgaccgatacctacaagtatcaataccatccaggaaaacatgacctcaccaaatgaactaaataagtcacctgggaacaatactgaagaaagagatatgtgacctgtcaggcagagaattcaaaatagctgttttgacatatagaccaatgaaacagaacagagacctcagaaataatatcgcacatctacaaccatctgatctttgacaaacctgacaacaacaagcaatgggggaaaggatctcctattcaataaatggtgctgggaaaactggctagccatatgcagaaaactgaaagtggactccttccttacaacttatacaaaagttaactcaagatggattaaagacttaaaacccaaaaccataaaacactagaagaaaacctaggcaataccattcaggacataggaatgggcaaagacttcatgatgaaaatgccaaaaggaattgcaacaaaagccaaaactgaccaatgggatctaattaaactaaagagctctgcacagcaaaagaaactatcatcagagttaacaggcaacctatagaatctgacaaaggtcaaatatccagaatctacaaggaacttaaacaaatttacaagaaaaaaacaaataaccccataaaaaagttggcaaaggatatgaagagacacttctccaaagaagacatttatgcagccaacaaacatataaaaagaagctcaacatcactgatcattagagaaatgcaaatcaaaaccacaatgagacaccatctcatgccagtctgaatagtgatcattaaaaagtcaagagacagtagatgctagtgaggctgtggagaaataggaacacttttacaccgttggtgagaatgtaagttagttcaatcattgtggaagacagtgtggtgattcctcaaagatctagaaccagaaataccatttgacccagcaatcccattactaggtatacacccaaaggaatataaatcattctactataaagacacgtgcacacgtatgtttattgcagcactatttacaatagcaaagacatggaaccaacccaaatgcccatcaataatagactggataaagaaaatgtggaacatatgcaccatggaatactatgcaaccataaaaagggatgagatcatgtcctttgcagggacatggatgaagctggaagccatcattctcagcaaactaacataggaacagaaaactaaacactgcatattctcactcataagttggagttgaacaatgagaacacatggacacaggaaggggaacaacacacactagagccaattgggggtggaggggcaagaagagggagtgtattaggacaaatagctaatgcatgcaaggcttaaaacctagaatgatggattgataggtgcagcaaaccaccatggcatacgtacacctgtgtaacaaacctacacattctgtacttatctcccagaacttaaagtaaaaaataaataaataaaatagctattttgagaaaactcaaagaaagtcaagataacacagagaaggaattcagatttctatcggataaagttaacaaagagattgaaataatttaaaacagtcaagcagaaattctggagttgaaaaatgcaattgacttactgaaaatgcatcgaggtcttttaatggcagaattgatcaagcagaagaaagaattagtgagttatttgaaaatacacagtgaatacacaaaactacacacacaaaaagaatttaaaaaatgaaacacaactataagatctagaaaatagcatcaaaagggcaaatctaatagttattggccttaaaaagtaggtagagagagtgatggggtagaaagtttattcaaaggaatcgtaagagggatttcatcaacactggatctgtcccacaagaaatgctgacgggagtactacaatcagaaagaaagggatgttaatgagcagtaagatcatctgaagctacaaaactcatggtaataataagcacatagaacacagactattttaacaatgtaactgtggtgtgtaaactactcttatcttaagtagaaagactaaaaggtgaaccaatcttttttcaagacataggcagcacaataacgtataaatagaaacaataaaaaatttaaaagcagagaatgagtttaaggtgtaaaggttttttcagttttctttttgcttgtttgtttgtgcaaacagtgttaagttgttatcagcttaaaataatcagttataagatagtatttacaagccccagagtaacctcaaatcaacaaacctacaacagttacacaaaagatataaagcaagaaattaaaacataccttcagagaaactaccttcactaaaaggaagacaggaaagaaaatagagaagatcacaaaacaaccagaaaacaaataataaaatggcaggagtaagtctttacttatcaataataacattgaatataaatggcctagactctccaatcaaaagtcatagagtcactgaatggattaaaacaaaacaaaacaacacaaaacaagaccgaatgatctgttgcccacaagaaacacacttaatccataaagatacacatagactgaaaattaagggatagaaaaagatattccatgccaatggaaacaaaaaaaaaaaaagaggaggagtagctatacatgtatcagacaaaatagatttcaagacgaaaactgtaagaagaaacaaggttactatataatgataaaggggttgattcagcaagaggatataacaattttaaatatatatgcacccaacactggagcatccagatatataaagcacatatctttagaactgaagagagagatagat

SEQ ID NO: 11 - DNA, 89506 bp, Mus musculus
atatatatatatatatacacacacacatatatatatgagattctggtccactcctttaagattatacctggtcccagtccctttctttttcccctgctttccattcaccatgaggtgaaggagtcactctgcaccacaaggttctgcccaagtgcttggggccaagccacatactgaacccttccataccatgagcaaaattaatcagcccatcccccaccttaaatttttcagtagtaacttttggggaaataaagcaggcctgttgttttctatctgttctgctaagtacaattaaaaatactgaatgatatatctaaaaaaaattaagactgaaaactggagatagtccagaagactgaacaaaggtcttgggacccaaaggacagtacatggcatcgagttcctgctttgttgctttgttgcctcatttgttccagctgaaggaggaaataatccagaaatgacaacatgcagaaacaaagtccccctaccctcgagccagtagacctagaagggagcaggctagtaaggcgagcacttcgagaaatgagtatcccacagctcctttggtggttccaagagctccacctgtctgtggtggagcatcaaatgctggcaggaatgtgtggcaaagtaaaactgcttatataacaagccagagacttaaaaaaagaagaggaaggcactgtggccccacagtccccttcaaaatatcccctaatgacccatgtatctatcactaggttccacctcttaaagattctagcttttctccaaagtgcaccacctctggggaccaggcctttaacatgtgagcatttctgaagcatgctagacccaatctttagtagacttgaaagcaaaacactgggagaaaacaccacagagctaaagtcaacctgtcctagaatagaatctaagacactttcttcagaaaaagctaatactgtgttgtatttgacaatactttggcaaatttagaatattttggtaaatgtagtttgctttctgttgacctttacttacaggaaagtcttatttttaatattgattcaacacacacacacacacacacacacacacacacacacgcctgcttcatgctaagggaccattcatagaaaaaaaaaaaaagctacatgcttacttactggtagtagccttctccagccatagggaaggacacattggggtcatgtggctggaggtagagccccagttccatcatttaccaattgtataaaattaacttactttttgggagtccctgttttcccactccaagctgaaaacagtagcttttttttttatttaaatatgctttttattttgagattcagaagagatcatatccatgcgtgtgattgtgctataagatgtcgtgtaaacctggatgattttgaactagagtgacaccttgctttctttctgtcttcaaactcttaattcttgtaaggaaggcgcttgtgtgggttgttgaatagctccatgaatgaatacaaaattatctttgctcacatgaatcttacatactattgagataaggataacaagaagcctattgcattcatagttgtattttagaaaccaagtgatgctgtagagaaatcaaacgaagtagagaaggcagaactgaggcctaaggaccgtggaactcagcttctaggtggaaaccgggctgccatcattgcaaagatggtaactgagacttggctcagaagaggtgaaagtggagccctgtgacaactgggggatgagtttgaggcaaagggaactggtctgtgtactgcctctccgatttgagcaaaatccaaaatgcaagtgtgggtagggcagagttgggcaaggaaaggaaaaagaatgaggtcagtaaggctagggtgagggcggagcactgcgggttgtgactatggaactggaactggcccaagtcagagttgtgaagagtggagtaacacaagttgattcacctctcacatcactgaggatcggacccttctttagaaagagaaagagatagagatgggggcagagaccaaagcagaggaacaattaagctctcatagcaactcaggctagagatggtagtgacttgtgtaacactagtggaactggacacatggagaagggttcagatttggagtatatattaaaggaaaatcaacataattccagactgactgattatggaatattgaaaaaaatagaaggatataaggtaactctgtgttgacaactagaaaatcagagctactagtgtagaaggaggtgctgacattaaggtcttgttccctgattggttcttgattttgtcaataaagaagagtgggagccaattgctggatgaaaggtacaggtaggccttctgggtccctgggagaaaaggcagaagcagggaaagacaggagtttttcctgccatgccttggaggaatagggatgctgcaatcatgtaaggccttggggacagctagggacagctgcctccactacaggcaggtgaccaaggatatggaggagagatgggataatgaattaatgaggatacacattctaggcaggagattctgcgctcagcaattgtgcctagccagcaagttttaaaataatagaactatctgtgtgttttttatcctcggattcaaaggtctctggtggaactggtaatttgacccctcctggagaaagggtcttgggaatgggctggtggaacagtcaactcctggaacaaggcaagtagagaaagaagccgggtcagtgctggtggcttgatggagctagggtctcaggagggtttggtagcacaatcgcagctcctgggcaaaggtggtagcataaaagaaaaaataaattacacacaacataccagccaaggaggaggggcctgttggaggggtcagcttgaaggacagatcaggagtcaagtgagcatattagacttgagatggcaccaaacattcaatacaaccattcagtatgccttgaaaataaaaagtaggatttgggaaagagatctaatatagaaataaaactgagaaactgttggatatgaatgatatttaaagctgtgagactgagatgacaaaaaaaaaatgtaagaatggtgagactgaaacaccaagaagtgagctttggagcacctcatgtaacttaagaattaacaaaaggccgcctccaccactccatcccgtacctagacatcccccatcctcctccacaagctggcctggtgagtacccctaccatccaatcttcacttacccacaggttgtcatacctgaatcaggtcccaccgcccgtgccccagtctacactggccacctatgccttggcactccaaggttgcactccctgtgctccagcagaggtggctacagaaaaccacacgcattcagaatgcagagttgtggagtccagtcccaatggatacactacaagacactcctgtacctaaggctcagaggactttgctgaagtggaggcagaaagactgtaaaagtcagaggatcatgaaatttgctatgagattgtgtctccttgtaacatcagacaatacacataaagtctcaccaacattctgcccaaaggtgagcttgccaaagtagacagagaaaagcccatgagctctcaacactacaccaagaactacaggcaaccaaggaaagctggagatgggagcacaccaatggattttccagtaccaaatggtcactcctgaagacatacatgcattatatggattgaaaaattgtatttagaaatatatatgtttatacatatatgcatgcaatagcaattagtgaaaagtcatgatttttaaggagagaggggagaggtataggagaggggtgaaagggaagggagaaatgtcgtaatcattataatctcaaaaataaaacaaaatgaaaacttgtcaaaagagaagccatcagagaagactgagaaagcaagacaaggaaagcactggataatacaagatatgggtggcatcccaaaatcaggaaagtgaatcaggaaggaaacatgatcaagttatcaaatacttaaatttctcaagttaaaacgaggactaaggtagtggttctcaatcttcctaatgctatgaccttttagtacaattcctaatgttgtattgacccccccaaccataaaattattttgttgcaactttgtaactacaattttgctgccattatgaatcataatataaatatatgatatacaggatatctgtgtgcaacactgaaaggggttgtaacccacaggttgagaaccactggacttaggcctttcgatttagcaacgtggaggttatctgtggccctgatgagagcagtttcattggtgttaaaggaccaaattcctgtttagattggatctaagaaaaaacaaagggacaggcaacagaggtgactggcacatctctttcaagaagtctaccttcaaagtagaaaaaactgtcacagcagcttgtgagggaagagggccaggagtctttcaggaaggaagaagtatgggtgtgtgtatgttaggagaaatggggtgcagggatgaaaagagaagatagatactccatggcataggaccaccttaagaaaatgagagggagggactgtggggtgcagacatgcagaggaatacagatgtgctgcacacatcttcttgattgctgtagttgcatgatgagctttcatctctagtgggccaagatcccaaacaacatagaagttttcaaactaaaagtgaaatgaattgtcagagggaaaaggctgagaaaaattcatcatcaacttttctttaacatactaaagagtgtgtttttaagctggaaagaatactacccaagacagcaaaagtagaccaagtgtggctgcattggcctgaggaaaatggcccaagacagtagtgctgaagtataaagaaatcaaaagaaagattttatatatatatgtgtgtgtgtgtgtgtgtgtgtgtgtgtgtgtgtgtgtgtgtgtgtgaactcacgatgtgatgacattccaagagccatgaatacatagataagatgtgaggtaactttgtcaaagttgggggtggagtaagtgaggctgagagttccagactccacatattatcctggaagaagaaagcacaatggttagtcaaaggtgactgctgtaatcctgatggaggcactcactactatattaaagagtagaaatgaaagcattaataaaaaagaacatttatctaaaagagatcaaaaattcttatagaaaaggaaaattcccacaggacaaatagaaacaggaagacagcagattcttccagcttgccttacactcggcatcattatagcttaaatgcagtaaatgctcacgttctagctggaggcacttataagacaggggtgttcttgttattatacgcatgcagaaggaattcctgaattaagtatgattcagataaactggtgctcaccataatcctaaaagacaccttcttgaacaccaatagccctaacccctccaaaaccaggatcccgagagattaaaacccaaatgttaaattcctgaaagtcaaaagttcttttttgttgttgttgttttaaacttctgctattttatttgttgtcatttgaatttcagcattattcttggttcttggttttgggcttttgtttgtttgtttttgtttatttggggcaggaggttcaaaacagggtttccctgtgtagccctggctgtcttcttcagcaaatggacttctcctccttaaatacctacatttgtaaaagataaaatttctcaggaccttgactccttgggtgagctccatactcagtagtgacccagcaagatttgtgactaatagtatcagaagacttatgctgtttgtcacagtatttcaaaagtttactttctaaattatttttaagttgtgtacctgtgtgtgcctgtgtgtaggtaggagatataagtgtaggtgcccatgaagaccagaggtgttggacctccctggacctgagctacaggctcaggtgtgctgcccagtataggttatgggaaccagactcagcttttctgtaagagcaacatgtactctttacagccgaggcatctccccagtttcttgttactacagttcagatggccacagtgatataattgagtgctcacctcagccagctatgttgtatatctttatacaactcatatttgactgatttctattatacttttgagaatttcatatatgtatataatcaaacacaatcacttctactcccatttccctcttctaccttcctccatgtcccccaagcattctttcaagtggtggcacacgcctttaatcccagcactcgggaggcagaggcagacggatttctgagttcgaggccagcctggtctacaaagtgagctccaggacagccagggctatacagagaaaccctgtctcgaaaaaaaaaataatattgtattccattaaagtcaagttagtactgtccatatgtgcatgggtatgaaactacccactgaaacatgggaaacctgctaatagctacatcttcaaaaatgatcatccttctcccagcaactatccactgccaataatagctcctcagcaaggggcagggcctagagatcatcttgcccatttatgctggaaatttgggctgacttgattttgtgtagtttgtgtgcaggtgaccactgctgtgaatttatgagtacaatagccatgcaaagtccaaaagacaacatttcacggcattcttctcctcctctcagtctaatattctttctgcttcctcttctgtgatggttttgagccttgtatggtgcagtgtttgtgtgcatgccctatttggggctgagtactcagtttcttaatctcagttctttggccaattatgtatcagtccattgactgctttacatccccaaaacaagctactctgaccaaggtagtgagcatccaagatctgtggataaacattcagaaggcaatttgacaccttgaccatttagatagaaaaaaaatagtggtttctaccctataacctatgatctctccaaccataggcttttaatcaggattacagcctgaggcatgaaatgtcctcctgggtaacaggcctcaaattcaacctgaaaacagttctccaaaacagtcaagccactatcgcaccagtgagcacatcttgcccatcaagtctgtgttgtagcacacaggatccaatgctaggtaggaccatctatttcttttctctcctagcagcctgcatagcacctctgacactgtaagaactagccagcaaggagagcatttccagaaagatttgagattgatttctctatttcctgaaaccaaagtatgtgatatcttcatcagtagggtcttacaatatagttgtggtaaatgactgtcttaggatttcctttgctattaagagacaccatgaccaaggcaacttttataaaggtaaacatttagttgatgccaacttacaggttcagagattcagtccattataataatggtgggaagcatgcaggctgacttggtgctggaagaggcaagagttctacatcttgatgcaaaggcagccaggaggaggatctcttctgcactgagtggagcttgagcactagaaaccctccaaggcccacctacacagtgacactcttcctccaacaaggccatatctcctccaaccaggccacatctcctaatattcaaaccatcacaataaccaagggcaatcaaggacactagttttgttttttggtttttggtttttttttttttgtttgtttcctgggtttttgttgttgttgttgttgttttgttttgttttgttttgtttacctctgggacatccctggccaataactcataggagatatccttttatcctttgacttatcatgtgattttcacctaataacccctattctgggagtaacattctcaatccatgaatgttattccttgaactctttatagaaactttattttgaaatttttaagtaatgggtttctataagactttcatagacctttgattctggctaaccaatcatgatatggcttctatatggcttatcatattcctttcctttgaagtagctacccacccctgttttattcctagattttccccaaaacacaccatgaccttccttggttaagtcttttggctcccagtattccacctctcttgacatgactccaaaagtcccattctacacttgcttatacttagattccaggttaaaaatacaaaccaaagatctgaagctaggatctacgtatgagtaagaacatgtagtattggtctttctaggtcttagtttcctgtcttagtttttctagttctgtttatttgcaaatttcatttttctttatagatgagtaatattacattctgtacatgtacagtgtttttcttatctatttttctgttgatgggcattattttaggttggtttcttttttcaacttgacacaagctagaatcatttgggaagaagaactctaatttgagaaaatgcctacataaggtatgtctgtaggcatggtaggacccatggttctagccacatatgtagcagaggatggccttgtagggcatcaatgggaggagtggcccttggtcctgtgaaggcttgatgccccggtataggggaatgctagggcggtgaggcaggagtgagtgggtgggtgaggggaacaccctcatagaatcagggggtggggtggggagaggatgggggcttgagaggggaaactgggaaagggtataacatttgaaatgtaaataaagaaaatatccaataaaaaaaggagctaaagatatacaccacaggtgcaaagacatgagataaaatagtgactgagtttatctatacaaaactacaaggaaaacttagttatgttttttaactctccatgaatctgtaagctagtaacaaatgatgaatgttcagccagataattaattctagggtatattcatatatgaattctctgttataaatctctttttcaatttatgacctaaatgtatgtgcaaacttgtaattaactttttaccatgtgaacacagtctctttattttttattttattattttatttttaatttgttttttagttttactttaaaaattttttattagatattctctttatttacatttaaaatgctatctcctttcctagtttcctctctgaaagtctcctataccttcccccagccctgctcctcaacccacccactcctgcttcctggccctggaattcccctgtactggggcatatgatcttcataagaccaaggcttttcctcctattgatggccaactatgccattctctcctacatatgcaactagagacacaagcttgggggtggggggtactggttagttcatattgttcctcctcctatagggttgcagatccctttagctccttgggtactttctctagctccttcattgggggccctgtggtgaatacaatctcttaagttgttgtacagtgctgagagcagagacaggtctccctccagttttcttccctagactttaactcaaagctgagagtctcttgcagagatagaacaaaaggcttctttacctagcctcccacagtttttactatgaggtactaaactgcagcttctagcctcagagaaactcagacaggcagatcagctgcaggattgatagcaaattgtttatggcctagtttctgagtggagacaaaatggaataaaaaggactcttcaaggtatattttaaatagttttaatttttttctataatagtgctactgggattttagatggtacagcttttcatcttgggcaaatatataagtgtagctatggagatgtgacctctccttccctgtagacactgtgggcctacctctaacttttgtgctcatgcagagaacctcttgcaaggacaaccttgtgggttggatcagacagtcagaaaaagtaacccacttcactccttccaggtttttgttcatttatgtttaattcagactcttctcattccttcatgagtcttgattccactccctcaggctgtcttatattagagattggcaggcatatgtcatcccttagacactactgaattctgtaatgtcccccagttacctaaaactcccctcttgaacttagcaattctaactgctttcacctccgtagttgctttagcctcgggataccatacaataataatctgaacacctggtaaactggtgaaggaaaggccttctgttccatcaagacaacttcttgtggttggggtagactggaaattgagcccaaatatgtaactacattcatgtctatctcatagttgcaatcagctccccctatgtgaagagccagatggagatgcccaggacactcagctggatgtatctgcacgctcttccctactctcccgcccatctcttctaagcttttaaccatgacagtagttgtcatttagtaagtgtggaggacactttatactcattgtttccaaccttactagatcccctattttaatggatgttgagactgaattgagatttaaataacccatccaaagccagagcaccggtaaacggcagagcagagctgccttcagggtctgtgtgacaactcttctactcttcatactttaaggttgtctggaaagcagttagacagctattgtgcaaatgccacacagaacaaggctcagccgcaaattcagccactggactaggagaaaagcaagccacatattatacaggtgctatgttttaaaagcaacactaagtactttcacagtaacctaataaggaagacagactcttaagaaactgaagcccagagaaataagcagtgcccacagccacacactgacctgtgaagctcttaagtatgaaacttgcttgcttgaagctcagaaggtgtcgctttattatctgatttagcgccttcgttttgggaagagtggagaaatcgatgagaactcacaaggaagccatattcacataggccctaagagtaagacgatttggcatggagggattagagtaggaaatcagaacagccacagtcaataggctttgcatcggtgccagtctgaaagatgcagcgttgggaatggagatgttacttagcttctctgaacaccgatgtcttcacttttgtgaaaaccaaaccaaaagtacgtgcttttttctctcattttatttattttctgcacgtggtttgatgtataggagtgcacatgttccatgatgcatgtatgaaaatcagagaacaatttgagagaccattgtctccttccactatgtctgtagcagagatcaaattcaaattgtgaagcttggaagctagctgccttgtctggtctcagtgggagaggattcacctattcctgcagagacttgacaagacagggtaagggggattggggaagagactgtgtgaggcgggtaccgagagagggggcagagatcaggatgtaaaatgaataatattttttaagtgtgtgcttttaataggggaatccttttcagcccccaagttctgtgtctctatgtgccctcccccgtgtgggacaccagcgatattcctcatctccaaggagtttaagctgacgattctgggctggacctgcttaatcttcagcatctggggtgttagttgcaatttggtgccatatagactcgagccgaggatgcataagtggcgacctcgctacttaacttcctattgggatctcagagcgcctggttgttgaactggtggaaattacttccccagtgtgttctaaaagaaaactcagcatgggggaggtgtggcagtcacttttaggggcccgtagcctgccagaggaggcatcgagcaggcttatcggctgcagctggtgctgcgttgcgggctgctggcagctcgcccgggtgggcggccgcggagacgcgcgcccctggcggcgagggcgacacgctggtggcgctggggcctgcagagcctgcggggcttgcgggagctctcctgcgggcccgggccctcgcccccgccgcagcgggaggcgtcgccggcgccgggtgcgtgtgggaggcggggacgagccgcggcgagcaaagtccaggtctgcgcgccacccgctgcggccaacacgcgcgtgaagttcaggtgagggaggacgcggcgggagaaagggaccgagggaaggcagttgcggtgggacctgccggggagcggctgccaccagtgcccccggctctgcgccggctctgcgcggagcctggaggtccccctctccaggcagctgagccgggtgcacttggacctgaggctgtggtttctccccaggctgagatggatcttgaggcagcgagaaacggaacagcacggcgcctggacggcgactttgaactaggcagcatcaggtatacaggaccgcagagtcactggcttttccgttatagcggagtcctgaaaagaagttgtgagaaccggttgatgcctccggcctttgggatgaagtctttaagtgttcttgaggactgtctcccaggctccttttggaacaggttcagagagaagaggctgtcttcaaaagcgcccccctcccctggacacgggtgatttgatgaatattggcgttgtgtaacattcactgtatttttataaagtaaacgtttcactctttttagccatcatctggctactcgagttggtagaacttcagacacctgctattgatggctgtacttctgaacaagggtagcgaagcaaggcccccctcttcctgtgtttctcttctttgcctcgtcttccccttctcccatctgtagactgtttgccctatttctcctctctagggggtgacatggagaacaacctcattcttcactaacttctgcttcgaaatcagtttttttcccccagttgcaagagggtgaacctcgacgcttcccctgccagtgggtctgtctttctccctgactctcgttctcccccagccacagtgaagcacacatacggctttctgtcaggcagaagggcctaggcaagtgtgtgcgtgtttcctctttcgctgtggggacagtgaatcatttttaccctcagcttcaaatagtttatgaggctattacagtctctgagttcatgctaggccacccggaacaaactgacatgtgtcatgaagttgtcttctagagggagaaaatttatcagcttctgtagttggttctcaagctgcaaggggcctgattagccaactgacaaatatgcctatctgaatcttaaactgaagcattgcttctgttaattgctttggaccgtggcatcgccctactcattcttagaatcgtgacatttattcacagaaaatttaggtttgtccatatcgagtcataaaaaagcaaaaacaaaaacaaacaaacaaacaaacaaaccccaaatgtatggatggtgttacttctaatagaaaaatgtggttttgtcatctggcaatttaggctggggatgactgtgactctattaatagatggcattttcacgaagacggctatttatgtattatactggctgagcacactgactagtattagaaggagcagtccctggaaaaggtgtagtaacactcagggcccaggaagctctcagaagaagctcacagcatgtggttaggaagaaggaaacacctcaaaaccgaaatacacaaagttagaactagcttgatattgtaagattacaaaatgaaatatgggactaatttttatataataataccaagggcggtaccttcaaggaaagctaagcccacttctgttaggcacaacaaactgaggagggctaatatacctgttctagatatgctgcatagcctgtggcacattctcttgtatatattcagtggcaaatgtccatctgttgaaaggtaccaagtgtgaagaaaattaatgaagactgagaaaattaggagaacatagcagaagtgtctatccattttaaggagggtggttagggtaggtcttatttttaagtcaattactgagaaaggggaaataagcagaaagaaccatgggtatttggggagcattttctggcagcaacaatttagagctaaatgatcctgaggtccggactgtatttgttgcattcacaaagtagcagagaaaccaggtctgcctatctgagcagctgggagcgggggatggtgtcatgatggtaccctcagagagtgtggactgagtagccaatataaaggttttgatttcactctgagaagaaatggagccattgctatttcctgagtagagaagtagcctgagttcttaagtaattatattggctacagtttccagtacactaaagcaaatgtaaatagaagttaagtgggactattctaatgggaatgtagcaagaaaaatggggggggggggaagtaacagaatcttagatgtatcttgaatccagaaaaacagtatttcctaaaaccactccccatataatccagaaaagcagtctccctatagaacaactcgtacttttcttagaaaaagaacaatttaggtgatttggtaacattattactttatgcatctcctcactgtagactgtgaggctggcagtcttgaccctttctcctgtatccagatgtccttgtagtaccttggacagttacctttgtacttgatggctgccttgcagcatgcttgaagctggataattttgacaatggttgtcttcttgtatttaaaaatgttgtgagtcaaaaccatagctgctaaagtttattttcaatttattgctcataacagttttaaatttgaacaattatattttacagcaaccaaggcagagaaaagaagaagaaagtgaatttaattggcctgttgacactggtaagttgtgaaatactaagtgctaagaatcctgcccttcattcaaatttggagacttgagtcaatagccagccagccagtgctttaagtctgtctgtctgtcttagcagcactggattgcctctgttgcacttgtgcctatggtttgcctaattgtaaacgatggctttaagtcacaagacagacgatgaaggggttggggtacgctggcttcgagctcactactctcagggaggttaaaaagaagaagcatttcagaaatgccatggaaacatctcgattcataaaacctgtcactaaccccacccccacccctgcccagcaaaacaacatttaaaacaaaaaatccacacatacaactagcttactaggaaatcaatgaacctcaactcaatgatcacatattctgattctgttccaggccattcccagggttttccaagggtacaaggcaagcctacatgtttttggggtttgtttgtttgtttgtttgtttttgtttttgtttttgttttgtcttgttttgttttgaagaaatcaaatgtgttttcatttgtaatgtgtctcagagaggcaggtcaggaaagtgcttgctttgaaaaaagtgatgtgtttcaagcagacagtctttgacaaaaaaaaaaaaagggagggagggagggaaggagagagagagagagagagagagagagagagagagagagagagagagagaggtgtatatcaattgaagccatcaagttagaaagcaaatgcaggaagggcatccaaacacttggcacacaacaacttagttctccgttggtctaaggctctgctcacactcttcctgtactctttgtttttgctttaaaaagtttcagtgagagccattttttgttcagtttttattgtgtatttatgttgtattgatttacaatagacagtggaccaagatctgaacatgttgtgtggccgatgtgtgtgagtacaggtgtacagtgccacaggacatgggtggaagtcaagtgacaattatttgggaatctgttctcttcttttaaaccttttggttccaggcattgatctcaggttgtcagtgttgaaggacaaatgcttttccatactgagctatctctccagcctagaaaaagaattttatttatatgtgtaattttagtgtcagtttagaatctgtttcctacagaaaaaaagagaaatatatattaaaaagtagaataattgatattttgtttgcatttaataagtttagttgacactgaatttaaatttaatcatcaccttttatctgagtagatgtctgtgtagaaaaacctcagaacaaagctgctgtaataggactagagatgtcttgttttgttgaaaagggtcactaaaaactaatctagatttacgtaggaatgtatcctaactttaaatttgatcttagaaacttaaatttaattcgaccaacatggaaagcattagaaactttttcagtgtcatataatgtccactaaaaagaaacgccgcagggaaatctgactgtgtgccctgaaaggatgttgaacgacccagatgttctaactcccttcgtttagaagccaccaacagtggaccttgaagacactagtcccttgtagccattaggatacctttgcattcagtctctgtgtttgtcgttgcctttgattttttctgagttcctcctggttctcatccttcctctctttttgtcttcttgctttgtcctgtgtgcttgagtggaatctgcccctgctgcccttggccccagatgaactctaaaacccttggaaaacagtttgcacacatgcccagggcctgctatgcgctcccaacctcagcctcactgggcagtgtgaatcagtcaaagacgccacccactccaccatcctgactcattgtatactcttcaaataacctcttgtctccaaaggggagatttggggggaagtaaacagagtataaagtttaaaaggagaggagacatgcaagggatggagaggaagctggaaagggaaatgtaacaacaaagctgtagtctagaagacaggaaaaagagcaaagggaaatccacagaggaacccatcaaaattgttgagcaaaaggtgtaaattggagaagattaaaaggacagtgaatttctgtcttctgaagaggtatttgtttagtaagtaggagttgtatattttgctataataattggtagccaccctgctgagcactaaacccaaaagttttgatagtttctgcttacctataatgtgatcctgctgtgctctgtgcagtcctaagccagctttctttgcaagcttaaaatcccaacttcctctacattccctgttcttttccagttgattctctttcatttttcaaggtttttcataatcaagacttccataaagctcacagatacttcataaagttccttttcttttctttttttttctttttttttctttttttctcttctgtactgaactgcttttaaaggcttttaaaggctaatttcaccctttcagagggatctggcttccagctgagatctgtttgttcctggtttactttctaggtttctgcacatgcacgtctctgaaggatgcacccgttcatgtgaacttaatgttggttcccagctcaccttaactcactacacacaacctctgggagattaaacagtatttctacatggatccaaatctttgttgccttgattacattgtaataattagccccagttaaatgctaattaagtagaattagattgatttctttttatatacataaaatcatgaaattaagcttacagttatctggattgcaattcatatattctctcagataaacacatttgtcactgtgatactagaactaacttgaaacaaaaatccccaacgaacaaattattaaatgaaatcttattttattttctcttttcagttccgatactctgactggcaggataaattgtttatgttcctgggcaccctcatggccatagctcatggatcaggtcttcccctcatgatgatagtctttggagaaatgacagataagtttgtagataatactgggaacttttccttgccaggtaattgtttctttgcctcttaaaaaatacattatattaacctaactgggtgaaaggtattaggaactagttttaatttacgtcatctgtttgtttattgatttagacatccaggtgaccctaaataccacaaggggagttgtgaaatttttataacatttaagtgctcatttaaatctcaaaaagtacattgtgtttaaaacaagaagaaaactttgcagctaaataaagtgggactctagtatctcatgcagtgtctgtcctctgtggtcacagaagcaactgttttgaaacagttcaggtggcacagcggtgcttcttggacatggtaacttttgtaggcttctgtctgggtttcatttttttctctcttgcccactctcatcttcaaaatgtctactttttatgtttgatgttttggactaacaagagtaactagaattgaatgtgacactttactaaatatcaacgacctcagtaaaggtttaaagtaatggagtcacatgagctcatgtcaccgcaaaaaagtcactgcaaaaaagggcacaccagtaccattgtggtaaggagcagatggccacacttgtcttcatagtaattaaatttaatctagaaatatttccatgtcttttgtttttgtttttggtttattgtttattgttatacagggtttctctatatagccctgtctgtcctggaattcactttgtagaccaggctggcctcgaactcagaaattcgcctgcctctgcctcctaagagctgggattaaaggcgtgcaccaccacgcccagcaatattcccatgtcttatcccaagaccaaaggctttgttcttccaagagacaataagggtctagggtggaaaaaaaaatcaaaatgaagctgtaacagtacataggcaatagaataaaaaataataaaggaaggcaaatttcattacaaatgtaactgagtaaagtacactcatcacttagatatcattctacatacattagcatagatcgctggttgagaactacatatttagtggccattagaaggcatatatgcaattatctaaagataacgtggttgcttgatcattacagaaaatgtgtttacattaatggtgataaatataatgcctttcagaagtccagtgaaactgttcatagtatgctacttgagttatgacagacttccaacccaggtctttctatcatctcagctataatcaggaccatgatattttttccaggataaataactatgcttttctatgaaaaaaaaatctgtttcagatgaatttggatttctgatgctttgctggtgaccttaacagaaatgctataaagataagttgaaataggacaagatagttttaatggactggataaatggagataggacaaggtcattaatagggtctggaaagatggctcagcagtgaagagcattggctgttctacaggacctggattcaaacctcagaacatacatggcagcttgccagaggcctccaggggcactgtatatttgtgttgcatagacatacatatgcagacaaaacacctaagtacattaaataaaaataaatctttatttaaaaaaaaagttgagactgacgtggtggagcatgcctttagccccagtacttcagaggcagaggcaggtggatctctgtgagtttgtgatcagcctggtctacataactgactccaagacagcttggattatatagagagacctgtctcaaaacaaacaaaaaagcaagcaaacaatcagatacataaataaagaaaataataaaaatatttaagaaagtgtaagaggtagacattttgtattgatctgttacatttacatcttaactttacatttgttgcatattaattttacatacacacacacacacacacacacacacgtgtggtacccatagtagaaaacaccaaccaaaaactgacttcttctagggtttaaaaaaaaaatcagattcatatagtgaaaaaattgaaaaggatattactctgcctttaagagagaaaattgttgatgcaggatataggatgaatgtacttagaggacaatgaggacattatgctaagctagagtagcgggtaaatgatggcttctgcatgaaccatcaacttatgtggattatctcgaacagttaaattcatagaaacaagaattcaaatggtacttacaaggggctagggagagggacctagggagctattgtggaattggcacaggggttttcttctttagagtaaaaacaactcagaaagattggttggacaaaaaatgagtatatttaccactattaaactgtagagctaaaactatcgagatggtacatttcattctacatgtatttttattttaatcagcttaaaacaattgaatttatttattatgaatgaatttgcctctggaccaagtatgagagccttgttcttttcacttttgggttttttgttgttgttgttgttgtttgtttgttttgtttttctagaataactcaatgacttgcttctttgaagcagtttacttgttttgtacttgtaactaatgatgcaattccatggctttgaagctgaacgaggcaggcaggcactttgtgctaagggacaagttcaaggtctctctagggaaactgtccaagcaagagattactggggtggtagactcaagagagttaacaactctgtcacggtaccctcgattataaatgcagaggttttgacccttgcctcgctgaaaccacacggtcaggggccatattgccagtcatggaggatttgctatgggaagccaaatgaatttctcacgagtaattcattcttctgtagtttgtggaagtaatagtctcataccacattctctttggagaaaaatgaagtcatcaatgaactcactccaattttagagtattcactgttatgtttggcaaagtagaattgagctgaaaagtcactggggttgtgtacttagctgaagtcatagctcatcaaatagagctttgttttgctttgttttttagtatgttatttagaatgggtggattcttgggcaagtagacttcatggaagccaagtaagatggaattttagaggggaaaaggtttaaattacaagaggctctgacaatgacttactgtgaacagaatccatccttgtcagcggagtgaagctacttcatgacaggattgctctctcacaatgatttggttgtgcacaaaccgtgaacaaagattatttccatccaaaaccttaagaacagagtcatagaaaacagttcatctgcagagtatcaaagagttggttattgctttagacaactctgtgtgactacaataatctagaaaattctttaagaagattgctgcagtttctatgttcttgtgttgtttcatgatagaccagataaagtgtgccagagctctgagttacattaactggccataacacccaagctgcctgaataaacaccatttgttttgatgttggacaattctgtataaagagggattcctaagcagactctagaaaagtgggtgccaacttacttggagagtctaatgtggtagtctaaatactttctctattcctcaatatctccttattaatcagatcctactctcagtagctgggtaagcatgaccaaattgctaaaccagtgtagtgttactattttaaaatagcgtttgaatgatgatcatggattgagtgatggaatcatattggttacttatgaaaagatgtgacaaatgttcagaggatgtgtggggagtagtcaagagtatggaaataacacaaccagtctaattttgtttcaccatctaacagaggtgaattttactgaatttttctacgatgaaaatgcagctttaagtgttcctcattttcatgttatggacaagatccggttaacggtctccatcctgtcccagtagaatcaactgaaacattctaagtcagtgaaatggactggtgtattgggtttgggtaagattggcaaagtattttattttcagagttcccaataactttttaaagaccaaactacatgatcaactgggactataagacacagatttaagtagcatctgacaacgctgggtccaggctctttgcaaacttccaatcccttgactcttcctggagccctctgtacacgtttgtctgatggtgtcccagcaccagggacactggaccacctggcagccctgaggagaggttctcacccagaattatattgcccttcttgacctgggactcatgggaagaagtaggtaggatctgaaatgctcatagattcatattttcaggagtgaacagggagcgggagacagggggtagagtgttcaatgtgttttgttatcctcgtggagagatttaaaaggtagggattggaactgataaaaatgtaagatttcacctaatgtctaaattcaagagaaatgcctagtgatttccacaaattccacagcatcaggacagcttagctgtctctcaatccagatatagtcctatcctccatgtttaaatactaggaaggaaaagggcccacagaactaagtagaagagaaataaaatgaggggattcctcagagtcgacagctaagcaaaagcctttcacattagtagggaaaaaacccacaataataggcactgcactctgactgcactctcggcaattgaccctgatgctgtttaagtttaaaataaatttcaacctttcatcttccttttgagaaagctaagaagggaacacagctacacagcagcaagaaaacatgacccctgggccatttgcccaggattgaaggataaagaaagagcacttcttctctgaggactgcggagaacggaaagcgcctgccttctccttgctcaataatgcttcacggacattttatccagttatttcacagatgtgaatagacaatgcttacttttccccttcattgtgtgtgtgtgtgtgtgtgtttttaagtggaaataactcatcaccacacagatcaatgaggcagagagtaagctgagagcaaaggccacactgccggggcttacagcatatttgctatttgctagcagtgtggctttagacaggtctgtttctctcttgcttcgctttccttttccataaagtaaaaccttttgagatagtcttacctcctattgttgttatgaaaattaaacaaatgcatatgaagtgttcagaacagagcctggcattgaacaaatattcaatgaatagcagttgacatttaagtgtgacagctaagaaagtcttgcttaaaaatttttttcaatttttttattaggtatttttcttcatttacatttcaaatgctatcctgaaagtcccccataccctccccccctcctacccacccactcccacttcttggtcctggtgttcccctggacttaggcatataaagtttgcaagaccaatgggcctctctttccactgatggccaactaggccatcttctgatacatatgcagctagagtcaagagctccgtggtactggttagttcataatgttgttccacctatagggttgcaggtccctttagctccttgggtactttctctagctcctccattgggggccctgtgacattttttttttttaaatcacattagctcacaataattagcatggttcttttcagttaatgctgcggaacacacacacactcagtgctcttaataagcaagatgcactgtaggacttgagtagttagcagagatcctgtgacttatttctaagctacgcagttggaattttcttctttcccaatgggagaaatctggcctttcgcttacttctgtcgtagggaagcatggaaggaaaggatacaagtaaaaaattccataagcaagtcttttaaatcactaataaaatagcagtgtccaccaaatctgatagtctccatcccaacttctgcctttggtgtgcacctctgggtctccacctttggtcgtccattccacgctaccttaggaagctgctctaccacagagtgtgtggatagggtaggaccggagcgtgtcccgccccccccacccagctggaccgacacacttgcaactgtgtttcagtgaacttaaaagtacccttgggtataaaatttttccttgagaaactcctacatattgctcacattcttaacagattgattttttttttaaatccagcaattcctattagtagtccctctttttaaaaatgacttcttttgtttttatttagtgaatttttcattgtcaatgctaaatccaggaagaattttggaagaagaaatgactaggtaatttgtgtttatgtatatattgtccactaacttttaacattccatttaaaaatgatctcatactacagagttgtgagaatatacaaaacacccaatgtctttctccagtgccacctcctcttatcatttgtggcccagcccccagtttcaagaaagttgctttctttatggcctttcacttgcatatgattcctagcagcagatatatatgtatatgtatacgtatatatgtgtgtatatatacacacacacatatatatatatacacacacatatatacatatatgtatatatatgtatatagtaattattgctttaataaaattaataaaagttgtttactatcttcattcccatttgtcactttgatttcagcacatcgatggcatccacagcctgtccagtcttcctgacagaaacctcagaatcctgtagcgcagggattgtatatggctgcacttttatcgctcttactgactaaacagggctttgtgcacactaaagcagaccacagaggctaactgaaaatagtttgtaagagtagattagaaatagattttggacaccatctcctcaattagatgcacttctgttccaaatctatttgaatttattaggtttttagaaaattaatttgaaaagtttgagccttccaaataagatggttttttaaattaaaaacatggagaactttacacacagaaccattttacatgttttgtatgtttactgctgtttgccgtgtggtagtagtagagacactttcgctgtattcaagcccaggctacagttatgaaaattgtcaccaatttaaaacaagccacctgacactgtttttatgcagtcaaccacaactgtttgtgtttgcattgtaccatgtttcaggcaacaggttttctgtcacacagcagtcatcctgccacttaagaagagagaaaaatggatgcatatttgtgataatgtcctctatgtttatgatctgtttagaaaattgaactgatttccaattctgaactttctccccaaaagcctgtctagctagcatgtctgatgtcttagcccagtctcggtctgggctacaggatgagttcaaggcagtcctgagctacacaaagagaccctgtctcaaaacaaaaccaagagatgaaagtaccttcccaattattttccagatatgcatactactattcgggactaggtggtggagttcttgtggctgcctatatccaagtctcattctggactttggcagctggccgacaaataaagaaaatcaggcaaaaattttttcatgccatcctccgacaagaaatgggctggtttgacatcaagggcaccactgaactcaacacacgtctaacagagtacgtatgttgataatgtcacactttgatgaggaaatgaagcactgtatgaaaatcgacaagggaatagagctttgaagcaacattaaattactactttaagcattagacatgaattgagcatatctctggtagtcatttctagaagtctctatagcttatgccacatgttttccatttatattagtgtctctatctctctctgtctctttgtctctgtgtctctctctgtctctctgtctctgtgtctctctgtgtctctctgtgtctctctgtgtctctctgtgtctctctgtgtctctctctttctctctcttctctctccctctctctctctctctctctctctctctctccttccctccctccctccctccctccctccctccttccctctcattatttgaggaccaaatgcatgttttgtgtccagttatcttttatggagcttgctgcaggcctgacaggtgctagaccccaagtagagatggttgaatggctgaacaaatggttgctttagttgcaaaaagacttgctttataagtgttgatgctttgcttactaactgaatactaagggtctgttacaagctgagtgtcttcctggaagcttcctatgagcaagcagagcaagcagctctgtcttcttggtgttctgttccagtaggggaagatgggtgacatagctttgtcattcgggcacatgagtagaggaggtcagaacaggagagaagacgaaggcaatcaggatctccatgccctactgaaagcttcagctttcactcggaaagaaatggcagccatgggaaatcgtgagctgtggtagctaacatcgtaggacttcctttctttagatgatcacattacagtcacaccagtagtaagaatgcaaacaagggtataggttgaatatttgagacacttagaaccaggagttggttctgatgtatagactttttggattgtgacatattaccagtggagtactcttaaatgggaaaatctgaatttcatttttttttttagcatcagcacagtgttcatagaaagcttcatactggctgtggtggcccagagttccaacgccagcattccagggggctgagttatagaatactgagagaacagttaaaggttcaaagcaagcctgggctatatagaaagaccttgtctcaacaagaggaaaggggagggaaaagaaaggagggaagggaggagggagtgagggcaggcatgagggagggcaggagaaagaattacatatatgatgcatatgtagatgaatatatgatacaggtatatgatgtgtatgtatacgtgaatgtatattctggataagtggtgttcagttaagaaggggactatttttttgcctgtggatgttcttttgctgtcatactacctttcctgattccttcttttaaacaaactgatccatgtgcacagtgtggatgcctctgtaataggattaactaatttcatagtaacaacgtcagtcacattagcttcttagaagcatgagctaaccctgagtttcctttgtatagttcttttgtggggaaatatccaagagtctaagactctgtaaaaggtttaccgtaggaggggcatgcttctcttgtctatgcatttattaaatgtctacttcacctttctgactgaagacctcctgcctgtaaccacctaggtgtgatctcttttagtgacgtctccaaaatcagtgaaggaattggtgacaaggttggaatgttctttcaagcaatagccacgttttttgcaggattcatagtggggttcatcagaggatggaagctcaccctcgtgatcatggccatcagccccatcctggggctctctacagctgtttgggcaaaggtctgtgaaacctaggcatgttcatgtgtgctaacccacaaaggccgttgctttgtgtatgcagagtgctgtaaccttctcacaaatgtgctcagaggcagtggaaaccacgcccaggaatgtttcattcacacagagctttaatatgaaaatgattgtcttgcctgcgtccaaacactacagttcttgttttaatcacaattcttagtttcactgttatctctttgaataaatcttccgatgtggtgtatgaagtgacatgtatggctatatttttatttaagaagatacaagttgaaagcacagccatccaaataattgaacaaatattaaagatttaaatagagtagggatattgttcactataacaattacatctcattcttgaagttttacatacagattttgcatatgtataatacatatataatacatacatttactggccagtgcttcagacttgagcagttttgctggctattcttgtataatctgcgtgtgaagagtcacttaggtaactacttgtatctctcttgctttgattttttttctcctgtgctatcttgtttaagcattttattttctagtagaattaccattattaagtttgaaagtaccattttcatcatgattaaaaaattgtgacatagggctggggagagaactcagccaacaaaggacttatcttgtaagaatgaagatttgagttagattcccagaatccaaattctgaaaaattcccaggtttgatgctccaagtttataaactcagtgttggggaggcagaagtaggcaggtccctggggatctctgttgaattaatctagcctaactagtgagctctatgccactgagagaccatctttaaaaaaaataaaaaaaaaaaaaaaaaaaaaaaagaaatgtagatgctcaatttggagtaaaatgtagtattaaaaatgtttactattaatattccttttacacacatgtactttcacatacatgaatatgtgcacatgttacacacacaatagattatgatatgataaaagaaaagtataattaatcctctcaggttttattttatccaagttcatagttgacagagaaaagctatgagagagatggaatttgacatgactcagatatactacttacagatttatgtctggttttccttactctggtgactctggcagctcagagcctttataggaggtgaacattgagaccaggctttaaagatgtaaagcacacatcactaaacgtctggatgggaaatgggcattaaagctctgtgcagactgccttttaccctttctttcgatgcaaacgtcatgactgtttctcttctacacagatactctcaacatttagtgacaaagagctagctgcatatgcaaaagcaggtgccgtggctgaagaggctctgggagccatcaggaccgtgatagctttcgggggccagaacaaagagctagaaaggtaaagaattttctctatctggtgggtcagagaatccacatttatagggttccattcattcttttgtggtttatgtttgctactctctcctctcctaatagcaacccctcccctgcatgctgctagcaccattgctgctgctggctgtggtttgtcaggctctgacttgcagttctcaaccttacgtgttcgacaaactccattttaggcctgatgatccctagggacttacctgtcagaaaaatgttattaaatgcttaaagggaaacatagagggttccaaactggaacacagaagggaaacccccgagacatggatttcctagtcacaatgcaggattttctgtgggactgtgtgggtctttgtaagaacaagacagagcttcccacctgcctttctgcctcaatgctggaagctcttctccatggtctcgtgcttgaggacgtgagcaaatgcttaaaccacacaactgcacaaacaaacagcagcaacctcattgaggtagaattgagaaagggctatacatgtttagtatgtatatctcagtgagtttggggataaataaacatgtatataaaccagcaactttctcattcaaataatttcccctgacataactgaaatatgaccccatataaacatcttctctatgtgtgagatttttgatacccacaattttccaaaatacagtctctgaaaattctctacaaagttgcccgtgttaaatgaaaagcttcttcgatcccttccatttcattttctacttttctgttcttcacccctctacaaagccaacatgtttctggttctctaacttcttccttttttttctttctcactgctgcttcctgtacacaatagtccacacagacagacagacagaccacactaaccctcaggtggacctcaggatgtcggtgtagtcatgccactcccttccccaagtgaaggtaattacagcatgcccactctcactggagcgctgtgtcacagtggggcacatgtcaatcttgctgctgcatgtacccggaagccccaagccacccagcggtaatcacagtgttggatgtggtacacagtccgctcctcacacacagctctcctccacgaatgcagtactcacagtggagggaagtgccccaaagaactgggtgctgagaagcagttagagaagcctttgtgtgtggcagcacgcatttggggaaaaaaaaaaaaaaaaaaaaaaaaaaaaaaaaaaaaacaactaatgaattcccatgctccatttggtttaactggggagttttgataaaaagaaattctctaatttatatgggattcaccccccagtttcattataaacccatattatttctttccataattttagagtcaacattgaaatttctacactatagaattgatttaactcgatgtaaaaaaaataatttgttaaaatcattctgaagagttgtgtgtgtatatgtgtgtgtatgtgtgtgtgtgtgtgtgtgtgtgtaagtcagcaatataaatttaaaatattcaaatactaaaattttattccaaattaagatggtaataggatgaataaaatatgagaggtaatgttctagtatgatggggataacaggaacaagaatacaagtttgccaactatgtgcctgtcagaacacttactactcttcatatttatctatcagtctcatgattgtctctctaaacaggcagtagttaggagaattctttcttccaaatctcagacaatgaaactaaaatgttttaaaaatggagaaagacccatatctctggtgagatctactttataccttatacctagcttggcaattgatgacatcttgatttttaaaagaccaaagtaagaagcccatgacttatatataagaacatgtagaatttttgtcttttacccagaagaacaacatggggacatttttcttttctaagaaaggaaaacatggatctcagttaagaatataaccactaacgagtctagaatagttaagaatataaccactgagcgagcagggcagccggtcccagtccagagcgacccggagcctccacgggactcgagtcctagtgaacctcgaagcatcatctacgtccgtctgcgacgttcaggcttctccggctccacgcaggggagcaagctcacccacgcggccaccgctggggccaagagcagggacaccgaaggtgactgaccactagaacccgagcgcagcccacttcaacaagggcccttcctacgggctctccgccgaagttaagaacaagatcgcatccaagtatgaacagcaggctgaggaagatctgcacaactgaaaagaagaggtgacaggcatagatagacattggcaacaacttccagctggggctgaaggacagcatcatcctgtgcgaactcataaacaagctacagccaggctctgtgaagaaagtcaacgaatcctcactaaattggccgcagttggagaatatcggcaacttcattaaagctatccaggcttacggtatgaagccccatgatatatttgaagcaaacgacctctttgagaatggcaacatgatccaggctacgctggtggctctagcaagtctggcgaaaacagaaagattccaaacaaccattgacattggcgttaagtatgcagaaaaacaaacaagacgttttgatgaaggcaaattaaaggctgaccagagtgtaattggtttacagatgggtacaacaaatgtgccagccaggcgggcatgacagcctatgggactcggaggcatctttatggtcccaagatgcagacggagaaaccctttgaccagaccacgattagcctgcagatgggcaccaacaaaggggccagccaggctgggatgttagcaccaggtaccagaagagacatctatgaccagaagctgacattacagccagtggacaacttgaccatttctctacagatgggcaccaacaaagttgcttcccagaaaggaatgagtgtgtattggcttgggcggcaagtgtatgaccccaagtactgtgccgcacccacagaacctgtcattcacagcggaagccagggcacgggcaccaatgggtcggaaatcagtgatagcgattatcaggcagaataccccaatgaatagcacggcgagtacccagacgactaccctcgagggtaccagtatggcgatgaccagggcattgattattagagtcacacacaggagcgcagtatttagtccattgttttatccagtgagacccaagctagccttgaataattcttctctcctcttcctgaaacactattacgcttgttcctttacagtatgccttacgtacattcctttctccttttcctgcctcctccctaaatagctgccttctagtgctgtagcaagggagccctactgcatagccagtaactcgcctcagtactgtggaaagggtgaatgattccccaggacagccagctctttcgatgaagatctatgcatttttttctacacttacacataaagtggtatttttgaacaataagaaactatttttttctcttttttacagttttagtacgtctctggcttgtacgtggaagactaaagagttgatttgctaaatgtggtctttgccaactaaaatctaagatgcagctttagaccctgacacatggatgtttttctgcagtcttgtctgctaagttttaaacaaagtcatgaaaaaaaaaagaatataaccactaacaagtctagaatagttaagaatataaccactaacgagtctagaatagttaagaatataaccactaaagaaactagaatagccccctgggtgggttggtttggggtttttgcttgcttgcttgcttgtttgtttgtttgtttgtttgtttgtttttacctgtatgtaatcctgacaggaaggttcttagtatcccaggactgaggcttcaattctggcatagccatgggaacacaagttagtgcagtagagttcaaaggagatgagccaagcaagtcaggagtaggcttaggtcagttctcctgagcactaatcctgaaccaggtcaattcttgggatactggactcctcaagactttattaccttcatggcttccacccttaaccccatactgaataggggtttattacgccttgggttgtaaagtgttattcacattataacatttccctcttcatttttcggtaggtatcagaaacatttagaaaatgccaaaaagattggaattaaaaaggctatctcagccaacatctccatgggtattgctttcttgttaatatatgcatcctatgcactggccttctggtatggatccactctggttatatcaaaagaatatacaattggaaatgcaatgacagtaagtaatactgctaatgattatgagaaatctggaattgttctgcacctaccttgtctttattattttttatttatttttagtattacttaaagttttttgtggaagggtagagtatacatgaaggtgcctgtggaagccagaggtgtaggatccccctggagttggagttatggaaggttgtgagccacctgccataggtacaaggaaccagactcaggtcactgtgagagcagtatgcatttttttccaattttttattaggtattttcttcatttacatttcaaatgttatcccgaaagtccactataccctcccccaaccctgctccgctattcattcactcccacttcttggctctggcgttcccctgtactggggcatataaagtttgcaagaccaaggggcctctctttccagtgatggccaactaggccatcttctgctacatatgcagctagagacacgagctctggggtactggttagttcatattgctgttccacctatagggttgcagacccctttagctccttgggtactttctctagctcctccattgggggccctgtgttccatccaatagatgactgtgagcatccacttctgtgtttgccaggcactgacatagcctcacaagggacagctatatcaggctcatttcagcaaaaccttgctggtgtatgtgtatgtatactgtctgcatttggtggctgattatgggatggatccctggttgcagcagtctctacatggtccatcctttcatctcagctccaaactttgtctctgtaactccttccatgggtattttttcccaattctaagaatggatgaggtgtccacactttggtcttcattcttcttgagtttcatgtgttttgtaaattgtatcttgggtattctaagtttctgggctggaaatcagtctggcagtccctcagaaaatggacatagtactactggaggatccagcaatacctctcctgggcatatacccagaagaggttccaactggtaataagaacacatgctccactatgttcatagcagccttatttataatagccagaagctgtaaagaacccagatgtccctcaacagaggaatggatacagaaaatgtggtacatttacacaatggagtactactcggctattaaaaagaatgaatttgtgaaattcctaggcaaatggatgtatctggaggatatcatcctgagtgaggtaacccaatcagaaaacaactcacatgatatgtactcactgataagtggataatagcccagtgtgcattcttgaccctgagccagctctctatcccctgcctgctcctttcccccctttctccttttggaagaaaaagttgtgattgtaggtttgatctttgccgtcctgtgggtagagttggcgttctagaatatgcaagtcaagtcctcatggtgagtgaggacaagataatagcttgtggtttgaccactggagaaatacatattcacacaaagggaaatgaaatggaaaacatgattagaataagaagatattggagttatccttgttctcttgttgagtttaactgtggaagagagtttcatttattactatagataggtcattgtgtaaaagagcattcaattcacacatcatgcagctttttaaaatagaaaagaaaagtcatgttagatcatctggctatatgaagatgtagatacgctcatagcatgattgtgaaggtaatgcatttgaattatactaatgactaaaataaaaacttttaaaagttaaattacttacgttctaagaatccatgcatacttggtagtggtttttttgatatgtatttcccagatatgtatgtttttctcttccgaaacttaagtcataatacgtaggtctttggtaatcttttctataaaccagtgacattttgtgaccatcttccacgttggggttgatcatgtttcaaaagttgcacttgactctttcaaaatgaaaattctaaatataatttggtccttagactttctccatatgagaatttgaatctcacagtgtgcttacaggggcctgaagttggtgaaggttgggggtatcagtaacagcagagtctcccgacttcctgttcttctctggcgcattgtggcagctcaccacatgttttcacttccgcatttcctcccgacgttttataaataagggaggtggcattaacctttgccattacccttgcatggtgaatttgtccacatttgtagccctggtacataatgtctgtgtcacaggtaaagggaaactggcaagccttctacacaaagagctatgacttcattgcaataatgccttaatatctacttccattaagaattttttctcattggtcctgagataagagatagatagtggaagggatttgggttttgtaaacacgtatgtcactgttatttcaaagaacatagatatatgtaaaagttcttggagagaaaggagtaatttctcttctcctatatctttcttaagttatatatgctataaatctgttttcctgaaactgtgttggatttatacatcagtttatgttccaatgagacagatgtgaaatgtgtcgttttgtgtgctgcaaaatataatgatcataattttatgttctataaatggatgaactgactggtgactgggaatggtaatatatacctttaatcccagcgcacaggaggcttgggctggagaatagaggctataatgagttccagaccatcatggactgcaggaagacaccctgtttttaaaatataaaggaagtgttagacttccgttgatctgaccatatatctatcaatctataatagctttttaaaggaaaaccacatggggccaaaatctgtatgtttcctattgaatattttgtgcaattccttgcagagttagataaaatgataaagaatggaatgaaactttaacaggaggaatgctttttctggtggcattagcttcagagctaatgaagtaggagtcaaatgtctttatgactaatactttgtgatcagggaaaaaagcaacaaatggtttggcagactaaacaaagcttatttttgatgcatacaaagggaaataaaatataaataaacacatttagtaatgaaatgttgtgttagtttttaaaattttgttctttcgggaggctgaggcaggctgatttctgagttcgaggccagctgggctacaaagtgagttacaggacagccagggctatagagagaaaccctgtctcgaaaaaccaaaaaaaaaaaaaaaaaaaaatgtgttctttactgaagcaattttatttttagcaagttgatgggtgtcttatcacactaattatatacatgtatctaattatcacaatgtgtttcataaagatgtacaaatattgtttctcagtaagaaaaaagttactaagtgtccaataaatcctaaattcggtccttcatgtatatttcaagcaagctctaacgcagatgatgctattctgttcctaactctttcactcaggtcttcttctcaatcctcatcggggctttcagtgtggggcaggctgccccctgtattgatgctttcgctaatgcaagaggagcagcctatgtgatctttgacattattgataatgtaagtctttcattgtctgaaagctgagagagtcatggtggtattgataatcaagtattgaatcacgtgtattaagttatttagtaaggtacactctaacaacaggaaactctacaagtttatttggcaatatcaaatcactgactccactggagtctgtttatatccatcacgatgtttatgtccatcacgagagtgtaggttaagatgcttcctttccgtgtttacttcctttgcatgtttgaccagattataatttctatacagtagagtgggcagggggataaattgtgtataggaccaaattaacagtgaactttgctatgaggtttgctcttctccctaaccttaaatcaactacattgaataaactaaactgactacattgaaaatgaaaagatttacatactaaagcatgccattgcatttacatagtaaaattcaaagttggaaattgaaattatagaagtagatctaatttataattctaaatgtattggatgtttacatggttcctacgtaatactgtgctcgtcattcaatccatgttctattttattgtttaggaagaaataagtttcactaaaggcagaaataactgcacttatccaatatgtttttgttgtttttctaaacatgtataactgaccatttataaaatttatgaatatgtgccaaaaactggaacgtgttgcatgaaataaaataaatattccctatgcattttcagaaaagttttagtaaatcacacacatgtatgcacacatacatgcacagacacttttgtgctaacatgtgtgcagatacacatgcatgtgtgcatgtgcacacacacatacacattccgcgtgttcactgtgtgttggctcacaggaaggagactaatgtatacacacatacatgcacatacacttgtgtgctaacatgcattcagacacacatgcacgcacacacacacacatatacacatatcccacatgttcactgtgtattcactctcatgaaggagattaatatatacacacatacatgcacaaacacttgtgtgctagcatgcatgcaaacacacatgcatgtgtgcatgcacacacacacacacacacatatcctgcatgttcactgtgagtttgcttacatgaaggggattatgatactctgaactctatgtttagaatttaatgcttcctattccttaaacatacaatttcttatttgataaaatagtcattgaattttgttttatttagaatcctaaaattgacagtttttcagagagaggacacaaaccagacaacatcaaaggaaatttggagttcagtgatgttcatttttcctatccatctcgggctaatatcaaggtactgtcagcaacactagtttcctagcgtaagctgatctctgatcttcccaatagagtctgattcctttgatatttatatacttttgtcctattggagttaaactcttaagtcatacttcttttctaaattctaagtagaattgaattattccttttttggagcttggttgtgaagtgtgctcttccttgctttcctctgcagatcttgaagggcctcaacctgaaggtgaagagtggacagacagtggctctggttggcaacagcggctgtggaaaaagcacaactgtccagctgctgcagaggctctacgaccccacagagggtaaggtaagtgggaagaaccaaagtccccaacatcggaaggtgggcagaagtagtcccttagaaactgtttccttacaaataaatatgtgagtctgattttggaaagagtatacaatattgcaatgcatctggacaaaacatgtatttcggggacaggtatttttgaagtcttgagaacagctggagctagaaaggactcttctattatccaaagacaaatagggtcactctcagtgagtttgatttgtccaaacaaattccatatagttattcttgacagcctggtaatagaagccacaaatcttaaaatagtaactaaattcagcaaaatgatcattttctttatcttttggtcatctaaaacaaagaacagcatagcaccgagaagtctgaatctctggaaggtgcatagagcgtgagactaggtcaggatgttctttcttgcagggaacacatatacccttcacacagctctactcactaattttatttttatccatttgatttattcttctttcttgcatatgcattctaaacagacaaatacttcagaatacgtttccaaaaaacgatattctcttacatagagaacaatgatcagtactaatgaaatcctaagtaaacaacactaattcacagtttgttcttcagttgacccaacttaaggacattgagttttccaatgttagtcaacaactgtaaaacacaacgttacaaatggccttagctttctttctgctgtgttgacaaacattgtaatggaaagccccttgggaaagaaaagggtgtatttggcttatacttatagactacggcccatcattgagtcagaacagacacacacgcaggagcttggaactgaagtcctagagaacgtctgcttgctggctccttctggaccatgctcagctacattctatagtccaggaccactttctcaatggaactacagacagtgtgctgggccttcctacatcacttagcagtttagtatttaagaaattaatgaaagcaaccctacctatgatttgagaataaatatagagagttttcttttctttttttttcttttctttttttttttttttttttttttttttttttttttttatgtaaaagcatgaggtagtttaatgacagagctctgggtcgaaacatatctcacgcaggagacagtggtttcgaccccgaggcttggaagctaggggtttttatagaaaaggggtggggctgggggagaaattggcgtggtttcacatgattggtccatttaaacattagcagactgtcagaagggcgggagatagggaggcaccgggccagtctggcatgtcattctctttatctttattgctaagcagcctcaggaaactcttaacaacaggcctgcccgggcatgtcctggcctgttctgctatgttctcagccccaggtttcaaagctcacaaacaactctttgggctatttgacatacattacatgaatcacaggtctcaagttttatttcctttcattcccctcttcttctactaagtaattctaatcttagaattttagaagtctatatctctatgtggagaatagaaatcataacatgggccaaaggttaagaacaaaaacagaataagaagggatggtaaacagaactaggcaaggacccttctagtgaggcttgagggtctgggcatgatgtaggtgtacgtggatcagatctctggctggaactggtgagatgtcttttggggtacctggctcgttcactgtagccaattgtgaccagccttctttcttcaccacctgcaagccttttaacttagtttacagattattattacaacaacatgtaggtctagacacatcatttaagacagcgatgggcatggggaaggagcaccaagtctgcaccagtctcttttagaattctattcttcttttctacctgtcctgagctttggagcttgtatatacaatgtaacttctaatcaatctctaatatcttggccagtccctgatttacctgggcaacaaaggcaggtccattacctcgggaagatttcttttaggatcttcttggctatcacattggccgtctcagtcctggtaggaaaagcttctatccaccttgaataggtatctataaacactaataagtacttgttgccatatctagctggcttaatttctgtaaattctatcttgtcatagcacaggccttgcagcttttgactatttcttctgccaagtcagagagtcctgtaacatagtagtcaaaggacctaaccacaccttttaatttcttggcccccaggtgggtcaaataatgtccataacttgatagtgctcaggggtgtatctaaaactggtctctctgacatcataataatctttaggctccttgactgccaggatcattgctctttggcccgcctgtttggcgattagatttgccatctgatttcctttagccatagcatcttaggtccttctctgcagatgtcagcagcccctttatatcaaagtcacaagttcagctttttgggccgacgtcccttcagggaggctgctggcctagatcacttgctttctgtccaccactgtactactgtcctcaccttctgcttaccttcaacctcgaggctactgccatcggtgtaccagcttgaactctcaggccaaggctgatctgatccttcagatcattttgagtacctgtttcttctgccagaatgtcagcacagtgctaagtaggtgaagtcttgggcagtagggtagcaagattgaggacagcaggtggagcgaaggtcactcgttcagtcaacaaaaagctctgataatgtgtcacaggagcgttggtcaacatccatcagtcagggggctttcagataatgctttcaagagtgtgggggtgccactgcagttatttgctgtcccagagtgagcttatcagcatccttgataagcagagctatggctgctatagctttcaggcaagaaaccacccgctggcaacagggtctaacttcttggataggtaagccactggcctttttcaaagtcccaaagtctgagtaaggactcctctggcgacccctgatctctcttccacataaagagtgaaaggcttggttaggtcaggcaaaggctggccatcagtagggcctttttcatttctctaaaggctttctggtgatctggggtccacacaaacatttccccttccttggttagggggtacaatgggaagctaaggtcgccaacccaggtatctagagtctgtagaagccagaggtacccaagaactctcttacttgccttggtgtagttacagtctttttctggcttcttttagccattgttttccacctcgaacggtgtatctcaaatagataacttgagtctgacacagctgagcctttttagctgaggctaggtcttctgttgcccagatttcctgtctagatcctgtctttttctttctctcctattactgcagccaagtttctagtcaaatttctttgtctacgatccctcctgttttctctttcttctgcctctcgcctctctctctctctctctctctctctctctctctctctctctctgtctctctctctctcttgtaatactcattctctgcctcttacttactggttctactctaaatatttctcattcagagtatctctctcatatcagacctctctaatctccttcatctctataattcactgtctctcctgagtctgctggagctttgctcttccttacagtctaaactcacctttttctagacctctatacccatttgtcagagcctggtgattaaactcataggtgctccttacctgggacaggaatttttaagtgggcagatatctccctcactggttagcagcttagggcagggctgccctagaagagaaaacacttggggcagggaaaggaaggcagctctcacagctggctgcaccaggccaactcagggaggggggggggggaaggtggcagaggcggcgactctagtcggcccctccccagcaggcatcactttcgctctaggaagccaggcggggctagtgcccctctttcttttcttgccagtaccgcaggagatgaaatccgtggtggtggtggtggtggtggtggtggtggtggtggtggtggggcgggcatcccagggaaacctcctcatcggtgttcctccctgggccacagtttcccacgtggcgcctccctcagccagtgcgtgccactactgctgaagcccgaagttctcagtcaggccctgctgcgtgtggccagggatgccgagttgtttttcttaactatcactgacaaattctgtcctaacatctgtccaagtccacagtcggcactacacacacagtctgtcccataacaaaaaccacaaacaaaaacaagacagcaacacaaaaacaagacagcaacagagaataaaagacaccagtatctaagcatacttgttcttcactctgccagatgtaaaaccaaggaacgaggtgggactcgaacccacaatctcggaaccctaataccaaggcacgaggtgggactcaaacccacgatcttgtaaccctaaaaccaagtcatgaggtggaactcaaacccatgatctcggaaccctaaaaacaaggcacgaggtgggactcgaacccacgatctcataaccctgaaaccaagacacaaattcacaaaccaagacacaaattcacaatctcagaactgaaaaaccaagacacaaattcacaatctcagacttgaaaaaccaagacacaaattcagcagtgccacacttagacaacagacaacatgtaagacgcacacaaacaaatgtacctccaaggggtctttcgggtttcctgggtgtcacacagatctcgctgaggcctccaaatgaaagaacctagtggggaaacccccactcaattcccgttcggcgtgcacccaagaatcacgaacagacgaccatcttgatgtaaaagcatgaggtagtttaccgatggagctccaggtcgaaatgtatctcacgcaggagacagtggttttgaccacatggtggagccataatggcagagctccgggtagaaatgtatctcacacaggagacagtggtttcgactgagagttatttttctttatgggccttggtagacttcccacactccagtggatgacaacatccaagaatgtgaagtcaacacaggttggattccatgggtattctaaatgaggacccagagttggagggtgtggaggggacaatatggtaggtgtatcaaaatacaaagtatgaaattctcaaacaatctttaaaagagaggatatatatatatatatatatatatatatagagagagagagagagagagagagaaatggttagctttaattattggttatgatagataatagaagaggggcaatcatttctttacttatataccctactgccatgaccctctgggcgctaatagatatttcaaacccataatcacatagatggccttggttaaactcagtagattaaaaaaaaaacacacagcaaaaagacatgagctaggtaaaggatttatagctgggaggaaggtagaggttgagggtgaaaatatggcagggcgtggtggcacacacctttaatcccagcacttggggggcagaggcaagcagatttctgagttcgaggctagcctggtctataaagtgagttccagggatacagcgaaaccctgtctcaaaaaaaacaaaaaaacaaataaaagaaaagaaaggaaaggaaaggaaaggaaaggaaaggaaaggaaaggaaaggaaaggaaaggaaaggaaaggaaaagaaaagaaaagaaacagtgtgtgtgtttgtgtctgtgtgtctggggggggggtgtatgtatgtctgtattcaattgccaaagaataaacttaattaaaaagtgatcagcattacaaagataaactgctccttcaagagctcccagatctaacaaagtacaatgaagcagatgtattatatatttcgccaatgtccattattaaattacttataaagagtcatttatttagcttatgttcatcaaggaataaatgccccataaacactagtcatttacagtaaagcaattgatattaatataggaacataaatcatgtctttcaatttaatgattctttgcttttagaacaattaagaaaatatcaaatggctaaaagttaagaaatgataaagtacattatagtgtgttaagcatagcaaaacaccaaaatgtcatctagctatatgttggataaggggacattttaacttaaatttatcatcggaaattaaacacagtgacatgcctaaaacctaactggggctggaggctatgtcccagagagagtgttttcctgagtatacagatgctttggggtcattttttaaagcactatgacaattaactaatatatccaaaatttcttatggtagataatcaatttggctattttatttatttacctttcaaatgttatcccctttcccagttccaccccccaccaagaaaacctctgtttcatccccctttctcctgattctgtgagggtgtggccctacccacccactcccacctccctgcccttgcattcccctacactgtggcatcaagccttcacaggaccaagggcatcttattccattgatgcctgacaaggccgtcctctgctacatatacggcaggagccactcctccaagtgtactccttgggtggtatagaccctgggagctccggttggttgatattgttgttcttcctattagggttgcaaaccccttcagctccttcagttctttcattgggaaccctgtgattagttcaatggttggctgagagcatcgcctctgtatatgtcaggttggcagaacctctcaggagatagctatcttagaaagggtaacaaaatacttacgggagcaaatacggtggcaaagtgtggagcagagactaaaggaaagaccatccagagactgaccaatctgagcatacatcccatatatagccaccaaacgcagacactcctgtggatgccaagaagtgcatgccgacaggaccctgatatagctgtctccaataatctgttcttgaaaaaaaaaatgtatatatcaggaaaatatggttgctttattttattcctgcttattactgtttagtttttatttctaacttttgaatgaactcaatactagtaaaaagcccttgtgcctttgaaatcaggttgcttaaaatattgactaggaaatccttctttctttcagattagcatcgatgggcaggatatcaggaactttaacgtcaggtgtctaagggaaatcattggtgtggtaagtcaagagcccgtgctgttctctactacgatcgctgaaaatatccgctatggccgtgggaatgtaacgatggatgagattgagaaagccgtcaaagaggccaatgcctatgacttcatcatgaaactgccccaggtaaagtttcccttaaaatcacaactgaaacgtgaggcatgagttcttgcttcaaaagctaagctctgggttacaatgttattcaaccttgttgggcaaatcccttaaattattcagacaaggcttaacgactatattctatatgtaaataacataaagacatataggacatgcattggtaattattgcaactcagtgttaatttattatacttcatgatacactacaagaatcaaagtttcggttgtcttcatttatttctacaaaactctctgtacttttgtatttaaaatacttttaaaaggctgacatatagctccgtgatagagaccttttttagcatattcaaggtcctgtctgagtttgatccccaacactataaaattgaatgaatgagtaggtttctggagctgttctgggttttctgtttagaaatttgacaccctggttggtgatagaggggcgcagctgagtgggggacagaaacagagaatcgccattgcccgggccctggtccgcaaccccaagatcctcctgctggacgaggccacctcagccctggacactgaaagtgaagctgaggtgcaggccgcactggataaggtcagtacccgaggtaaacacccagggcgggggatggggagcaaattgttgtgcagacttttcccagtcctttgggaatctagattgagaaataaaacccaaagggcagatgaggttgtctcttgggatttattgatttcttgagcccgttacattgtcgcagagagaggtcaatgatctttacaggtttcctccatggttcagtgaacctagaccaggcctgtgggaggaactgtgggggttgtttttttttttttctttcttgcacacatgggttttatttgataacaatatgctaaaatatgtgaagaaattaatttataaattcaggtatttttatgtaacaagttctagtgatgatatgctgtcattttcttggatgtattgtatttcattctaagttttaatctatttctttgtggattttttttgttaaatcagtaaaaagacaaacacttatattcaagtatatgtggaaatacatataaatacatatatatgagaatgtaatacatatatgcatatgtgcatacacatgtaactctgattacctaaacactgctctagtttaaaaatagttcaaaataacctattttgtggtaataatggcatcattatttgtaatttaattgttaatgatacattaaattgtatcaaaataatgtacttgctccttagggtgattgtgaatactcctcattaaaagacttgaaatttagaaataaataaagtaaaagaaataaaactggattactatcacctaacaaaacaaaagaagaaaattccattttaaaatgtattatttgatggcatttagtatactcatcagattatgcaatcatcaatactaattccagaaatagttcattgcccaaaagaaactagttgactacttctcagtagccctgtgcacactcttctgtctttgtggctttgctagttctagacattttatatagatgtaaccatactttgctgttgtttttgctgttgttatgtgtacatgatgtgtgtgtgtgtgtgtgtgtgtgtgtgtgtgtgtatgtgtgtgtgtgtgtgtgtatgatatagtacatatgccacagcacttgtggagaggtcagaagacaactttatggagtcagttctttccttccacctttgtatgtgttcccagactccaatgatatcaccaggcttgaatcgcaaacacccttacctgctaagccatcttgctggccttcgttactgtctttttcatgtagcacagaattttcaagctttatcaatgtagtaattggcatcaaatgccattctttacagggtccagtggattccagttgtatagacataacacatctggttaaccattttcaactgatgagaatttagattattcctacttctttagttattattattctaactacttaggtcaattaagctaaattatgatgagtctatgatgtaggtattcgtctcaagagattatcggtcaaatgaagctaatgagcaccagaaattgacataacatgaataatttggtgggaataactcactgtttaaatggtcattcactccattaaaccaacatgtgaggtcactgaatgacttagaggactggtctgatttcaccgtttatgaaagtcaagtggggcagagtttaaaaggcagcagaattggccctactcttgaagaactttgagttctaatttgaactatcctcagactatccacactactgccttatagtccatagtccattggaattatgttaatatggagttctggtgaaggctgtcaattaccaatgatctccctaaaatgcttctgccagagtctctggtacaccaaacagctcagagctagggctcatctgacaaatgtgaggatacttatcagggcaaatctttaactttcttgagtatcagaaaccaccatagcttccagagtaacctttgctcatattgaaagggtcagccaccagtctggttctgaactcagaagtggtttgtttttttaaaaggagtggtacccgtgctttaagtacacagaagtatggagtgtcactttctcaccgctgcttgcaagcagcatctgcccaagggttaattgtgccggctcattgctggtgtattaatgccacgaccctagtgtgccacacatctgtccttttcctctttaggccagagaaggccgaaccaccattgtgatagctcaccgattgtctaccatccggaacgcagatgtcatcgctgggtttgaggatggagtcattgtggaacaaggaagtcacagtgagctgatgaagaaggaagggatctacttcagactcgttaacatgcaggtataagcacatcacagatggttttctctgttgcctgggttgcttatatggtagtctttaagttattaaaatagattacagctgatggtatacaaagaaaccatgactaggatgaggcattaaaattagaacctgggaaagagtgaagggctcgggaagaaaggcaaatgtaaaactcacagttaatgtattcattagatcaataagattgtctagggaatgtgtccaaactacaagttcttccagtggaaggagaaagagatctatagtggttgggagagaggtacactttataaatgctttgtagacaaacctggtatagctcaagtggcaacatttgcagctttagcaggttaaatagttggttttaaaaactgcttactcttctcactaaaaaatcattagtgtgtctcatattctgcactatcattttagcaaactttcaggatacgtaacctaaagctttcctatgactcaagttcataaactttaaactatgtgtactaactatgtatactttggccttgtaaaaagcgtatacatgtgtatttcagatttttccccttgacattccagatatactccatgaaatattatttcaattactcagcagtacttataagaaatatgtttcatataacctattttctctagaaactaacttataacttagtttctctagagatgaataattagcttatttcaatatttatgttttctttttaaacactgctaggacaagcacaaattaaaaaatagcctcaagccgggcatggtggcacatgcctttaatcccagcactcgggaggcagaggcaggcagatttctgagttcaaggccagcctggtctacaaagtgagttccaggacagccagggctacacagagaaaccctgtctcgaaaaaccaaaaaaaaaaaaaaaaaaaaatagcctcaaatccctaagttctgccaagtaccattctgctgagcatcaatccttcatttggattagcaatcctactgtgagctattgctatacatttaagaaacaaatgcctgcctagcactaaaatgtgtgagctaagatgttactcttacagaagaaaacagcagggtaatggtttgtaaagcccagggagtactggagagggtaagggagaagatgattgacaggtacagagaggcacaggcaaaggggagaaataactaatgctctggagcacagtagggtaatatgattgacaacagtgagctgtgtgcttcaacatagctaggagagtctatttctttttcaattgtaaggattgaaactagggccttctttatataaggcaaacatcccaccactgagccatttccccagcgcaagaagacgactttggatctttgtaataaaaatgataatgtttaaagtgaccaatatgtcaattatccttatgagcaatgatgagcatatacacatgttgaaaagtgctctggtggcaggggacagtagctcagcaggtagtgtgcttatcctataatcatgaagatctaagtttgttctcaggcaagaaaaagagccaggcatgatggcatgcacacatataatcccattgttgggaaggacaggtgaatccttaggaactctggttagctggtatagcctacttggtgaactccagaccaataagaaacccccttttaaaaaaaaagaaagagacaaaatctgaggttgtctcctggccttactcatttgtttgcttgggcatacacacacatttccacacatacatttacaacacacacacacacacacacacacacacacacacacacacacacacatacacacacaaagtaccatattgagctcaataaatatgtacgatatatgtcaaattaaaacacatatattagtatttgttatatatatatatatcccaaaaaacaaatgacatgaatgtctgagtatactggaaagccactgttggtttttaaaagatggatttattatttggatcacatgtcattgagctattactattttttaaagaacccaacacaaaatagttactgaaaatttcaaattattcaaagagtggagtgttagaaagttttataattcagttttatataacctctttataacttactgctttaaaatgtatgaaattataatgggtaatgttaattgtcaccttgacagaatctagagccacaagatgatgagcctgtgggtcatgcccatggggaattatcttttttttattgtatactttctttatttacatttcaaatattaatatcccctttcccagttcctccccaaaaatcctctatcccatttcctcaccccctgcttctatgagggcattcccccacgcactcctacctacctgccctggcattcccctacaccagggcattgagcctttacaggacgaagggcctctcctcccactgatgactgagaaggccatcctctgctacctatgtggttggagccatgagtccctccacgtgtactccttggttggtggtttagttcctcggagttccgggggggggggggggggtcctggttggttgatattgttgttcttcctgtagaattgcaaacccctccagctccttcagtcctttctctaactcctccattggggacctcgtgctcagttcaatggctagctgcaagcatctacctctgtatttgtcaggttctgactcaggagatagctatatcaggcgaggaattatcttgatgtcattaatgatgtaggacgatccatcttaactgtgggtggaaccattcattccctgggcagaggaataaataataaactacttggccatagtgctgctaaatttagtatgattgggcaggacaggtgaattattatcctgttaagtgaacggggcttgcactgaagtcacctcagctgctgccaccaggtctgtggttctcagaaccagtgcatccttctttctccctgggttccctcagcatgcctacttctgacgtttgttttgccctcccagttccttgttggttctcttggagagatggaggatggtgtcacagtgcctgtgagggttctctggatttttcaatttagtgtcctgtccttgatttcaaacctcaacctagttttaattcaactttgtaaaaaatcttgatacatgtaatagagttactttattattctaaacttcaagattttatccatgtggacatattcacatgcatgcatacacacacactatttaatgtcttatcttgtcattcagacagcaggaagccagatcctgtcagaagaatttgaagttgagctaagtgacgaaaaggctgctggagatgtggccccaaatggctggaaagcacgcatatttaggaattctacaaagaaaagtcttaaaagtccacatcagaataggctggatgaagaaaccaatgaacttgtaagtttttccccaggccaggaaagcctttaccctagagttttgctactgaaatctttagccctaaagagcacatgactcttatagtgggtcacatgctactttaaagaaaaaaatcgaattttttgatgtatctgacagtgtattaaatgaatgccgattaaaaataaatttccatggggaaaaacagacaaaatataatctttgtgctaagatgtttaactttaaaatcaaatttatttatatttacatatagtgaatatgtttatattttataaaaataattttataaagtatatttttagtccctggataataaagctagtctagaatgagtcctgttgtcagcatatgatgatacggagaaggggtggtgattaatttggcagctctaggcagagcaaggaggacaagctcatgtccttttgttaatgatcatgaagttgctctgaattgagaagatgggggttgtcccttgtgtctattgccttgtgatgctgataggatcgctgttagagaggcagggacatcccatttgatgaaaaaactacaggttacctcatatagcctagccatgactgtcacacagacccagagttatccatgcccagagctagtgtctcacacgtgtggaccaggcctgcacagcagccgcctgcaccctggaaatatccacctgtgtgtaagattcatgctcgacagtaggtactgccctttattctctagtcaagggcaggatatttttattgtatctagtttgaaaactttttgaggataatagccatgttttctctgtctgcaacacaaaatgtttgtgttagctgtttgtcctgtatttttatgttctaggatgcaaacgtgccaccagtgtcttttctgaaggtcttaaaactgaataaaacagagtggccctactttgtggtgggaacagtctgtgccattgccaatggagccctccagccggctttctccatcatcctgtctgagatgatagctgtaagtttaaaaacatcccacagtgaccaaaacagaaacagcccatcagttaaagccccaccaattctggggttaatagctttaacttaaattaagccaaagttattctgttttaaagttaaactcattataagagaaaaggacttacctttgaagcaccctgttccaatattagtgaacttacaaagtataagatcaatggggaaagctctctaattgtcatcacttgggtccagagatggtgcttccttgtttgggggagggctggcacttggctcacaggatgtggacctggaggggtcaggatggagtggaaggtgagttcatatgctagcctacctgtaagtccaggtttccaggcacagtctggcctccacattgaacaagtgggtaagaccagaaatgattcctttcatctgccccgtggattttttcatctacaaaataaacctgtttcaaagagtgtttgaggattgataataggtaatcacaggggagcatttcagaatggcttcccagttgtgcagcctcaaaacatagtgctttagcaattctccacagatgcagaagtctgcaactaagaaagtaaatccatactattcaatcattaaatctattgactgatatgcgtacaaagttattcaaaatgttggatcttatgttatataaactcctttattaccttctattattactggagagacatattggataagaacaaattctcctccaataagctaaaatgtattagtctcatgatattgggcgttgatatacattaagaccataaacaaacaatgaaaaatgtaaaacgaccctctgaatcctattaaatttcaatgtaagacaatccttgactttcttgcagttcgagagatacataagttacaggtacaattttttagaatccagtcactagaaagacaattcacaaaagaaactaagttgtgcctacaaaagccaacttcttctgtgctaacacatacaaggcagaaacaaaaatacagatttataatgttccaggtgctaatgagtgttttaaaagcagtgtatggtgatggaggaaggaggcgcccccagaatggaaggtggaggcctagggctggggacagaagaaggggagcccattgctgggctcaacctagttgtgacctataatctccaaagacacaaatgcaggagcagaaacaaggaaatgtctattgggatcatgaaaacatgttggcaacttggggtggtggtggtggtggtggtagaggctatatgacaagatgcatatatgtaatacccctggactgtacaattaataagggttaaaatggtatgctagttgtattttatcataatttggaaaagccacatattcaaaatctactttcaccgatgtgaccctcaagccactgcctggggtaggaattagcagggtggatccagacacccaggtttttatgttctcttctagatctttggccctggggatgacgcagtgaagcagcaaaagtgtaacatgttctccctggtcttcttgggcctaggagtcctctccttctttactttcttccttcaggtaagcagaggtaattgttcttcaaatctatggatagagaaattagtgaagctctaaccaaacttccagatcatcacattgagatgagttgaggatctagtgggggcaaggcttggtaacatgcaacctccttcactgactgggaaactgaccatgaaaactacgagtgggggctggtgagatggctcagtgggtaagaacacccgactgctcttccaaaggaccagagttcaaatcccagcaaccacatggtggctcacaaccatccgtaacgagatctgactccctcttctggagtgtctgaagacagctacaatgtacttacatataataaataaataaatcttaaaaaaaaaaagaaaactatgagtgtatcttcagcaaatggtcactatcatggaaggagacttgggctcattggttgcaaactgaaaaaacaaaataaaacaccaaaccaaaacaataacaacaacaataacaaaaaccacagtagagtaacattctctttgttgttactttcccaaatatcaagtaactttgacctttctccttcctaattaatgaactattagaaagaacatacattcacattcatatactatagacctggccagaaaataagctggccaaagctaggcaggtggtgtacatctataatcccagcactctggaagctgagacagaaagatcacaagttacaggtaaggctgggctacacagtgagatcctgactcaagcaagagcaggaatttggtgcctgttttcttttctacctaattaagctttccccaagctacattcaatccagttgcatgacagacctctcaatccagagtcccctcaggatgtaactagtcacccaacatgcggttcctttttcactatggagccagaggcgacagtaagatgaaatcctcatctggaagtccttgccgtgctagtagcacctcagaggtctgatgcaaccctaaacccatgctcaccagggaggggaattctaaacgtacaggagcaatgggggtagcgcacagcagccctcctgaaaggcaggtgaggacaggccagtcctgcataaggaacctgtggggcagctgcaccccacacacccatccctggtttaggctagagttcagcagtgcacactcccacggtctctgcaccatggcttctagcattactggaacccaatcatcccacacgccctagaagcgatgcatctctggatgtcttggattctctccagcttgggcaccgttgttagggagagggagactggcaccgaggcttggagtggaagtgaaacctaattgtggcttcatcccagagcaggtggggctgggcccttgggctcatttggagtttgagaggaaagacatctttctttctacagtgcagcaaccagagtgcgactgcagaatttagaagctaggcactttgaattatattattatatctagttcaacacggtgtcttagttactgagattctgccctcgaaagttattgaaatgggagagaagccaaacctggacttttggtgttacagttccaaacctcacaatgactcagcagcacctacatttcaagttaacttttattggctgaatagtaaaataaatgtgagtgtctgtagttgtgtcaggacactaatgagaagcaaaggggtcctgagactttttgtctcccctagggcttcacgtttgggaaagctggagagatcctcaccacaaggctccggtccatggcctttaaagcgatgctaaggcaggtgagtgcattgcagatgatacctagtgtttagatttaggactctgcctgctgctgttggcaagccaatgctcatatttcccctccaagacttccacgcaaagaacgactagggccctacaagttactggggttctgaaatagcccatgacttctcaaggttttcctgggagcagacatttcaagagctctttggcttattctgcaactatctgtctccatgtgtacagtcatttacagtatttgtgtctgatctttggattctgcagacaatggccagtctttggagaagatggttgatagtgtccatgtttatctgtcacagtcgaccttccaactaggttttcccaaaagctagaaattgacttatgttttgccttgtgcctgttttcacttttattcaccagttcatttattgaaattgtacatattatgtaagttcctattctggggtaggttgtatgggaaagtgaaaacatgtgtcccacctttaaagaacagatcatgaagagagccagtagacttgaattggcattgtccctgttcacactgggcacacggcaggcatcgcagtttgagcatgtctgaattgatgaattctttgggagaccttccaaactcctgctatgtgggagaaataactttaaatgcaagtaaaaaatactgccaataaatacttataattagtatcaaaccaagaagacacactttaaaaatccttatgcagacaaaataaaagcatagcaagaattcaacatttaattcccttgtttacagtttattaaaaaaaaaaaaaagacttgtctcttagtgagaatggcatcctagggagtagaggtgtccacagtacaagttgtaacaagggctatctgtgacaatttggtagatagtgcacccaccggagcccagccttgggtggacttggcagatgaacccattccttccctctgactaggacccctttctcttatggggaatagttaggacatgtggccttgtgtgtctgcagtcgggtgctcagggttgtgtctggacccccactctgtatagaaggtctcccctgaattccaatacccacagtcagtttagatatctctcttcactgaagtacttcgagagtgctttgtttttgttggttttaactgtgcgttaatttaaaggtgtgttttatcccacaggacatgagctggtttgatgatcataaaaacagtactggagcactttctacaagactcgccacagatgctgcgcaagtccaaggagtaagaagactgcgctctgctagtcttttccttaagaaaggaagcatggcattgctccatctactgagatgctttcagctggggttgggggtgggggcagagtggatagctcagtggtggagagcttgcctggagtgcacaaggccctaaaaacagttttgcaaagatatttttaattggaaaaccaggaacatcccatccagctgaagcggacttgaaccgcaatgggaagtttagacttcaagtagactaatgagctggctcggtacaggcatcagaggcccaggttccttctgtctgtctggtgcattgcctcctccatgttggctctgtggggctcatctcctagttagcaactagaactaaaagcttcttcatttctcctctgaaaaggacacaaatctgtacctcatccatcaaatgaaagccctttccataactcttgttgtaacagctcataaatcacactcaagcctgagccaatagctatctcaagagaaggctgttctctggccagcttaggtccccaccctgtgtggttcactgatctcacaggagaagagaagggaagagacacaccagagagttgacagcaatgtctatgacaatggtcctgattttttgaactgcacaacaactaattcaactgtagcgtttggtggttgacagtcttgtaggaagtgaatacttggtaacttggtttcaaggagagtgtaaatttctgtctgaacaattgaaacaagtggttatttaaattattggggttgtggttagactccccttttgaaaggttcatgtcctcacagcttatctgtacagtaggtgactccatgggctggaaggatgagaacagagcctgtccagccttgtgggttaggcacaagctgtgggttcattgagcaggtgaagctcttcacattctgagtagggccctaagcctggaacacatggctttaggagtgactcagctgccttattctgtttctcttgcaggccacgggaaccaggttggctttaattgcacagaacacagccaaccttggaaccggtattattatatcatttatttacggttggcaactgacacttctgctgttatcggttgttccattcattgctgtagcaggaattgttgaaatgaaaatgttggctggcaatgccaagagagataaaaaggaaatggaagctgctggaaaggtgagctaagtgggcatcagctaacagaagggctgcttgtacacacacctggcttgctttgtcatgttacacactacagctgataatatatgggctgtgcagaaatgttctacagtattgataatgcctggaactgagactgggatagttcttgtgacatttctagcttccagacagaacttgttataaatctctttcaaactgcctgaatgtatttcatcttgacatcatatcctggcatcattgatacaataaatgtctctgtttttacaagtgtaaggcagagtatagaaatgaattatctacaagaagattccttgtacctgtcccccatcctgatatgaatttttttattgttaaagttagccccaccaggtggcagtaattccctattttgtagttctttttttttttttccattttttattaggtatttagctcatttacatttccaatgctataccaaagtcccccatacccacccacccccactcccctacccacccactccccctttttggccctggcgttcccctgtactggggcatataaagtttgcgtgtccaatgggcctctctttccagtgatggctgactaggccatcttttgctacatatgcagctagagtcaagagctccggggtactggttagttcataatgttgttccacctatagggttgcagatccttttagctccttggctactttctctagctcctccattgggagccttgtgatccatccattagctgactgtgagcatccacttctgtgtttgctaggccccggcatagtctcacaagagacagctatatctgggtcctttcagcaaaatcttgctagtgtatgcaatggtgtcagcgtttgaatgctgattatgaggtggatccctggatatggcagtctctgacctgctgaaccagacccttcacttttgcaaatgtagacatgtggacaggaagtaagtccaagccaaagcacaatcctagtctctcattacgcatctatgtctaaatctacatataaacatgtgatctgcaaggcacacacattcagatggtaaagcatacatcatcctttaatgaaaacttaggaagtaaagcacatggttagtataaactgatagtttctacagcaccagtcttaaaattctctcacaagcatcactgcaaacactttcataactatgtatagtgggaaagacagggtctctactttatgaagagacaggctttggtactgagtgactgtctacctatctatggcacatgcttatacacccattactcaagagttagaggcatgaggattgccgttccttcaaagccattctgggttacatagcaatacactatcataaaataaacaaaaacataacggagactaggattgcagtgatacatgtttccacttaaccaattctgttcactgagatctgccacttcctcccatcagtggtcatggctgccattccatggggtcagtgtcccccagacacttgtcacttctgcaggcatggccttgccctggaatcagagttctctggaaacctgtgtgttgtgggtcctggacttcattcttgttcccaggtgctgagctgtttcttatgtactgtttttaggtaccgaaggataccattttcttcacactgtatgccacagactaaaaaacaacagcatcaacaacaaaaccaaccaaacaggcaaacaaacaaatcccccttaaaaaaaaaagttctgtcttccaccatcttgtagtagtccttcttcattcctcaagagaacatgatcataatgaagataaattttcattcagcaaattacacacaaaaaaaaaatatcttgaattgacccaacatagtgaccatggctctactgagagagttatattttggtagcaatgagaattatcaaaatttgacagaagtatagttgtaagaattgaggagtgttttaaacatacaaaaatgttcagttctcaatcctgtccttctgctcataccatttgatgctggagagaaatctcttagttctagtggcctttttggtcttggtgaaatgaggtgctattcctgatgctgtccaggttccttcataaacttcctaaagctgccatcgtggggatcggtggctgaacggcttacgatgcaacctaatgttaggtttgtgagatagtacaaatattttaatccccaacaatccaatcatggttcaattttgttttctaaaccaactgttggttcatgggtagaatcagggttagtttcttgtgtggtaggtagcttataatcctttgaaggtccttggaaggcagatgagggagtatccatgctagtttaagactagtggggtacacattagttctaccctgtggagcagcatagtgaaactggactcagagaagggagcagagacctgggtgagctcctctccactacttgctcaaaaagatacggtattttacttgggtacaattttttattagtgaataaagtatatcaggaattgggatagtctcatttcaatgtttcaaggaggactttttaatatgagcaattggtgctaggtagtaggaggaagatggcaaaataagattatagttataaatcatattatacatgtaatacaatcctctaaatataacactaatatatgcacagcctactaattagttccatcaggccatcctttgtgatccaaataacaaatttatatcatgaccatcttgagtagatcccgtttactgagctcaggcgcctgtcagaactagaccacaaagttagtccatggccagaaaatcaagggttaatggtaaacttgtttgtaactggtttctccatgtgcaaaatctcaaaatagacagagcagtcagtgcaactggctaagagcagacttggcatcaggttgcctggcagtcctcatgctccgagttaattctgagtctttaggctagtggggaaccccctctgcaccttacttcctcattctgtaaaaacaggagtaatactaccctacagggttgtcctcaggctaaaggaaactgtgcccttcaatgtggcaacattttggctgcttctactatctgttagattattattactattttaaagatagagttttttagcctaatgtaaaaaatatctttcacctacttacaactgaaggctacaagtgttgaagctgatgaaacgaaaacacaaaatttaacatctgataaccctagtgttgatgtgatttaaactcaatagctaatcacagtcaatacactaagggtggtttggctataagaattaaaaacaaaacagcaaaacttctgactggcttgggttaaagtggtttgacaaaaagaatgtatttcaagagaagacaataataagctcactgcctcttagacccacaggctgtattgtctctgagtctctctgtacatatgcctctgtctcttagtccatgcctctgtctcttagacacacaggctgtattgtctctgagtctctctgtacatatgcctctgtctcttagtccatgcctctgtctcttagacacacaggctgtattgtctctgagtctctctgtacatatgcctctgtctcttagtaccatgggctatattgtctctgagtctctctgtacatatgcctctgtctcttagacccacaggctgtattgtttctgagtctctctgtacatatgcctctgtctcttagacccacaggctgtattgtctctgagtctctctgtacatatgcctctgtctcttagtccatgcctctgtctcttagacacacaggctgtattgtctctgagtctctctgtacatatgcctctgtctcttagtccatgcctctgtctcttagacacacaggctgtattgtctctgagtctctctgtacatatgcctctgtctcttagtaccatgggctatattgtctctgagtctctctgtacatatgcctctgtctcttagacccacaggctgtattgtttctgagtctctctgtacatatgcctctgtctcttagacccacaggctgtattgtctctgagtctctctgtacatatgcctctgtctcttagtccatgcctctgtctcttagacacacaggctgtattgtctctgagtctctctgtacatatgcctctgtctcttagtccatgcctctgtctcttagacacacaggctgtattgtctctgagtctctctgtacatatgcctctgtttcttagtcccatgggctacattcgctctgagtttctgcctcctgagtccacaggctgtgctctctttaagcctctctgcacatctgtcttactcctcaaccatctgcattcatatctgctccccaaatgacggctacctctcagaatccacagggccttctaacaggtacttcctccagctccaggaaaccaagtctgattaaccagattcaggcatgcttccgtcatttaaatagcaatataaagccgggtcaattcatttccagttggagtctcctgcttgtgggcagacagcttgtttaagaaaggatgtgaccaaggtgaaaatggtcatgatttcaaatgacctctagaaaccattgctaaatcatgtcttctagattctaccctataaagaaagcaaggtcactaaatggctgtgattgaagtgactgcctgatggcaggggtttatgttccattctgggcttcaggtattcgcttccatgagcacccagagacttagctactctactgtgccaacccaagcccagttttgttagagacctggtcttaaagaacatattctgccttttgattttattggaaggaaccacatttacttggcacttacagtacaccagacagttatttttcacttcagaaataaaagtaacacttctaatgaagatctctctgttatagattgcaacagaggcaatagaaaatattcgaactgttgtatccttgacccaagaaagaaaatttgagtcaatgtatgttgaaaaattgcatggaccttacaggtaatatacatacgattgctgcatacctactgcttccccagggctgtgctactgttccttgagagcatttagacgtgtctgctcggaacaatgataatgacccttgtccgataattatctcatcaagtcccaggactcgatttcatttctattgtgaacagagtaagatgaggtctctgagggccgagagttacagagagctgtatgacaacccagtcactgcagtgtaacccagctgggtgactcaggatgagcattctctgaaggagctgttcacacttttgttttctttagtatgtaagttgacttaagggtatagcattttctcattactttatggaaaatttagaactctagagaatgaaaagctgaaaacattattcatgtgatcataatttaaagactgaaaatggtttcatactgttaagtgtggcattgtagtcacagtatttgacagtaggcaagtgatgcctcccgagtcagcatagcaccagggtcacagtatgcaagtgcacacaagcatacacaccgtcacgccacccaaatcaacaatacaatgcatttctttgccaaacacctcctgttttgagagtaagtaaattactgtggatgaatttagaaatctaataaagtatagccgcagttctaaattagaactaatgtaaaacaagaagctagatcctccaagcaggatctagcttggagaaccttggctgtgtatttatacaaacatcaattatccaacttctgtgaaactaaaatgagtcttaacatgtgactatagttgtttcgggacctgtaataatatatggtgttcagataatttcaatgttatcctagtattttggcacaatcatttcacaatatggtgtgaatacatgaattattaaataatgtcaataccacttatcatttgaacctacaccacatactaggtactatgatgactattcatggtgtttactgcatttaattccccaaacaacttttcattatagaactattccattgtgtaagtcagaaatccactgaatttcctacttaacctattatcttttaaggcaggagtttaactcaggttggccaggctaagctgtgctccttcagctagacacagggtaaaagaagctgaataatgtctatgagtattaatttgaataaatgatttgctttccaggaattcggtgcggaaggcacacatctacggcatcacttttagcatctcccaagcattcatgtatttttcttatgctggctgttttcgatttggttcttacctaattgtgaatggacatatgcgcttcaaagatgtcattctgtaagtagctttgaaaatactaggattaatttatactaatcctataatagggttttaataggcttatgcaaaagtgtgccatggggtgggggtggggggatcaaccatgcaaagaacagatcaaggagttcagtctcctggagctgttatcctggtaggcacagaaacctgatcgtgtcaccacaccaagcagtttcatcatcccaggtgtctaaagttcaccaagcttgtgacattgactgcaaagcatgaaggtgtatgtgaaccttttcaggacagaagtaagcagagaaaacggtttaaatgcagttaggaagttgttagagatagtggagtcaaatcagggtgggattaaatttctataaccaaaccatggccctgacaatgggatgaggagtctgcctaaagtctggcaaatctattcttttccttaactgtcaagagtcaggggtcaagtgtctgtgttacatatgcgcacccagtgttgcctgcattatttactatggagctgccctttgctagtgtctattgttggaggggggttttgttttgttttgttttgttgaaaagccattagattcagatacatgggtttatttccaagatgtctgttgtatgcgcttggtttgtgtgtttgtatttatgccaatacaatgctatcttagttactgaggctcagtagtttgtcttaaaaccaagtagtttgaggagatggctcagtggttaagagtactgactgctcttccagaggtcctgaattcaattcccagcaaccacaaagtggctcataaccatctgtaatgggatctgatgccctcctctggtgtgtccaaagacagtgacagtgtactcacatacataaagtaaatatgttttttaaaaacccaagtataatgatgtcctcagctttagttcttttgctcaagattgtattctatttttttctgtgtctgatttcataagattttaaacattttttatagttctgtagataataccattagtattttgttggagactgggtgcattaaatctttagattgctttgagtaatatgaacattgcacaacatacttccaattcatgaagaaggaagaattttccttttcttattctcttcaatttctaaaatcattattttcaatggctttccattctttggtcaagtttatcccaatgttatttacttatttttgtagctatgaaaagtgagattgacttgtagttttcaactctgactttatttatgcaggtctttttttgttcctggccaatctagttcaaggtttttttattttcttttaattttattgaaggactaactctgtttcatttatcttttgtacttgtttattttgctctgatcttctaatttttgtttgtgtattatcattattattattaatgtgtagtgtatatgtgtgtgtgcgttaaagaagagagggggagaggagagagacagggaagagaaagagagagagagagagaaagagaattatgtatttgccatagcacatacacaagtatggagggcaggagatgccttgggagtcttactctgttcttcaggcttgtgtaacacaccatttttcccactaagccatgccctaggcccttattcttgcatctctccatcctgggagtgcattttttaggttgtttgaagatttcttcttttgatgttggcactcactgctatacagtttcttcctggtatcagttctctgcagcctgcatgagaatctgaacactaggctgtgttcccaaatgcatctgttttaggagactgacttcatttctcagttcatcagtaagtagcctactgttcatttaaaagtttctgttctgtctccaggcacttagaaaatttctaaaatgtctttagttgttggcatctccccctgtgatcaggaagataaaaatttcaattcttttgatgtaagactaatatattttagaaagaactccatgaactgctaagaatgtatattccgtatgtgttagataaaatattctgttgatgtatacctattaaaaattatttattacagagattgctatcacatgtggtataggactatcaaaaccacacacttgggatgcagtgccctaaactaatgatagctagctctgcctctcattgagcctcttagatactttgggcttcagggtttttttatgttaaaaggggtatacctggcatctaaaatgagttgagatcacaaatcagattcagttgtaagccatttcaggaaaatgaaaacctttggaggtgtacaccaactcagaacgagtgccccacggccagaaggtgaacagaggaccagaccgagacagtgggtcttgcctcccctctaaattcttgttgctgtagttactggaatctcacagcaatgtatgtgggcttggagaaatgacaattgaagaagaactatgtaaacgttagttagaagtttgcctttggactttgaacactgtggagctaatttgaacccctctacctctctccagggtcttttctgcaattgtgcttggcgcggtggctctaggacacgccagctcatttgctccggactatgcaaaagccaagctgtctgcagcatacttgttcagcctgtttgaaagacaacctctgattgacagctacagtggagaagggctgtggcctgtaagtgtttgtctggctagatggctgagctctgtcctaaaggttttctttctatcacaatgacatgatcacatactttgcttcactgtgatatttatatggctagtatctcgacaacttttttggcatttaaaaaaatttaacacaactttagaaaagaaaaatgaagatatactgaaacaaaccagttttgataatagcttagccacttctacatggaggtctatgcaatataattcagtcacgatgatacagttagcaatttagattgagacactgctgcagcttttcttaagcctcagagcccttggctcagtgttaggtttgcacaaatcagaaacttgggtttcaatagcctgtctttgtagtgactttgtccaatcaataatcacatcttcattctctatcataatggacttgctaaccgtgtgaacttgtgcaagcactataccaaataggcacttcatgtttcacgattattggtaaagtttccttgtaataatacttttatttctaatgaggtcaatttaaaaaaaaatgtaaaaaacttttaggataagtttgaaggaagcgtgacatttaatgaagtcgtgttcaactatcccacccgggccaacgtgccagtgcttcaggggctgagccttgaggtgaagaagggccagacgctggccctggtgggcagcagtggctgcgggaagagcacagtggtccagctgctcgagcgcttctatgaccccatggctggatcagtggtgagcacattttcttaatgaattgattcatgaatgtattttatgtgatcaaactaatggtcgagagaaggtccaaaaccctacctgatataataactacagcctgtaaactctaaactgtatgaaataaatatagcaggctattagggcagaatatcaaaaagtattgtactaaaaatacaatataagactaatctctggtagccagtgggccttttgtcctggtccaatattatctatctatctatctatctatctatctatctatctattctcttatatgttacatcccaaaggcactttcccttcccttctcagccccaccccccaccacacctcctatctatcctcaaactcctcctcctcagttgcccttcagaaaagggcaggcctcccaggatatcagccaaacatggcatatcaagttccaataagactaggtggcatctctcatatcgaagctggacaaggcaacccagtgggagaaaaggaactgcaaagcaagcaaagagtcaaatgcaggccctgctcatactgttgggagtcccacaagaaggaagaccaagctacatgtactggctagttttgtgtcaacttgacacagctggagttatcacagagaaaggagcttcagttggggaaatgcctccatgagatacaactgtaaggcattttctcaattagtgatcaagggggaagggccccttgtgggtggtgccatctctgggctggtagtcttgggttctataagagagcaggctgagcaagccaggagaagcaatccagtaaagaacatccctccatggcttctgcatcagctcctgctttctgacctgcttgagttccagtcctgacttcctttggtgacggacagctgtatggaagtgtaagctgaataaacccttttctccccaacttgcttcttggtcatgatgtttgtgcaggaatataaaccctgactaagagactacacaaccatcacagaggacctaggtcaaacccaggcaggcaaaccattgaatctgattgttggttcaatctctgtgagcccctacaagccttggttagttgattctgtgggttttcttttggtgctcttgacacctcagactcctacactgctttcttccccttttccacaggagtcccaagctctacctaatgtttgacaatgagtttctgtatctgtttccaccagttgctggatgaagcctttctgatgacaattggactaggcaccaatctatgagtatatcccaacagcattaggaataatttcattaattcagggagaggaccagtcatgtttgtttcagtactaggtttctggactctccagcctctggtggcacacaggatatcgagtacaaaccaccagagacgcggtaccctctgggtaaacagcccgcgaaatctggactctagcgccccctgtgtctggggctgaatgaaatgttgtgttgattctgttgttgattcttatgtctgtagtttctgttcacttaactggattttccatctcccacagtttctattttcttgttgcttccatttcagttctcaggtcttgaataattttacttatttcattcatctgttcatctttttttggttttctttaagaattttactcattttctccacttgtttgcttgtagccctgactgtcctggaactcactctgtaaaccggactggactaagactttaggtccacctccctctggctcccaagtgctgggatgaaaagcatgtgccaccaccacccagcttttcctgaatttctttgatgtgtttatttatttccactttaaagacctctatcatctccacaaaattggttttagggtcattttcttgtgcttcagctgcattagaatatccaggacttgctatagtaagatagctgggctctagtggtgccatattgccctagttgctcttaattgtattcttacaccagcgtgtgggcatctgggttaggggtaattataggtttaggtgtcagtttctgagtttatctttgttgaacccttggtttctggttcctctctggtcttctggcctgagtggcctgtggttctggtgacaggaaagctctcaggtgtagtagggtgtctccactaggattttgacagcctgcgggatctctgggattttgtgtcccagtattgcatctgtggttctatgattctgggaactgtcatagcctctggggttccagataataggattgcctctggtagaacagggagcttcaggggttttgggtaccagcatggcctctgggttttcaggtctctggtattctgggtaccggtttggcctttggtagagctgagggcttctgctgaagttgtgggcctggatatgaggctgaggtggtgggagtgctgttggagactgtttaggactaaacatccaaaacaacccaagtgggcacaagagcacatgcaaagcaaaatctttatttgaattaggcagcaaaaatttacaggtcaggggcaatagcacagacttgtgagctgaccaagtccccaaatattcatctcagtaactttttaagtagaaaaatcacaaatcccataagcatctgtgccaaaatacagttacaatttttcatcaatcaggatcatttgttcttttgtggctagaaataatcattatgttttgtggaacaaaggaagaataagaagaataagaagaagaaagcaggctagccatctggaaagtcttcagcacctctagaacatggggacttgagcttaatttcacttatgttcaaaatggagtctaagaacaaaatggcagtacttaggacaagtctcatttgtttgctcccaacaagacagctgccagagggtggagagtgttcaggtgatgagcaatatgttacttggggttccgggtactagcatggctttcaatgtagaagagtgttgctgccagagttgtgggttgggaaatctttttaaaacaaaactgagctaacttctggaggcaggaaggagaccacatccttcactcatagtaacaggaacaaaacaggaacaaaattaacatcagaaccccttctcctaaaggctctgcttcctctagatctttactttcacttgtttcttctttgctttccattaaattcttaccctgtgttgggagaagagggggaagctgaagaccggcagctctcagagagaagagtaatgccaaaatcaaccacagagactctccaaacaggcatgtgcctgcttatttttacccagtaccctctgctttgcctaatccctctaaacttgaactctgggttctctgacattgactctcaagctctagcccagtcacatttggctttaatcatagatgtatggcccatacctgcttcctcaagtcaagatctgtctctacctgatatagtcaacatgtagaagctgggactagagagatggctctatggacaaagtgcttgcagttcaagcacaaggacccatgttcaatccctagaacctgtctcatgcccagacatacttggccaacacaaaatagactccatgtttgtttggttgacttttttcagtttttcatgtatacatttttgtttttatcttgctgcgtgttttgattttcatctttttcttgcttgtttgtttttggagagagagatcatgcacgagagctagggatattgggaggctgtgaagagtccaggaaggaaaagaacatgatcaaaatatattgtgtgcaaaaatttttaataaaaaagtaaatttaaaagttctggcctagaggtgtctgtccgtaatcccacactagggaggcagagacaagcagacttaggacaagtctcactggacaggtgctcactggctagccaaatctagctaaatttgtgagtttcaggttcagggagggaccctggctcaaaaaaagtacggtggaaaaatgattgaggaagatacccaacatcaacttctagcacatgcatgtgtagacatatgcatgtgtgcatgcatgatcatatgcatatattcatgcatgcaaatatattgcacaaaaatatggggggaagtttaaagccagtggctttcacagactagaggaacagggaccatcttctcaaacctagggctatactgcattaccaatctgctcttttcttttcctggtatgcctaggagagcaaggagagtcaaggttattctagggacagcagatctgagggtcacattttgatgcagacttcctaaagacagatggcacagacgcctggtggagggcacatgaagacaaaagacatgttaaaagacatggccaaatgtgtttcagtttaccatctagaccacagcaagagaggcttgcgataagagtctctctgctaaccatgctctccttcagcatgttggcattagacacgaagcttggcatttcacagctgcaggtacacgctctaacagtccttttctcagttcagccacttgctatttagaattgtttttttttttaaccttaatagtttgtggatttctgtttttaagctcttagatggtcaagaagcaaagaaactcaatgtccagtggctccgagctcaactgggcattgtgtcccaggaacccattctctttgactgcagcatcgcagagaacatcgcctatggagacaacagccgggtcgtgcctcatgatgagattgtgagggcagccaaggaggccaacatccaccccttcatcgagacgctgccccaagtgagttaaactccaaacttctcagctgaaatcaaggcaggctcatttttctccctgaagctattcccaaagttcttgcaatagtctcatagctaaggggctgatgtatctgggagaagacactggccttgatgacaggatgtttcatcaccctcaggccatgagacaccaatgaggcaagaccttaccccaggtctcacactagtgttctagactacatgtgcacttcagttaggtgctgtccatatgctacttccccacaaatgtatgctttgattttgagaatataatagatccacacatcgttgtgtggaatacagagattttgtgttttctttatctagtctcccctaatattaacctcgtttagaactataacacaacagtaattcaggatgctgacatccagaccagtttactcatgcttgtgtgtgtgtgtgtgtgtgtgtgtgtgtgtatgtttctgcacagctgcagtagagctatgcatcctaggcagccgcagtacagctgtgtatcctgggcagctgccatacagctgtgcattctatgcagctgcagtgcaggtacacattcttgtactgacactgaagatacagagcattttcaacacatgaagatcccttgagctaccatccttctattcatataccccttcctcccacttcagtctccacagctctggcaactctaatctgctctcagtttgtatcacttgccattgtagagacagtatgtacacataggatataaacttgcatggccaggttctcacccagcacagctatcgtcttatttgctgactgacattccatgcatggctaaaccgcaggttacctgtctcctagagaagcttaccacagtcaatctaaatttgaggttgtaagttcctgaatactgatgctttacataaatgtaggtcctaatatttctggaataaatactcagcagcaaatcatcaaagcatatcctaattgtctgtttgttttacaaaacaatacaccaaaagacttcctgtaaccaccacttataaccctcccagcaagttctaaagactttccagcatttaaaatggctatgaggttttgttaaaaaaaaaaaaaaaaaagatttatttatttttttttaatttatttatttttatttatttatttattatagctacactgtagctagctgtcttcagacacaccagaagagagcatcagatctcattacagatggctgtgagccaccatgtggttgctaggatttgaactcatgacctatggaagagccttcagtgctcttaaccactgagccatcttttgagcccagctatgaggttattatttgcaacagtttgataggaatataagatacaacacagtggtcctcatatgaatctcctaaagggaaagtgaagtccctgtcacttattatgcatttgtagctatataacctctttggtaaaatgttctagggtttgtttttttttttaactgttgagctttgagtcttttattctaattacttttagatatggattttatgatatgtatttttcttcaagttatcatttggtttttttttttttttttttttcctcttaagcagaggcttaacagaacagaactttcaactttagtgaatttattttcctttcatgcatcttgcttctgatgtcaaatctgtcccaaagtctacacattcctgtctggaagatgttctctattttaaaggagtctggttgttttacaacttaccttcgagtgtatggtccactctgtgcttcatattacttgagtcctatataattatggcaagacgacttccactagggtgaaggtagaggcacttcattttatgaacgcttccagaactcaaggcagaagagcttaattgtttccctcctcccccattctattctgctgggaattaaaagtgagtcacacaaataaacggctttaacattttctgtgatgtctcccagttaatcgctggtgctaggcactgactgaatcaagtgctgacgactgcaggaagactttaactttcaccttttgacctgattttgacactggaccttaggagatgaattcacacgttgcacagcaccctgagctttgcaaagaaatatacatctaaatatacatctgccatcctattctcttcccaagcctgaaagctttcctaaatgcagtctcctaaagtatacaaagttttctttcctgtatttacctcctcttttaaaaattccccttccatcttatcttcacattccttccttctcttttgtattgtttttagataataattataattaacatttaagtagatattgattgctaagctattaaaagagaataaactagtttttacatggatcaaatagctacttcaaactgtaaaaaaaaaaaacaaaaacaaaaacaaaaacaaaaacaaaaacaaaaaccctttgtgagtctaagctgtgattccacggaaatcagattaaatgctattcatgttaatggcaggaatttaaaatagctcaatttcttgtaacagaataccactgaaatctacaggcactgtattttagttcagtcttaaaggcaaatattctatggaactgaaaatacattactgaaaacaatatcttattatagaaacatctattgattttcatttttttcttgtaaagacaactgtcttaaaactgtattacctttattgatgactaacttgcagaaatataacacaagagtaggagacaaggggacgcagctctctgggggccagaagcagaggattgccatcgcccgagccctcatcagacagcctcgggtcctactgctggatgaagccacgtcagctctggatactgagagtgaaaaggtctatctccacctgtcttactaacctagcagaaagagtgatgaggaaagccggcatgagaaaggcagacactagacttagatgtgattattttgaagtaatagaatgtgtattttttaaaaaaaaatacatatatatttctaaacataaaagcagcagtcaaaaggaaaaatgctgcaaaaaatcacaattttgacatattagttgtaatgaaaaaactgaaaagggcctttaaaaggaacttaagaagataatattggcaattaattagaaagtttcaacagttttgagggtcattatggaagcccatctgtatcataattacaaagcaaaacaatccgataaggggcacaatggtagccatgtaaactacacatgccttaagccgtgttcacagagattagaaaaaggaattatgatagttgatgctactcagatggtaaagctttagaaattcatcagccttgttactgcagttctcagtacaaagttcttgttgggctttcaacaggttgtccaggaagcactggacaaagccagggaaggccgcacctgcattgtgatcgctcaccgcctgtccaccatccagaacgcggacttgatcgtggtgattgagaacggcaaggtcaaggagcacggcacccaccagcagctgctggcgcagaagggcatctatttctcaatggtcaacatccaggccggcacacagaacttatgaactcttgttacagtatatttttaaaataaattcaaatcgtttttcactttatggcgtgtaaaagaagtttctcattggagttacaaaatatagatctatcttattccacatcagtttaaagttcagccttgatgcttatgctacagcatctgaaactggaaacctggaagcaacatctgcctggacaaatgtgacccttccttgacaaaacagaagaattactacagcgtggctctctctccctgagctgtcagcatccctcagagagaccagacatatgcatgggaagcatgaatagaaatcccaaatgaggacacattcccatggttctaaataggtagacatgtgacaggatggtacgggaacaagtttccaagtacagaggagaactaaattagcattctgaatccctctactctggaatagaaggtgttgggtgtcatgaccatatggattgtttattttctttcatcaacacattcaatcctacacattaatgggttcaattgtggtattgtcacacttggaatgtgcagcagcagatccaaccactcacattccctccccagtccttggtaaacattatttctgtgttcaggtggtcatattttagcttcgcatgggcatgcagtactcatctttctgtctggctcattttgcttaacatctgtccactccatccatattgctgtaagtgttgacttccttttccttggctctttccctcttgtgctactggagatcaaacttggggtaggtatgcattgtaatgtagccatcccgcggccacagagaactgagtacatttgaaagggaggctgggaatgaaataggaggggctggcaagagaagaatgaagccaagacaaaggttctctgatcaaggctcaaagtttaattttcagctctgcgtttatctaggggaaaacccccaaaacccatcctttgtttcagctggattctgctgcaaaacaaactcagcagctcagcaggcagtctgcttctgtaagaaattgcaggtgagcaaggcaggagacttccacttaggttggaagactccactcaggtccgcagaagaccgactggactgtggcaaacaattaaggtctgatcagcctgctcagggatgggggcagggcacattctaacactgagctaaatgctcaggcttcttccttacgactgaataatattccactattaaatacagcacacttctttatgcatttatctattgatagacatccaggctgtgtatcttagccattctgaatactgctgaatgaaacacagacatgtgggtatgcatttgctgtctcatttgcttctctgtcgctgtgataaaacaccaactaaaagcagcttgtggaagaaagaagtttatttggcttacagacttcagtccatctagaaaagccaaggccggattctggagacaggacctgaaacagaagctgtggaggaattctgcttgctgctttgctctccatggatcactcagtcttacacagcttgggcccacctgcccaggggtagctccacccacattgggctgggcccacccacatcattaatcaagcaaatgccacacagacacgcccactcactaatataatggaggctattcctcagttgagactcctcctcccggtgtgttagttagcaatcaaaacataggcaccagacatgttcactccatgtcctgtagatatacactcagaagtgggttgtctggatcatatgatgattcgagtttcagcttttgaactaaaatctctcttgttctccataatcctaatagtaaaatatagtcctatcaacagtgcatgcacattcctttttcagctacatttgtagattttttttttttatgttcgtagacatagctggagtgctgcgttactgacttttctgttgctgtgataaataccatgacacttggcttccttctttcatttcatacattcaatgaccttgttctgcattgctacaaacttcttcctctcttttcatggcctctcttttcataacctacacacacagacacgcctacctagattatctttaggactctactggggcttctcctaaacgatcatcatagctgtgtttgttgactatttaccaatggaaggaaaggatttatttcaagcttatagctctacatcatactctatcatcaaaagaactccaggcaggaactgaagttcaagccatgagggaatgctgcttatttgcttgctgtgtggcttgctcagcctacccacttgtaacaaccaggactacctgctgaggggtggaactgtccacagtgacctggacccccccacaccaatcaagaaaatgtaccccaagtctgtccgcaggccagtcttgtagagggcattttctcagttgaggtgcccttgtctatgactctaacctatgttgagttaatgttgaaaacaagtcagcacagaagggttgagaaaggtcattagtccctttacctgagtgtccagcctcctagtggagttgtatgcaagtattctctgacggttgtcttggggaaggggctgaggtggagaggatgaagggaaggagccccttctacacagccgtgggaaagccatcatccctgcgagtgctaattcttctagtgtggctgctttaaggtcaactatgcacctgtctggaacccttcccctgtttgctctgtaagtaggtctaacacatttattgtttttcccatgtaaactttgttgaaatcatatctcactttgtcattaagatcttaggagaaatagatgttacataaggaaaggaattttaggaacagtatgtgagagaacataagcaatagttttcagttttatttttcttaatgattaccagtttcattcatcttctccagacgtcaacatcttattcttctttacacctggatacagtttcattgtgtatatataccatcatttctctagtcattcatttgctgatgaacccctacagtgatttcatgtctcagccaagtgaagagtgtgactataaatatggacctagtatttcttgttacgtttttttgtagacttagaatcgtttgggtgtatgcccaggaggggtattgctggattgtactgcagctcttcttttagatttatgagaaccctccatactggtttctgtagtgactgtttcagtgtacacccccccccccaaacaataggcaaggactcctttctctatacatctttgtcatagtttattgtttgccttcctgatgtatgcccactgcctgggacgagatggaatatcaatatagtttagtttgtttttgatgcagtgtctcatgtggcacagggtagccctaaacttgctgttaacctacactggctttgacctcttaatcctccagaaagctggattataattgtatacttcaacgtagtagggttttgtttgtttttatttaaaagaggctctgtccagactcctaagtgtttttctgttgtgtgcatctacttttccagtggaatttatatgccatatgctttcataatggtagttattgttcaggtttgattgtgctttcatgatggtacttaactgttcagttttggttataggactccactaagtatcttttctaaggaggatcctgcaatcaggaattccctatgtttaactgtgatgtgattctatttctcctttatatcatgtctacccttcctgagtaatgtcacatagtacatgctaggcaaacgatctgtcactgaagtacactaaagccacagctgtcatatatggctgatttttttttcacaccattatctatttggcttcctatatgccatgaatgtttatgtttcctaagatcgaggatattttctgttatgatttaactcaatgggtctctctaagcctttaacttttgttttcacctttggatattcaaaaatatgtgggtatttgtataacagtgctcaatgttttaagtcttatcaattcttcattcattgttttttcctctcttcctttccctccctgagcttcactccaattcttaagcatcttcaaaaacctatttccaagttcagataatttcttcttctccatctaacttgtggccattttctgcagtccgttttacttaacccactgaatcctttgaggtttcatgctttattttttcgacactcattttgctgagtttctcattcataccccacatcatcttcccaatttcatggtactgtttaccccgtggtctcttatactttattgagcactatgaatatttctttaaattcttatatatttgcttgtatgcaaacatgcacagggtatgtgcagtgattaaaacattttgatgtgtgtttgggaatgcattaacactcaggaactaatgaaagactcagaaagtaaacaaacttagaaatctcaggaaacttccaacacttgagagaacacaaggcccctccttgggttcatgtaaatagtaactatgtttgtgggaaatgaatctctgactagattcacttaagtcacaaagagtggtccagggacacagccttcctgagccatcccatgcttgggtgggctcttcactgctgttgcttcttttgagatgtacatgctcctataagcaactccttacccataatcttgtaaaaacaaacaaacaaaccaaaactcagtaaactcacgcactcaacaagcgagacttgggtacagatgactcctgtcgtcagtctgtctggagggtacagacacgtttttacacatcttcaggaaaagccacttaacgggagggccaacgtcaacctgtgctctgtgctggttttgttgttgttgctgttgtttttaagaccaggcctttattggccttagactcacactcaccggagtgtgctccggtggctggccagcgagccccagggatcccatctctgtgtcagcagctctcaggagcatatgctgctacgcttggctttctacacgggcactgaatttgggctcttctgctacctaacaagtacttcagtatccccggtctccactcctttaccaggtagtttgtccctgtaagtccctctacatttctgcctagaggtgttttcctttggaggcatgctgccttattttctctttcatttacagctgccttgagatttgtgcatctggtagatgaagcatctccttcgtgggctgccctaagcagcttacttctgaaaaatgtatattgaggtattgctttgctatagcgttggctttaattccaggtgggcaccatagtgttgtctcatctggcttctttagtgtgtttgacttgaagacagttgtttaccttggtggagctgtctctgtggggcatctgaaagtggggacacttaatagtccagggaagtgtggtacaggttttggctctggcagtggaaatggtgtcctctctgaacaatgggggatttcccctaacacagctgacgccacctgtgccactagcaagagcttctggtactggcggcctcagcagcggcgaagccactgaagcacttctcctctgaccagtcagtggtagacacagaaggaagttgatgggatgtggcggtgggaggaaacacagccctccctggtggagaggcagcaagaactatgtatgtagcaggaggttccatggtcttcttctctgaaatggcagtgcacatccaggaactggactatggctggtactgggcactgttccactcagccctgcttgggcatgtgtgttggcaccgatggttggagctccatctttgactacttcagctatagcatgcataagatcagagaagcagtggaaactgcattctatttaccttatcagtcaccttcctgagtgacgttcagcagcggcagcaacaatgacagctgaggtatacttggttcttttttgtggtagtgactatccaaaaaaaggaccctggctagagctgaggaaaactactgtggagcaagctctggaggcacatacctttaatctcagtactttgaagatagtggtaagtggatctccattagttcaaggtcagcctagtctacataagtgagttcctagacagttaggactacatagagagacacccccaatctcaaacacacacacacacacacacacacccaataccaaaacaaaagaaaaaaataccagctgtgggaacaccctcctttctagagctatgaaaacctgtcagagcaacagctggaactcctgacttgttcaattctcccttagtaggcacctgtgggcaggacacaagctgggagcagtgacccttctgtgccctgtaataggtaggcaccctgagagaagtgggaacatctgtctaagtcctacatactgctgatcctgttctcgcactcagacgacaaacaccccatctcgcagtttacacattctgctgggccgagctggagtcacagggagcgaacacaagcaagtaacatctgtaatttcagagaggaataggcaggaggttctgccctttaggccagtctaaaacacttcatttccaaagatggcttttatctgccacaccctagacacacactgtaagatgtgagatccccttccaaaggtaggacttcccattttctctcttaatgactggaaagttctcacagtcacttcaaaaactgcactacacacacttgtcttttccaagtgttcgaggcttaccctccacacagaattgaacctggaccctctgaagaaacagctggtgctcttcatctgagccatctcttcagcccaggcactacgttttaagtagtttatcacacaatattgatctgatatcagaaaatgtggagaaagcaaacaatcattgttttcaaccgtaaggtgaaactggtaagattctggatgctttattctttgagaatataaaccactttgaatagcacccttgaagcgaacgtcttcaagccaccattatgaataacactgggaaataattgtaaagttctgagaatcatactcaacatttaaccctttaaaagctgctagctctaacaattaggttcaaatggaaatgctttaattttatattcacaaaatgaattgcaacatatcataatgagttttgctaatattcttttctgtggtagtgtaaaaatttctaatacaacttgatccttttgcctgctcaaaggagctattttagatcactattgtacaatagtggttttcccatgaactctcacaggctgtactcctgtgctgggtgtggaaggcactgatgtcagagaaattagcttctaaccgtgtgctttatccctctggcaattagaaagtattaaagtgcttgagaaatagactctataatcatgttcacagaggacttgcagcctacacatgtgccaacaaaactattttaacatcagagtaggatttgctttgattgaggcttgttaagtaggattgttaagatatatagatttgctttgttgaggcttaaacattgcatagttctattcactatatctgactttgcattgtggttgcaacacaggagactttaaggtagaataactctagagagcatcactctcctaaccctacattaacaggcttcctttaagtcaacattccttccatgtcacatcaccatcctactcttcgtaccaagtttctatgatctgtatttgtctgagtctctaaagatgagcggtgttcatcagctgtatcatatcgtggaaagcatgaaaaatcatctgaacaagcttttcagcatcagtctccggacatgacctccaggatgaacatgccaccacaaacctgagaaatacacaacacatgaacaattatgtcatagttccaagttctgatgctggatgctctacctgtctcctcaaacataaaatgtgagttcttgatgatattaggtctatggaacttgacacaagaagacagagccacagttaacacattaacacaaggctatggaatgcctacctcaatggattagacaatgcctgaggacaatagtccacaagcaacctctggagcagaagtttatgtctagacacaaacaaccaaacatcaaatgatcaaccaaccaccaaccactaatcaagcaccaaccaaccaactaaccaaccaccaaccaaccaaccaaccaccaatcaaccattaactaaccaaccaactaaccaccaaccaaccatcaaccaaatatcaatcaaccaccaactaaccaaagaaacaaacaaaagcccacaagaaatttcttcctaaaagttgatactagaatgatcatactacaatatgatctcttgtcattctttgtaagaaaatttgacctgtttatcagttgacaagcattttaaataggacagataagagactaagaaaagctatttctacatgagctaaagtggtctcttacgacaagtcttcccttccaccatctcctaattgtacaattccagatctggaaagtaaaaaaagggaccccagggagctcaaggaaataggagaaaagcctggcttttgctagactcccaacagaacatgtggttcctacttgggactagccttgcaaagtcttatggaatattatggataaatatcaaagccaaatatgcagggaaaagattctggccagctatgcaaccttcacatcattggaaatgatggcaaagcacatcttcaatgtgggctttagctcaagcaaaatggaataaaagcctactctgcccccctgtcctagtatctaacgatgaagcttttaggggtagaatgttagagaatgagcctgagccgccttcatgctaagacgctaagctacagttcagttacactctcggacagaggaagctggccttgggtgcctttagcatatactgaaaacatataggaatcccaaacttgttccttatttttatctaataattcaagagcaatgagttattttccaactataatgtgaataaaattctcaaatatttagcaagatcaaaaatatttctaaattatctgcatttaagaatttagtttttaaaaaaatcactggaaacaaaagtagtaatgatctatacatattatcactcagttttctgcatcccacatgaagtgccccaagcacaacttcagtctgcaggtagacccacaaatatgcagagctacatacatttccaattttaacttgccaaaagtacttgtatggtcaactatgttttttaaatgtacaggtttcacagatgatgtgactgtagcacagggaaacatccttaaatatcattctgcataaagccccagacagtgattttacaaagatcccaaaagcagaggagagaaatatcaatacatgttaattactcgggtggcaaagtagctagtcctgtagacaatggcaggtaacatgaataaaatcatagtgtggagaaaacgaaaaccagggacaagttacaattcttactgtgtctgaagaacaaagggcaggaggcttacctgtcatctctgatgtggtagaaaaatccatatccattgtgtaccatgggaaccacaacaccctgaactcgtaagtaaccaaccaaacttgttgagagcacaaaatttccacctcctccactgtgtagcacaaagaaaagatgtccattaggctgcagatgccatgttctgacatccagagagaaccctgtgatgcacacaatggaccactaccccaagttaccttctggagaaaagtgggtcctcaaatagttctggaacagggagaccttcctcttttgctatgagcaaaagacctaaaaggtgacggtcaaatcctgcaacgaaatcccaagcctgacatcagaaaaaagagtttccagaaaagattttttaaacaagaacaattcaagctcaagtaccttttccatgtgaacaatctttcatcatcttattatgcttggcaaaagcttctagcatcttttgctgacgttcaaggagctgtgtcacaaatgaaaacagttaattttcaaaaaaaaaatctataaatcaactcaataccaaactgtatgaaacccaagaagcgagagaagactcagctacttgttggaacggggtaaaggggaggaggaggagaagagcctcggtagaactatgacgcttgcttctctctttccttagtcctattgccctcccttccccatcagccttgattttttttttattgtcttcttccctaaaattggaaagagtgctgacaactgctttgagatacctgtaatattaataaaaaacagtggaatttaaaaatgaaaacataactacaaaaataatccctgtataaacttacataatcatgtctttccaaactcaaacaggcaagagttcacaataatagggaagaaacatactgttgtctaaatacttaaaaatattcaaaactaaacatatacaccagttctggtcctagtgacttccaacaagaactagacattcaactacatgatgaatgcatccttttaaaagtctttggaaaattctactttgtattgacgctggtctaaaggtagatgaacattgctgaaaatctcagtactgaagacatctgccttagaaaatgctaccaatacgttttccagatctgaggcctagtcctcctgggcacatatgtcagtggcaaattaatattttgcaaactttaaggaaaatgccttaaaataatccagggaatagaagcaaaagccgccattgagaggccaactctggtggccttttctgtccaatactcacactagcagagggatcctgcatggactggcaccacctgacggcctccactgtacaagatcgcacagtctctgttcggccgtggtaaaagtatcttgtcatagctgtctcatagcagcaaccagggctaaaatagttttaaggatatcagaagattattctctaatttatttctaattttctaatatattacaaatatagtcaaacactaaaacaattttccaatcacagaccaagactacaagtcagtctaaaagcgagactttcaacaaaggctgttttcaaaaccaaagagtaagaaaacagtctgataacatcgactatttttttctccctttattttgttttcttttgagacatggtttctctgtacaatatccctggccgtcttggaacttgctccgtataccaggctggcctggaactcactgagatctgcctgcctctgtctctcgagtgcttggattaatggtgtgtcctgccaccacccagctatcacaggttctttactatagctcagcggctttcaggctgcacgcactgcaggctgtgacaggcatttgccaagaaggtccccaatggcctctgcttcctgctattcgtgctttgacactgaatgtggactggagctagtgcgtttatttaatgcagagaatatagcaaaagtgaagggctgctaggttacacagagagacgttcttttcacttccttgctctgaaaaaggccaacaactatggtgggaatggccctatgacatggacaagacagttgaaaaccgaagagaaagagcctcacactagaaaacattggggaaaactacacagaagttaaccagtttcttcattaattaaaatgcagtaggaggcagacagggaatggaatgcttatgcttaactattaaaagacagatcaactgagtgcttatacagcatgctgccctacattcccaatgctgcctgtgaccaagcagtttgcagcaggccaggcttacgtaagccagaaggaaggaaggccggttttttattaaaggttgctcaggctttgcaaaactgtcaaaaaaaaaaaaaaagccagcattttcaggccaatatgtggagacaagagacaagttgactaacaccactgtcctttgcccaaggaacctgttatttcagaaagaatgcaggatggacaggaaatcactggtaaggcagaggaaactcaacagggctctcggtactatcagtagcaggtaaaacaataccagcattcacagtacaagaagccaggagagacgtggccaagatcactagtaggcccatccatgcatctca

SEQ ID NO: 12 - DNA, 89506 bp, Mus musculus
tgagatgcatggatgggcctactagtgatcttggccacgtctctcctggcttcttgtactgtgaatgctggtattgttttacctgctactgatagtaccgagagccctgttgagtttcctctgccttaccagtgatttcctgtccatcctgcattctttctgaaataacaggttccttgggcaaaggacagtggtgttagtcaacttgtctcttgtctccacatattggcctgaaaatgctggctttttttttttttttgacagttttgcaaagcctgagcaacctttaataaaaaaccggccttccttccttctggcttacgtaagcctggcctgctgcaaactgcttggtcacaggcagcattgggaatgtagggcagcatgctgtataagcactcagttgatctgtcttttaatagttaagcataagcattccattccctgtctgcctcctactgcattttaattaatgaagaaactggttaacttctgtgtagttttccccaatgttttctagtgtgaggctctttctcttcggttttcaactgtcttgtccatgtcatagggccattcccaccatagttgttggcctttttcagagcaaggaagtgaaaagaacgtctctctgtgtaacctagcagcccttcacttttgctatattctctgcattaaataaacgcactagctccagtccacattcagtgtcaaagcacgaatagcaggaagcagaggccattggggaccttcttggcaaatgcctgtcacagcctgcagtgcgtgcagcctgaaagccgctgagctatagtaaagaacctgtgatagctgggtggtggcaggacacaccattaatccaagcactcgagagacagaggcaggcagatctcagtgagttccaggccagcctggtatacggagcaagttccaagacggccagggatattgtacagagaaaccatgtctcaaaagaaaacaaaataaagggagaaaaaaatagtcgatgttatcagactgttttcttactctttggttttgaaaacagcctttgttgaaagtctcgcttttagactgacttgtagtcttggtctgtgattggaaaattgttttagtgtttgactatatttgtaatatattagaaaattagaaataaattagagaataatcttctgatatccttaaaactattttagccctggttgctgctatgagacagctatgacaagatacttttaccacggccgaacagagactgtgcgatcttgtacagtggaggccgtcaggtggtgccagtccatgcaggatccctctgctagtgtgagtattggacagaaaaggccaccagagttggcctctcaatggcggcttttgcttctattccctggattattttaaggcattttccttaaagtttgcaaaatattaatttgccactgacatatgtgcccaggaggactaggcctcagatctggaaaacgtattggtagcattttctaaggcagatgtcttcagtactgagattttcagcaatgttcatctacctttagaccagcgtcaatacaaagtagaattttccaaagacttttaaaaggatgcattcatcatgtagttgaatgtctagttcttgttggaagtcactaggaccagaactggtgtatatgtttagttttgaatatttttaagtatttagacaacagtatgtttcttccctattattgtgaactcttgcctgtttgagtttggaaagacatgattatgtaagtttatacagggattatttttgtagttatgttttcatttttaaattccactgttttttattaatattacaggtatctcaaagcagttgtcagcactctttccaattttagggaagaagacaataaaaaaaaaatcaaggctgatggggaagggagggcaataggactaaggaaagagagaagcaagcgtcatagttctaccgaggctcttctcctcctcctcccctttaccccgttccaacaagtagctgagtcttctctcgcttcttgggtttcatacagtttggtattgagttgatttatagattttttttttgaaaattaactgttttcatttgtgacacagctccttgaacgtcagcaaaagatgctagaagcttttgccaagcataataagatgatgaaagattgttcacatggaaaaggtacttgagcttgaattgttcttgtttaaaaaatcttttctggaaactcttttttctgatgtcaggcttgggatttcgttgcaggatttgaccgtcaccttttaggtcttttgctcatagcaaaagaggaaggtctccctgttccagaactatttgaggacccacttttctccagaaggtaacttggggtagtggtccattgtgtgcatcacagggttctctctggatgtcagaacatggcatctgcagcctaatggacatcttttctttgtgctacacagtggaggaggtggaaattttgtgctctcaacaagtttggttggttacttacgagttcagggtgttgtggttcccatggtacacaatggatatggatttttctaccacatcagagatgacaggtaagcctcctgccctttgttcttcagacacagtaagaattgtaacttgtccctggttttcgttttctccacactatgattttattcatgttacctgccattgtctacaggactagctactttgccacccgagtaattaacatgtattgatatttctctcctctgcttttgggatctttgtaaaatcactgtctggggctttatgcagaatgatatttaaggatgtttccctgtgctacagtcacatcatctgtgaaacctgtacatttaaaaaacatagttgaccatacaagtacttttggcaagttaaaattggaaatgtatgtagctctgcatatttgtgggtctacctgcagactgaagttgtgcttggggcacttcatgtgggatgcagaaaactgagtgataatatgtatagatcattactacttttgtttccagtgatttttttaaaaactaaattcttaaatgcagataatttagaaatatttttgatcttgctaaatatttgagaattttattcacattatagttggaaaataactcattgctcttgaattattagataaaaataaggaacaagtttgggattcctatatgttttcagtatatgctaaaggcacccaaggccagcttcctctgtccgagagtgtaactgaactgtagcttagcgtcttagcatgaaggcggctcaggctcattctctaacattctacccctaaaagcttcatcgttagatactaggacaggggggcagagtaggcttttattccattttgcttgagctaaagcccacattgaagatgtgctttgccatcatttccaatgatgtgaaggttgcatagctggccagaatcttttccctgcatatttggctttgatatttatccataatattccataagactttgcaaggctagtcccaagtaggaaccacatgttctgttgggagtctagcaaaagccaggcttttctcctatttccttgagctccctggggtccctttttttactttccagatctggaattgtacaattaggagatggtggaagggaagacttgtcgtaagagaccactttagctcatgtagaaatagcttttcttagtctcttatctgtcctatttaaaatgcttgtcaactgataaacaggtcaaattttcttacaaagaatgacaagagatcatattgtagtatgatcattctagtatcaacttttaggaagaaatttcttgtgggcttttgtttgtttctttggttagttggtggttgattgatatttggttgatggttggttggtggttagttggttggttagttaatggttgattggtggttggttggttggttggtggttggttagttggttggttggtgcttgattagtggttggtggttggttgatcatttgatgtttggttgtttgtgtctagacataaacttctgctccagaggttgcttgtggactattgtcctcaggcattgtctaatccattgaggtaggcattccatagccttgtgttaatgtgttaactgtggctctgtcttcttgtgtcaagttccatagacctaatatcatcaagaactcacattttatgtttgaggagacaggtagagcatccagcatcagaacttggaactatgacataattgttcatgtgttgtgtatttctcaggtttgtggtggcatgttcatcctggaggtcatgtccggagactgatgctgaaaagcttgttcagatgatttttcatgctttccacgatatgatacagctgatgaacaccgctcatctttagagactcagacaaatacagatcatagaaacttggtacgaagagtaggatggtgatgtgacatggaaggaatgttgacttaaaggaagcctgttaatgtagggttaggagagtgatgctctctagagttattctaccttaaagtctcctgtgttgcaaccacaatgcaaagtcagatatagtgaatagaactatgcaatgtttaagcctcaacaaagcaaatctatatatcttaacaatcctacttaacaagcctcaatcaaagcaaatcctactctgatgttaaaatagttttgttggcacatgtgtaggctgcaagtcctctgtgaacatgattatagagtctatttctcaagcactttaatactttctaattgccagagggataaagcacacggttagaagctaatttctctgacatcagtgccttccacacccagcacaggagtacagcctgtgagagttcatgggaaaaccactattgtacaatagtgatctaaaatagctcctttgagcaggcaaaaggatcaagttgtattagaaatttttacactaccacagaaaagaatattagcaaaactcattatgatatgttgcaattcattttgtgaatataaaattaaagcatttccatttgaacctaattgttagagctagcagcttttaaagggttaaatgttgagtatgattctcagaactttacaattatttcccagtgttattcataatggtggcttgaagacgttcgcttcaagggtgctattcaaagtggtttatattctcaaagaataaagcatccagaatcttaccagtttcaccttacggttgaaaacaatgattgtttgctttctccacattttctgatatcagatcaatattgtgtgataaactacttaaaacgtagtgcctgggctgaagagatggctcagatgaagagcaccagctgtttcttcagagggtccaggttcaattctgtgtggagggtaagcctcgaacacttggaaaagacaagtgtgtgtagtgcagtttttgaagtgactgtgagaactttccagtcattaagagagaaaatgggaagtcctacctttggaaggggatctcacatcttacagtgtgtgtctagggtgtggcagataaaagccatctttggaaatgaagtgttttagactggcctaaagggcagaacctcctgcctattcctctctgaaattacagatgttacttgcttgtgttcgctccctgtgactccagctcggcccagcagaatgtgtaaactgcgagatggggtgtttgtcgtctgagtgcgagaacaggatcagcagtatgtaggacttagacagatgttcccacttctctcagggtgcctacctattacagggcacagaagggtcactgctcccagcttgtgtcctgcccacaggtgcctactaagggagaattgaacaagtcaggagttccagctgttgctctgacaggttttcatagctctagaaaggagggtgttcccacagctggtatttttttcttttgttttggtattgggtgtgtgtgtgtgtgtgtgtgtgtttgagattgggggtgtctctctatgtagtcctaactgtctaggaactcacttatgtagactaggctgaccttgaactaatggagatccacttaccactatcttcaaagtactgagattaaaggtatgtgcctccagagcttgctccacagtagttttcctcagctctagccagggtcctttttttggatagtcactaccacaaaaaagaaccaagtatacctcagctgtcattgttgctgccgctgctgaacgtcactcaggaaggtgactgataaggtaaatagaatgcagtttccactgcttctctgatcttatgcatgctatagctgaagtagtcaaagatggagctccaaccatcggtgccaacacacatgcccaagcagggctgagtggaacagtgcccagtaccagccatagtccagttcctggatgtgcactgccatttcagagaagaagaccatggaacctcctgctacatacatagttcttgctgcctctccaccagggagggctgtgtttcctcccaccgccacatcccatcaacttccttctgtgtctaccactgactggtcagaggagaagtgcttcagtggcttcgccgctgctgaggccgccagtaccagaagctcttgctagtggcacaggtggcgtcagctgtgttaggggaaatcccccattgttcagagaggacaccatttccactgccagagccaaaacctgtaccacacttccctggactattaagtgtccccactttcagatgccccacagagacagctccaccaaggtaaacaactgtcttcaagtcaaacacactaaagaagccagatgagacaacactatggtgcccacctggaattaaagccaacgctatagcaaagcaatacctcaatatacatttttcagaagtaagctgcttagggcagcccacgaaggagatgcttcatctaccagatgcacaaatctcaaggcagctgtaaatgaaagagaaaataaggcagcatgcctccaaaggaaaacacctctaggcagaaatgtagagggacttacagggacaaactacctggtaaaggagtggagaccggggatactgaagtacttgttaggtagcagaagagcccaaattcagtgcccgtgtagaaagccaagcgtagcagcatatgctcctgagagctgctgacacagagatgggatccctggggctcgctggccagccaccggagcacactccggtgagtgtgagtctaaggccaataaaggcctggtcttaaaaacaacagcaacaacaacaaaaccagcacagagcacaggttgacgttggccctcccgttaagtggcttttcctgaagatgtgtaaaaacgtgtctgtaccctccagacagactgacgacaggagtcatctgtacccaagtctcgcttgttgagtgcgtgagtttactgagttttggtttgtttgtttgtttttacaagattatgggtaaggagttgcttataggagcatgtacatctcaaaagaagcaacagcagtgaagagcccacccaagcatgggatggctcaggaaggctgtgtccctggaccactctttgtgacttaagtgaatctagtcagagattcatttcccacaaacatagttactatttacatgaacccaaggaggggccttgtgttctctcaagtgttggaagtttcctgagatttctaagtttgtttactttctgagtctttcattagttcctgagtgttaatgcattcccaaacacacatcaaaatgttttaatcactgcacataccctgtgcatgtttgcatacaagcaaatatataagaatttaaagaaatattcatagtgctcaataaagtataagagaccacggggtaaacagtaccatgaaattgggaagatgatgtggggtatgaatgagaaactcagcaaaatgagtgtcgaaaaaataaagcatgaaacctcaaaggattcagtgggttaagtaaaacggactgcagaaaatggccacaagttagatggagaagaagaaattatctgaacttggaaataggtttttgaagatgcttaagaattggagtgaagctcagggagggaaaggaagagaggaaaaaacaatgaatgaagaattgataagacttaaaacattgagcactgttatacaaatacccacatatttttgaatatccaaaggtgaaaacaaaagttaaaggcttagagagacccattgagttaaatcataacagaaaatatcctcgatcttaggaaacataaacattcatggcatataggaagccaaatagataatggtgtgaaaaaaaaatcagccatatatgacagctgtggctttagtgtacttcagtgacagatcgtttgcctagcatgtactatgtgacattactcaggaagggtagacatgatataaaggagaaatagaatcacatcacagttaaacatagggaattcctgattgcaggatcctccttagaaaagatacttagtggagtcctataaccaaaactgaacagttaagtaccatcatgaaagcacaatcaaacctgaacaataactaccattatgaaagcatatggcatataaattccactggaaaagtagatgcacacaacagaaaaacacttaggagtctggacagagcctcttttaaataaaaacaaacaaaaccctactacgttgaagtatacaattataatccagctttctggaggattaagaggtcaaagccagtgtaggttaacagcaagtttagggctaccctgtgccacatgagacactgcatcaaaaacaaactaaactatattgatattccatctcgtcccaggcagtgggcatacatcaggaaggcaaacaataaactatgacaaagatgtatagagaaaggagtccttgcctattgtttgggggggggggtgtacactgaaacagtcactacagaaaccagtatggagggttctcataaatctaaaagaagagctgcagtacaatccagcaatacccctcctgggcatacacccaaacgattctaagtctacaaaaaaacgtaacaagaaatactaggtccatatttatagtcacactcttcacttggctgagacatgaaatcactgtaggggttcatcagcaaatgaatgactagagaaatgatggtatatatacacaatgaaactgtatccaggtgtaaagaagaataagatgttgacgtctggagaagatgaatgaaactggtaatcattaagaaaaataaaactgaaaactattgcttatgttctctcacatactgttcctaaaattcctttccttatgtaacatctatttctcctaagatcttaatgacaaagtgagatatgatttcaacaaagtttacatgggaaaaacaataaatgtgttagacctacttacagagcaaacaggggaagggttccagacaggtgcatagttgaccttaaagcagccacactagaagaattagcactcgcagggatgatggctttcccacggctgtgtagaaggggctccttcccttcatcctctccacctcagccccttccccaagacaaccgtcagagaatacttgcatacaactccactaggaggctggacactcaggtaaagggactaatgacctttctcaacccttctgtgctgacttgttttcaacattaactcaacataggttagagtcatagacaagggcacctcaactgagaaaatgccctctacaagactggcctgcggacagacttggggtacattttcttgattggtgtgggggggtccaggtcactgtggacagttccacccctcagcaggtagtcctggttgttacaagtgggtaggctgagcaagccacacagcaagcaaataagcagcattccctcatggcttgaacttcagttcctgcctggagttcttttgatgatagagtatgatgtagagctataagcttgaaataaatcctttccttccattggtaaatagtcaacaaacacagctatgatgatcgtttaggagaagccccagtagagtcctaaagataatctaggtaggcgtgtctgtgtgtgtaggttatgaaaagagaggccatgaaaagagaggaagaagtttgtagcaatgcagaacaaggtcattgaatgtatgaaatgaaagaaggaagccaagtgtcatggtatttatcacagcaacagaaaagtcagtaacgcagcactccagctatgtctacgaacataaaaaaaaaaaatctacaaatgtagctgaaaaaggaatgtgcatgcactgttgataggactatattttactattaggattatggagaacaagagagattttagttcaaaagctgaaactcgaatcatcatatgatccagacaacccacttctgagtgtatatctacaggacatggagtgaacatgtctggtgcctatgttttgattgctaactaacacaccgggaggaggagtctcaactgaggaatagcctccattatattagtgagtgggcgtgtctgtgtggcatttgcttgattaatgatgtgggtgggcccagcccaatgtgggtggagctacccctgggcaggtgggcccaagctgtgtaagactgagtgatccatggagagcaaagcagcaagcagaattcctccacagcttctgtttcaggtcctgtctccagaatccggccttggcttttctagatggactgaagtctgtaagccaaataaacttctttcttccacaagctgcttttagttggtgttttatcacagcgacagagaagcaaatgagacagcaaatgcatacccacatgtctgtgtttcattcagcagtattcagaatggctaagatacacagcctggatgtctatcaatagataaatgcataaagaagtgtgctgtatttaatagtggaatattattcagtcgtaaggaagaagcctgagcatttagctcagtgttagaatgtgccctgcccccatccctgagcaggctgatcagaccttaattgtttgccacagtccagtcggtcttctgcggacctgagtggagtcttccaacctaagtggaagtctcctgccttgctcacctgcaatttcttacagaagcagactgcctgctgagctgctgagtttgttttgcagcagaatccagctgaaacaaaggatgggttttgggggttttcccctagataaacgcagagctgaaaattaaactttgagccttgatcagagaacctttgtcttggcttcattcttctcttgccagcccctcctatttcattcccagcctccctttcaaatgtactcagttctctgtggccgcgggatggctacattacaatgcatacctaccccaagtttgatctccagtagcacaagagggaaagagccaaggaaaaggaagtcaacacttacagcaatatggatggagtggacagatgttaagcaaaatgagccagacagaaagatgagtactgcatgcccatgcgaagctaaaatatgaccacctgaacacagaaataatgtttaccaaggactggggagggaatgtgagtggttggatctgctgctgcacattccaagtgtgacaataccacaattgaacccattaatgtgtaggattgaatgtgttgatgaaagaaaataaacaatccatatggtcatgacacccaacaccttctattccagagtagagggattcagaatgctaatttagttctcctctgtacttggaaacttgttcccgtaccatcctgtcacatgtctacctatttagaaccatgggaatgtgtcctcatttgggatttctattcatgcttcccatgcatatgtctggtctctctgagggatgctgacagctcagggagagagagccacgctgtagtaattcttctgttttgtcaaggaagggtcacatttgtccaggcagatgttgcttccaggtttccagtttcagatgctgtagcataagcatcaaggctgaactttaaactgatgtggaataagatagatctatattttgtaactccaatgagaaacttcttttacacgccataaagtgaaaaacgatttgaatttattttaaaaatatactgtaacaagagttcataagttctgtgtgccggcctggatgttgaccattgagaaatagatgcccttctgcgccagcagctgctggtgggtgccgtgctccttgaccttgccgttctcaatcaccacgatcaagtccgcgttctggatggtggacaggcggtgagcgatcacaatgcaggtgcggccttccctggctttgtccagtgcttcctggacaacctgttgaaagcccaacaagaactttgtactgagaactgcagtaacaaggctgatgaatttctaaagctttaccatctgagtagcatcaactatcataattcctttttctaatctctgtgaacacggcttaaggcatgtgtagtttacatggctaccattgtgccccttatcggattgttttgctttgtaattatgatacagatgggcttccataatgaccctcaaaactgttgaaactttctaattaattgccaatattatcttcttaagttccttttaaaggcccttttcagttttttcattacaactaatatgtcaaaattgtgattttttgcagcatttttccttttgactgctgcttttatgtttagaaatatatatgtatttttttttaaaaaatacacattctattacttcaaaataatcacatctaagtctagtgtctgcctttctcatgccggctttcctcatcactctttctgctaggttagtaagacaggtggagatagaccttttcactctcagtatccagagctgacgtggcttcatccagcagtaggacccgaggctgtctgatgagggctcgggcgatggcaatcctctgcttctggcccccagagagctgcgtccccttgtctcctactcttgtgttatatttctgcaagttagtcatcaataaaggtaatacagttttaagacagttgtctttacaagaaaaaaatgaaaatcaatagatgtttctataataagatattgttttcagtaatgtattttcagttccatagaatatttgcctttaagactgaactaaaatacagtgcctgtagatttcagtggtattctgttacaagaaattgagctattttaaattcctgccattaacatgaatagcatttaatctgatttccgtggaatcacagcttagactcacaaagggtttttgtttttgtttttgtttttgtttttgtttttgttttttttttttacagtttgaagtagctatttgatccatgtaaaaactagtttattctcttttaatagcttagcaatcaatatctacttaaatgttaattataattattatctaaaaacaatacaaaagagaaggaaggaatgtgaagataagatggaaggggaatttttaaaagaggaggtaaatacaggaaagaaaactttgtatactttaggagactgcatttaggaaagctttcaggcttgggaagagaataggatggcagatgtatatttagatgtatatttctttgcaaagctcagggtgctgtgcaacgtgtgaattcatctcctaaggtccagtgtcaaaatcaggtcaaaaggtgaaagttaaagtcttcctgcagtcgtcagcacttgattcagtcagtgcctagcaccagcgattaactgggagacatcacagaaaatgttaaagccgtttatttgtgtgactcacttttaattcccagcagaatagaatgggggaggagggaaacaattaagctcttctgccttgagttctggaagcgttcataaaatgaagtgcctctaccttcaccctagtggaagtcgtcttgccataattatataggactcaagtaatatgaagcacagagtggaccatacactcgaaggtaagttgtaaaacaaccagactcctttaaaatagagaacatcttccagacaggaatgtgtagactttgggacagatttgacatcagaagcaagatgcatgaaaggaaaataaattcactaaagttgaaagttctgttctgttaagcctctgcttaagaggaaaaaaaaaaaaaaaaaaaaaccaaatgataacttgaagaaaaatacatatcataaaatccatatctaaaagtaattagaataaaagactcaaagctcaacagttaaaaaaaaaaacaaaccctagaacattttaccaaagaggttatatagctacaaatgcataataagtgacagggacttcactttccctttaggagattcatatgaggaccactgtgttgtatcttatattcctatcaaactgttgcaaataataacctcatagctgggctcaaaagatggctcagtggttaagagcactgaaggctcttccataggtcatgagttcaaatcctagcaaccacatggtggctcacagccatctgtaatgagatctgatgctctcttctggtgtgtctgaagacagctagctacagtgtagctataataaataaataaataaaaataaataaattaaaaaaaaataaataaatcttttttttttttttttttaacaaaacctcatagccattttaaatgctggaaagtctttagaacttgctgggagggttataagtggtggttacaggaagtcttttggtgtattgttttgtaaaacaaacagacaattaggatatgctttgatgatttgctgctgagtatttattccagaaatattaggacctacatttatgtaaagcatcagtattcaggaacttacaacctcaaatttagattgactgtggtaagcttctctaggagacaggtaacctgcggtttagccatgcatggaatgtcagtcagcaaataagacgatagctgtgctgggtgagaacctggccatgcaagtttatatcctatgtgtacatactgtctctacaatggcaagtgatacaaactgagagcagattagagttgccagagctgtggagactgaagtgggaggaaggggtatatgaatagaaggatggtagctcaagggatcttcatgtgttgaaaatgctctgtatcttcagtgtcagtacaagaatgtgtacctgcactgcagctgcatagaatgcacagctgtatggcagctgcccaggatacacagctgtactgcggctgcctaggatgcatagctctactgcagctgtgcagaaacatacacacacacacacacacacacacacacacaagcatgagtaaactggtctggatgtcagcatcctgaattactgttgtgttatagttctaaacgaggttaatattaggggagactagataaagaaaacacaaaatctctgtattccacacaacgatgtgtggatctattatattctcaaaatcaaagcatacatttgtggggaagtagcatatggacagcacctaactgaagtgcacatgtagtctagaacactagtgtgagacctggggtaaggtcttgcctcattggtgtctcatggcctgagggtgatgaaacatcctgtcatcaaggccagtgtcttctcccagatacatcagccccttagctatgagactattgcaagaactttgggaatagcttcagggagaaaaatgagcctgccttgatttcagctgagaagtttggagtttaactcacttggggcagcgtctcgatgaaggggtggatgttggcctccttggctgccctcacaatctcatcatgaggcacgacccggctgttgtctccataggcgatgttctctgcgatgctgcagtcaaagagaatgggttcctgggacacaatgcccagttgagctcggagccactggacattgagtttctttgcttcttgaccatctaagagcttaaaaacagaaatccacaaactattaaggttaaaaaaaaaaacaattctaaatagcaagtggctgaactgagaaaaggactgttagagcgtgtacctgcagctgtgaaatgccaagcttcgtgtctaatgccaacatgctgaaggagagcatggttagcagagagactcttatcgcaagcctctcttgctgtggtctagatggtaaactgaaacacatttggccatgtcttttaacatgtcttttgtcttcatgtgccctccaccaggcgtctgtgccatctgtctttaggaagtctgcatcaaaatgtgaccctcagatctgctgtccctagaataaccttgactctccttgctctcctaggcataccaggaaaagaaaagagcagattggtaatgcagtatagccctaggtttgagaagatggtccctgttcctctagtctgtgaaagccactggctttaaacttccccccatatttttgtgcaatatatttgcatgcatgaatatatgcatatgatcatgcatgcacacatgcatatgtctacacatgcatgtgctagaagttgatgttgggtatcttcctcaatcatttttccaccgtactttttttgagccagggtccctccctgaacctgaaactcacaaatttagctagatttggctagccagtgagcacctgtccagtgagacttgtcctaagtctgcttgtctctgcctccctagtgtgggattacggacagacacctctaggccagaacttttaaatttacttttttattaaaaatttttgcacacaatatattttgatcatgttcttttccttcctggactcttcacagcctcccaatatccctagctctcgtgcatgatctctctctccaaaaacaaacaagcaagaaaaagatgaaaatcaaaacacgcagcaagataaaaacaaaaatgtatacatgaaaaactgaaaaaagtcaaccaaacaaacatggagtctattttgtgttggccaagtatgtctgggcatgagacaggttctagggattgaacatgggtccttgtgcttgaactgcaagcactttgtccatagagccatctctctagtcccagcttctacatgttgactatatcaggtagagacagatcttgacttgaggaagcaggtatgggccatacatctatgattaaagccaaatgtgactgggctagagcttgagagtcaatgtcagagaacccagagttcaagtttagagggattaggcaaagcagagggtactgggtaaaaataagcaggcacatgcctgtttggagagtctctgtggttgattttggcattactcttctctctgagagctgccggtcttcagcttccccctcttctcccaacacagggtaagaatttaatggaaagcaaagaagaaacaagtgaaagtaaagatctagaggaagcagagcctttaggagaaggggttctgatgttaattttgttcctgttttgttcctgttactatgagtgaaggatgtggtctccttcctgcctccagaagttagctcagttttgttttaaaaagatttcccaacccacaactctggcagcaacactcttctacattgaaagccatgctagtacccggaaccccaagtaacatattgctcatcacctgaacactctccaccctctggcagctgtcttgttgggagcaaacaaatgagacttgtcctaagtactgccattttgttcttagactccattttgaacataagtgaaattaagctcaagtccccatgttctagaggtgctgaagactttccagatggctagcctgctttcttcttcttattcttcttattcttcctttgttccacaaaacataatgattatttctagccacaaaagaacaaatgatcctgattgatgaaaaattgtaactgtattttggcacagatgcttatgggatttgtgatttttctacttaaaaagttactgagatgaatatttggggacttggtcagctcacaagtctgtgctattgcccctgacctgtaaatttttgctgcctaattcaaataaagattttgctttgcatgtgctcttgtgcccacttgggttgttttggatgtttagtcctaaacagtctccaacagcactcccaccacctcagcctcatatccaggcccacaacttcagcagaagccctcagctctaccaaaggccaaaccggtacccagaataccagagacctgaaaacccagaggccatgctggtacccaaaacccctgaagctccctgttctaccagaggcaatcctattatctggaaccccagaggctatgacagttcccagaatcatagaaccacagatgcaatactgggacacaaaatcccagagatcccgcaggctgtcaaaatcctagtggagacaccctactacacctgagagctttcctgtcaccagaaccacaggccactcaggccagaagaccagagaggaaccagaaaccaagggttcaacaaagataaactcagaaactgacacctaaacctataattacccctaacccagatgcccacacgctggtgtaagaatacaattaagagcaactagggcaatatggcaccactagagcccagctatcttactatagcaagtcctggatattctaatgcagctgaagcacaagaaaatgaccctaaaaccaattttgtggagatgatagaggtctttaaagtggaaataaataaacacatcaaagaaattcaggaaaagctgggtggtggtggcacatgcttttcatcccagcacttgggagccagagggaggtggacctaaagtcttagtccagtccggtttacagagtgagttccaggacagtcagggctacaagcaaacaagtggagaaaatgagtaaaattcttaaagaaaaccaaaaaaagatgaacagatgaatgaaataagtaaaattattcaagacctgagaactgaaatggaagcaacaagaaaatagaaactgtgggagatggaaaatccagttaagtgaacagaaactacagacataagaatcaacaacagaatcaacacaacatttcattcagccccagacacagggggcgctagagtccagatttcgcgggctgtttacccagagggtaccgcgtctctggtggtttgtactcgatatcctgtgtgccaccagaggctggagagtccagaaacctagtactgaaacaaacatgactggtcctctccctgaattaatgaaattattcctaatgctgttgggatatactcatagattggtgcctagtccaattgtcatcagaaaggcttcatccagcaactggtggaaacagatacagaaactcattgtcaaacattaggtagagcttgggactcctgtggaaaaggggaagaaagcagtgtaggagtctgaggtgtcaagagcaccaaaagaaaacccacagaatcaactaaccaaggcttgtaggggctcacagagattgaaccaacaatcagattcaatggtttgcctgcctgggtttgacctaggtcctctgtgatggttgtgtagtctcttagtcagggtttatattcctgcacaaacatcatgaccaagaagcaagttggggagaaaagggtttattcagcttacacttccatacagctgtccgtcaccaaaggaagtcaggactggaactcaagcaggtcagaaagcaggagctgatgcagaagccatggagggatgttctttactggattgcttctcctggcttgctcagcctgctctcttatagaacccaagactaccagcccagagatggcaccacccacaaggggcccttcccccttgatcactaattgagaaaatgccttacagttgtatctcatggaggcatttccccaactgaagctcctttctctgtgataactccagctgtgtcaagttgacacaaaactagccagtacatgtagcttggtcttccttcttgtgggactcccaacagtatgagcagggcctgcatttgactctttgcttgctttgcagttccttttctcccactgggttgccttgtccagcttcgatatgagagatgccacctagtcttattggaacttgatatgccatgtttggctgatatcctgggaggcctgcccttttctgaagggcaactgaggaggaggagtttgaggatagataggaggtgtggtggggggtggggctgagaagggaagggaaagtgcctttgggatgtaacatataagagaatagatagatagatagatagatagatagatagatagataatattggaccaggacaaaaggcccactggctaccagagattagtcttatattgtatttttagtacaatactttttgatattctgccctaatagcctgctatatttatttcatacagtttagagtttacaggctgtagttattatatcaggtagggttttggaccttctctcgaccattagtttgatcacataaaatacattcatgaatcaattcattaagaaaatgtgctcaccactgatccagccatggggtcatagaagcgctcgagcagctggaccactgtgctcttcccgcagccactgctgcccaccagggccagcgtctggcccttcttcacctcaaggctcagcccctgaagcactggcacgttggcccgggtgggatagttgaacacgacttcattaaatgtcacgcttccttcaaacttatcctaaaagttttttacatttttttttaaattgacctcattagaaataaaagtattattacaaggaaactttaccaataatcgtgaaacatgaagtgcctatttggtatagtgcttgcacaagttcacacggttagcaagtccattatgatagagaatgaagatgtgattattgattggacaaagtcactacaaagacaggctattgaaacccaagtttctgatttgtgcaaacctaacactgagccaagggctctgaggcttaagaaaagctgcagcagtgtctcaatctaaattgctaactgtatcatcgtgactgaattatattgcatagacctccatgtagaagtggctaagctattatcaaaactggtttgtttcagtatatcttcatttttcttttctaaagttgtgttaaatttttttaaatgccaaaaaagttgtcgagatactagccatataaatatcacagtgaagcaaagtatgtgatcatgtcattgtgatagaaagaaaacctttaggacagagctcagccatctagccagacaaacacttacaggccacagcccttctccactgtagctgtcaatcagaggttgtctttcaaacaggctgaacaagtatgctgcagacagcttggcttttgcatagtccggagcaaatgagctggcgtgtcctagagccaccgcgccaagcacaattgcagaaaagaccctggagagaggtagaggggttcaaattagctccacagtgttcaaagtccaaaggcaaacttctaactaacgtttacatagttcttcttcaattgtcatttctccaagcccacatacattgctgtgagattccagtaactacagcaacaagaatttagaggggaggcaagacccactgtctcggtctggtcctctgttcaccttctggccgtggggcactcgttctgagttggtgtacacctccaaaggttttcattttcctgaaatggcttacaactgaatctgatttgtgatctcaactcattttagatgccaggtataccccttttaacataaaaaaaccctgaagcccaaagtatctaagaggctcaatgagaggcagagctagctatcattagtttagggcactgcatcccaagtgtgtggttttgatagtcctataccacatgtgatagcaatctctgtaataaataatttttaataggtatacatcaacagaatattttatctaacacatacggaatatacattcttagcagttcatggagttctttctaaaatatattagtcttacatcaaaagaattgaaatttttatcttcctgatcacagggggagatgccaacaactaaagacattttagaaattttctaagtgcctggagacagaacagaaacttttaaatgaacagtaggctacttactgatgaactgagaaatgaagtcagtctcctaaaacagatgcatttgggaacacagcctagtgttcagattctcatgcaggctgcagagaactgataccaggaagaaactgtatagcagtgagtgccaacatcaaaagaagaaatcttcaaacaacctaaaaaatgcactcccaggatggagagatgcaagaataagggcctagggcatggcttagtgggaaaaatggtgtgttacacaagcctgaagaacagagtaagactcccaaggcatctcctgccctccatacttgtgtatgtgctatggcaaatacataattctctttctctctctctctctctttctcttccctgtctctctcctctccccctctcttctttaacgcacacacacatatacactacacattaataataataatgataatacacaaacaaaaattagaagatcagagcaaaataaacaagtacaaaagataaatgaaacagagttagtccttcaataaaattaaaagaaaataaaaaaaccttgaactagattggccaggaacaaaaaaagacctgcataaataaagtcagagttgaaaactacaagtcaatctcacttttcatagctacaaaaataagtaaataacattgggataaacttgaccaaagaatggaaagccattgaaaataatgattttagaaattgaagagaataagaaaaggaaaattcttccttcttcatgaattggaagtatgttgtgcaatgttcatattactcaaagcaatctaaagatttaatgcacccagtctccaacaaaatactaatggtattatctacagaactataaaaaatgtttaaaatcttatgaaatcagacacagaaaaaaatagaatacaatcttgagcaaaagaactaaagctgaggacatcattatacttgggtttttaaaaaacatatttactttatgtatgtgagtacactgtcactgtctttggacacaccagaggagggcatcagatcccattacagatggttatgagccactttgtggttgctgggaattgaattcaggacctctggaagagcagtcagtactcttaaccactgagccatctcctcaaactacttggttttaagacaaactactgagcctcagtaactaagatagcattgtattggcataaatacaaacacacaaaccaagcgcatacaacagacatcttggaaataaacccatgtatctgaatctaatggcttttcaacaaaacaaaacaaaacaaaacccccctccaacaatagacactagcaaagggcagctccatagtaaataatgcaggcaacactgggtgcgcatatgtaacacagacacttgacccctgactcttgacagttaaggaaaagaatagatttgccagactttaggcagactcctcatcccattgtcagggccatggtttggttatagaaatttaatcccaccctgatttgactccactatctctaacaacttcctaactgcatttaaaccgttttctctgcttacttctgtcctgaaaaggttcacatacaccttcatgctttgcagtcaatgtcacaagcttggtgaactttagacacctgggatgatgaaactgcttggtgtggtgacacgatcaggtttctgtgcctaccaggataacagctccaggagactgaactccttgatctgttctttgcatggttgatccccccacccccaccccatggcacacttttgcataagcctattaaaaccctattataggattagtataaattaatcctagtattttcaaagctacttacagaatgacatctttgaagcgcatatgtccattcacaattaggtaagaaccaaatcgaaaacagccagcataagaaaaatacatgaatgcttgggagatgctaaaagtgatgccgtagatgtgtgccttccgcaccgaattcctggaaagcaaatcatttattcaaattaatactcatagacattattcagcttcttttaccctgtgtctagctgaaggagcacagcttagcctggccaacctgagttaaactcctgccttaaaagataataggttaagtaggaaattcagtggatttctgacttacacaatggaatagttctataatgaaaagttgtttggggaattaaatgcagtaaacaccatgaatagtcatcatagtacctagtatgtggtgtaggttcaaatgataagtggtattgacattatttaataattcatgtattcacaccatattgtgaaatgattgtgccaaaatactaggataacattgaaattatctgaacaccatatattattacaggtcccgaaacaactatagtcacatgttaagactcattttagtttcacagaagttggataattgatgtttgtataaatacacagccaaggttctccaagctagatcctgcttggaggatctagcttcttgttttacattagttctaatttagaactgcggctatactttattagatttctaaattcatccacagtaatttacttactctcaaaacaggaggtgtttggcaaagaaatgcattgtattgttgatttgggtggcgtgacggtgtgtatgcttgtgtgcacttgcatactgtgaccctggtgctatgctgactcgggaggcatcacttgcctactgtcaaatactgtgactacaatgccacacttaacagtatgaaaccattttcagtctttaaattatgatcacatgaataatgttttcagcttttcattctctagagttctaaattttccataaagtaatgagaaaatgctatacccttaagtcaacttacatactaaagaaaacaaaagtgtgaacagctccttcagagaatgctcatcctgagtcacccagctgggttacactgcagtgactgggttgtcatacagctctctgtaactctcggccctcagagacctcatcttactctgttcacaatagaaatgaaatcgagtcctgggacttgatgagataattatcggacaagggtcattatcattgttccgagcagacacgtctaaatgctctcaaggaacagtagcacagccctggggaagcagtaggtatgcagcaatcgtatgtatattacctgtaaggtccatgcaatttttcaacatacattgactcaaattttctttcttgggtcaaggatacaacagttcgaatattttctattgcctctgttgcaatctataacagagagatcttcattagaagtgttacttttatttctgaagtgaaaaataactgtctggtgtactgtaagtgccaagtaaatgtggttccttccaataaaatcaaaaggcagaatatgttctttaagaccaggtctctaacaaaactgggcttgggttggcacagtagagtagctaagtctctgggtgctcatggaagcgaatacctgaagcccagaatggaacataaacccctgccatcaggcagtcacttcaatcacagccatttagtgaccttgctttctttatagggtagaatctagaagacatgatttagcaatggtttctagaggtcatttgaaatcatgaccattttcaccttggtcacatcctttcttaaacaagctgtctgcccacaagcaggagactccaactggaaatgaattgacccggctttatattgctatttaaatgacggaagcatgcctgaatctggttaatcagacttggtttcctggagctggaggaagtacctgttagaaggccctgtggattctgagaggtagccgtcatttggggagcagatatgaatgcagatggttgaggagtaagacagatgtgcagagaggcttaaagagagcacagcctgtggactcaggaggcagaaactcagagcgaatgtagcccatgggactaagaaacagaggcatatgtacagagagactcagagacaatacagcctgtgtgtctaagagacagaggcatggactaagagacagaggcatatgtacagagagactcagagacaatacagcctgtgtgtctaagagacagaggcatggactaagagacagaggcatatgtacagagagactcagagacaatacagcctgtgggtctaagagacagaggcatatgtacagagagactcagaaacaatacagcctgtgggtctaagagacagaggcatatgtacagagagactcagagacaatatagcccatggtactaagagacagaggcatatgtacagagagactcagagacaatacagcctgtgtgtctaagagacagaggcatggactaagagacagaggcatatgtacagagagactcagagacaatacagcctgtgtgtctaagagacagaggcatggactaagagacagaggcatatgtacagagagactcagagacaatacagcctgtgggtctaagagacagaggcatatgtacagagagactcagaaacaatacagcctgtgggtctaagagacagaggcatatgtacagagagactcagagacaatatagcccatggtactaagagacagaggcatatgtacagagagactcagagacaatacagcctgtgtgtctaagagacagaggcatggactaagagacagaggcatatgtacagagagactcagagacaatacagcctgtgtgtctaagagacagaggcatggactaagagacagaggcatatgtacagagagactcagagacaatacagcctgtgggtctaagaggcagtgagcttattattgtcttctcttgaaatacattctttttgtcaaaccactttaacccaagccagtcagaagttttgctgttttgtttttaattcttatagccaaaccacccttagtgtattgactgtgattagctattgagtttaaatcacatcaacactagggttatcagatgttaaattttgtgttttcgtttcatcagcttcaacacttgtagccttcagttgtaagtaggtgaaagatattttttacattaggctaaaaaactctatctttaaaatagtaataataatctaacagatagtagaagcagccaaaatgttgccacattgaagggcacagtttcctttagcctgaggacaaccctgtagggtagtattactcctgtttttacagaatgaggaagtaaggtgcagagggggttccccactagcctaaagactcagaattaactcggagcatgaggactgccaggcaacctgatgccaagtctgctcttagccagttgcactgactgctctgtctattttgagattttgcacatggagaaaccagttacaaacaagtttaccattaacccttgattttctggccatggactaactttgtggtctagttctgacaggcgcctgagctcagtaaacgggatctactcaagatggtcatgatataaatttgttatttggatcacaaaggatggcctgatggaactaattagtaggctgtgcatatattagtgttatatttagaggattgtattacatgtataatatgatttataactataatcttattttgccatcttcctcctactacctagcaccaattgctcatattaaaaagtcctccttgaaacattgaaatgagactatcccaattcctgatatactttattcactaataaaaaattgtacccaagtaaaataccgtatctttttgagcaagtagtggagaggagctcacccaggtctctgctcccttctctgagtccagtttcactatgctgctccacagggtagaactaatgtgtaccccactagtcttaaactagcatggatactccctcatctgccttccaaggaccttcaaaggattataagctacctaccacacaagaaactaaccctgattctacccatgaaccaacagttggtttagaaaacaaaattgaaccatgattggattgttggggattaaaatatttgtactatctcacaaacctaacattaggttgcatcgtaagccgttcagccaccgatccccacgatggcagctttaggaagtttatgaaggaacctggacagcatcaggaatagcacctcatttcaccaagaccaaaaaggccactagaactaagagatttctctccagcatcaaatggtatgagcagaaggacaggattgagaactgaacatttttgtatgtttaaaacactcctcaattcttacaactatacttctgtcaaattttgataattctcattgctaccaaaatataactctctcagtagagccatggtcactatgttgggtcaattcaagatattttttttttgtgtgtaatttgctgaatgaaaatttatcttcattatgatcatgttctcttgaggaatgaagaaggactactacaagatggtggaagacagaacttttttttttaagggggatttgtttgtttgcctgtttggttggttttgttgttgatgctgttgttttttagtctgtggcatacagtgtgaagaaaatggtatccttcggtacctaaaaacagtacataagaaacagctcagcacctgggaacaagaatgaagtccaggacccacaacacacaggtttccagagaactctgattccagggcaaggccatgcctgcagaagtgacaagtgtctgggggacactgaccccatggaatggcagccatgaccactgatgggaggaagtggcagatctcagtgaacagaattggttaagtggaaacatgtatcactgcaatcctagtctccgttatgtttttgtttattttatgatagtgtattgctatgtaacccagaatggctttgaaggaacggcaatcctcatgcctctaactcttgagtaatgggtgtataagcatgtgccatagataggtagacagtcactcagtaccaaagcctgtctcttcataaagtagagaccctgtctttcccactatacatagttatgaaagtgtttgcagtgatgcttgtgagagaattttaagactggtgctgtagaaactatcagtttatactaaccatgtgctttacttcctaagttttcattaaaggatgatgtatgctttaccatctgaatgtgtgtgccttgcagatcacatgtttatatgtagatttagacatagatgcgtaatgagagactaggattgtgctttggcttggacttacttcctgtccacatgtctacatttgcaaaagtgaagggtctggttcagcaggtcagagactgccatatccagggatccacctcataatcagcattcaaacgctgacaccattgcatacactagcaagattttgctgaaaggacccagatatagctgtctcttgtgagactatgccggggcctagcaaacacagaagtggatgctcacagtcagctaatggatggatcacaaggctcccaatggaggagctagagaaagtagccaaggagctaaaaggatctgcaaccctataggtggaacaacattatgaactaaccagtaccccggagctcttgactctagctgcatatgtagcaaaagatggcctagtcagccatcactggaaagagaggcccattggacacgcaaactttatatgccccagtacaggggaacgccagggccaaaaagggggagtgggtgggtaggggagtgggggtgggtgggtatgggggactttggtatagcattggaaatgtaaatgagctaaatacctaataaaaaatggaaaaaaaaaaaaagaactacaaaatagggaattactgccacctggtggggctaactttaacaataaaaaaattcatatcaggatgggggacaggtacaaggaatcttcttgtagataattcatttctatactctgccttacacttgtaaaaacagagacatttattgtatcaatgatgccaggatatgatgtcaagatgaaatacattcaggcagtttgaaagagatttataacaagttctgtctggaagctagaaatgtcacaagaactatcccagtctcagttccaggcattatcaatactgtagaacatttctgcacagcccatatattatcagctgtagtgtgtaacatgacaaagcaagccaggtgtgtgtacaagcagcccttctgttagctgatgcccacttagctcacctttccagcagcttccatttcctttttatctctcttggcattgccagccaacattttcatttcaacaattcctgctacagcaatgaatggaacaaccgataacagcagaagtgtcagttgccaaccgtaaataaatgatataataataccggttccaaggttggctgtgttctgtgcaattaaagccaacctggttcccgtggcctgcaagagaaacagaataaggcagctgagtcactcctaaagccatgtgttccaggcttagggccctactcagaatgtgaagagcttcacctgctcaatgaacccacagcttgtgcctaacccacaaggctggacaggctctgttctcatccttccagcccatggagtcacctactgtacagataagctgtgaggacatgaacctttcaaaaggggagtctaaccacaaccccaataatttaaataaccacttgtttcaattgttcagacagaaatttacactctccttgaaaccaagttaccaagtattcacttcctacaagactgtcaaccaccaaacgctacagttgaattagttgttgtgcagttcaaaaaatcaggaccattgtcatagacattgctgtcaactctctggtgtgtctcttcccttctcttctcctgtgagatcagtgaaccacacagggtggggacctaagctggccagagaacagccttctcttgagatagctattggctcaggcttgagtgtgatttatgagctgttacaacaagagttatggaaagggctttcatttgatggatgaggtacagatttgtgtccttttcagaggagaaatgaagaagcttttagttctagttgctaactaggagatgagccccacagagccaacatggaggaggcaatgcaccagacagacagaaggaacctgggcctctgatgcctgtaccgagccagctcattagtctacttgaagtctaaacttcccattgcggttcaagtccgcttcagctggatgggatgttcctggttttccaattaaaaatatctttgcaaaactgtttttagggccttgtgcactccaggcaagctctccaccactgagctatccactctgcccccacccccaaccccagctgaaagcatctcagtagatggagcaatgccatgcttcctttcttaaggaaaagactagcagagcgcagtcttcttactccttggacttgcgcagcatctgtggcgagtcttgtagaaagtgctccagtactgtttttatgatcatcaaaccagctcatgtcctgtgggataaaacacacctttaaattaacgcacagttaaaaccaacaaaaacaaagcactctcgaagtacttcagtgaagagagatatctaaactgactgtgggtattggaattcaggggagaccttctatacagagtgggggtccagacacaaccctgagcacccgactgcagacacacaaggccacatgtcctaactattccccataagagaaaggggtcctagtcagagggaaggaatgggttcatctgccaagtccacccaaggctgggctccggtgggtgcactatctaccaaattgtcacagatagcccttgttacaacttgtactgtggacacctctactccctaggatgccattctcactaagagacaagtcttttttttttttttaataaactgtaaacaagggaattaaatgttgaattcttgctatgcttttattttgtctgcataaggatttttaaagtgtgtcttcttggtttgatactaattataagtatttattggcagtattttttacttgcatttaaagttatttctcccacatagcaggagtttggaaggtctcccaaagaattcatcaattcagacatgctcaaactgcgatgcctgccgtgtgcccagtgtgaacagggacaatgccaattcaagtctactggctctcttcatgatctgttctttaaaggtgggacacatgttttcactttcccatacaacctaccccagaataggaacttacataatatgtacaatttcaataaatgaactggtgaataaaagtgaaaacaggcacaaggcaaaacataagtcaatttctagcttttgggaaaacctagttggaaggtcgactgtgacagataaacatggacactatcaaccatcttctccaaagactggccattgtctgcagaatccaaagatcagacacaaatactgtaaatgactgtacacatggagacagatagttgcagaataagccaaagagctcttgaaatgtctgctcccaggaaaaccttgagaagtcatgggctatttcagaaccccagtaacttgtagggccctagtcgttctttgcgtggaagtcttggaggggaaatatgagcattggcttgccaacagcagcaggcagagtcctaaatctaaacactaggtatcatctgcaatgcactcacctgccttagcatcgctttaaaggccatggaccggagccttgtggtgaggatctctccagctttcccaaacgtgaagccctaggggagacaaaaagtctcaggacccctttgcttctcattagtgtcctgacacaactacagacactcacatttattttactattcagccaataaaagttaacttgaaatgtaggtgctgctgagtcattgtgaggtttggaactgtaacaccaaaagtccaggtttggcttctctcccatttcaataactttcgagggcagaatctcagtaactaagacaccgtgttgaactagatataataatataattcaaagtgcctagcttctaaattctgcagtcgcactctggttgctgcactgtagaaagaaagatgtctttcctctcaaactccaaatgagcccaagggcccagccccacctgctctgggatgaagccacaattaggtttcacttccactccaagcctcggtgccagtctccctctccctaacaacggtgcccaagctggagagaatccaagacatccagagatgcatcgcttctagggcgtgtgggatgattgggttccagtaatgctagaagccatggtgcagagaccgtgggagtgtgcactgctgaactctagcctaaaccagggatgggtgtgtggggtgcagctgccccacaggttccttatgcaggactggcctgtcctcacctgcctttcaggagggctgctgtgcgctacccccattgctcctgtacgtttagaattcccctccctggtgagcatgggtttagggttgcatcagacctctgaggtgctactagcacggcaaggacttccagatgaggatttcatcttactgtcgcctctggctccatagtgaaaaaggaaccgcatgttgggtgactagttacatcctgaggggactctggattgagaggtctgtcatgcaactggattgaatgtagcttggggaaagcttaattaggtagaaaagaaaacaggcaccaaattcctgctcttgcttgagtcaggatctcactgtgtagcccagccttacctgtaacttgtgatctttctgtctcagcttccagagtgctgggattatagatgtacaccacctgcctagctttggccagcttattttctggccaggtctatagtatatgaatgtgaatgtatgttctttctaatagttcattaattaggaaggagaaaggtcaaagttacttgatatttgggaaagtaacaacaaagagaatgttactctactgtggtttttgttattgttgttgttattgttttggtttggtgttttattttgttttttcagtttgcaaccaatgagcccaagtctccttccatgatagtgaccatttgctgaagatacactcatagttttctttttttttttaagatttatttatttattatatgtaagtacattgtagctgtcttcagacactccagaagagggagtcagatctcgttacggatggttgtgagccaccatgtggttgctgggatttgaactctggtcctttggaagagcagtcgggtgttcttacccactgagccatctcaccagcccccactcgtagttttcatggtcagtttcccagtcagtgaaggaggttgcatgttaccaagccttgcccccactagatcctcaactcatctcaatgtgatgatctggaagtttggttagagcttcactaatttctctatccatagatttgaagaacaattacctctgcttacctgaaggaagaaagtaaagaaggagaggactcctaggcccaagaagaccagggagaacatgttacacttttgctgcttcactgcgtcatccccagggccaaagatctagaagagaacataaaaacctgggtgtctggatccaccctgctaattcctaccccaggcagtggcttgagggtcacatcggtgaaagtagattttgaatatgtggcttttccaaattatgataaaatacaactagcataccattttaacccttattaattgtacagtccaggggtattacatatatgcatcttgtcatatagcctctaccaccaccaccaccaccaccccaagttgccaacatgttttcatgatcccaatagacatttccttgtttctgctcctgcatttgtgtctttggagattataggtcacaactaggttgagcccagcaatgggctccccttcttctgtccccagccctaggcctccaccttccattctgggggcgcctccttcctccatcaccatacactgcttttaaaacactcattagcacctggaacattataaatctgtatttttgtttctgccttgtatgtgttagcacagaagaagttggcttttgtaggcacaacttagtttcttttgtgaattgtctttctagtgactggattctaaaaaattgtacctgtaacttatgtatctctcgaactgcaagaaagtcaaggattgtcttacattgaaatttaataggattcagagggtcgttttacatttttcattgtttgtttatggtcttaatgtatatcaacgcccaatatcatgagactaatacattttagcttattggaggagaatttgttcttatccaatatgtctctccagtaataatagaaggtaataaaggagtttatataacataagatccaacattttgaataactttgtacgcatatcagtcaatagatttaatgattgaatagtatggatttactttcttagttgcagacttctgcatctgtggagaattgctaaagcactatgttttgaggctgcacaactgggaagccattctgaaatgctcccctgtgattacctattatcaatcctcaaacactctttgaaacaggtttattttgtagatgaaaaaatccacggggcagatgaaaggaatcatttctggtcttacccacttgttcaatgtggaggccagactgtgcctggaaacctggacttacaggtaggctagcatatgaactcaccttccactccatcctgacccctccaggtccacatcctgtgagccaagtgccagccctcccccaaacaaggaagcaccatctctggacccaagtgatgacaattagagagctttccccattgatcttatactttgtaagttcactaatattggaacagggtgcttcaaaggtaagtccttttctcttataatgagtttaactttaaaacagaataactttggcttaatttaagttaaagctattaaccccagaattggtggggctttaactgatgggctgtttctgttttggtcactgtgggatgtttttaaacttacagctatcatctcagacaggatgatggagaaagccggctggagggctccattggcaatggcacagactgttcccaccacaaagtagggccactctgttttattcagttttaagaccttcagaaaagacactggtggcacgtttgcatcctagaacataaaaatacaggacaaacagctaacacaaacattttgtgttgcagacagagaaaacatggctattatcctcaaaaagttttcaaactagatacaataaaaatatcctgcccttgactagagaataaagggcagtacctactgtcgagcatgaatcttacacacaggtggatatttccagggtgcaggcggctgctgtgcaggcctggtccacacgtgtgagacactagctctgggcatggataactctgggtctgtgtgacagtcatggctaggctatatgaggtaacctgtagttttttcatcaaatgggatgtccctgcctctctaacagcgatcctatcagcatcacaaggcaatagacacaagggacaacccccatcttctcaattcagagcaacttcatgatcattaacaaaaggacatgagcttgtcctccttgctctgcctagagctgccaaattaatcaccaccccttctccgtatcatcatatgctgacaacaggactcattctagactagctttattatccagggactaaaaatatactttataaaattatttttataaaatataaacatattcactatatgtaaatataaataaatttgattttaaagttaaacatcttagcacaaagattatattttgtctgtttttccccatggaaatttatttttaatcggcattcatttaatacactgtcagatacatcaaaaaattcgatttttttctttaaagtagcatgtgacccactataagagtcatgtgctctttagggctaaagatttcagtagcaaaactctagggtaaaggctttcctggcctggggaaaaacttacaagttcattggtttcttcatccagcctattctgatgtggacttttaagacttttctttgtagaattcctaaatatgcgtgctttccagccatttggggccacatctccagcagccttttcgtcacttagctcaacttcaaattcttctgacaggatctggcttcctgctgtctgaatgacaagataagacattaaatagtgtgtgtgtatgcatgcatgtgaatatgtccacatggataaaatcttgaagtttagaataataaagtaactctattacatgtatcaagattttttacaaagttgaattaaaactaggttgaggtttgaaatcaaggacaggacactaaattgaaaaatccagagaaccctcacaggcactgtgacaccatcctccatctctccaagagaaccaacaaggaactgggagggcaaaacaaacgtcagaagtaggcatgctgagggaacccagggagaaagaaggatgcactggttctgagaaccacagacctggtggcagcagctgaggtgacttcagtgcaagccccgttcacttaacaggataataattcacctgtcctgcccaatcatactaaatttagcagcactatggccaagtagtttattatttattcctctgcccagggaatgaatggttccacccacagttaagatggatcgtcctacatcattaatgacatcaagataattcctcgcctgatatagctatctcctgagtcagaacctgacaaatacagaggtagatgcttgcagctagccattgaactgagcacgaggtccccaatggaggagttagagaaaggactgaaggagctggaggggtttgcaattctacaggaagaacaacaatatcaaccaaccaggacccccccccccccccccggaactccgaggaactaaaccaccaaccaaggagtacacgtggagggactcatggctccaaccacataggtagcagaggatggccttctcagtcatcagtgggaggagaggcccttcgtcctgtaaaggctcaatgccctggtgtaggggaatgccagggcaggtaggtaggagtgcgtgggggaatgccctcatagaagcagggggtgaggaaatgggatagaggatttttggggaggaactgggaaaggggatattaatatttgaaatgtaaataaagaaagtatacaataaaaaaaagataattccccatgggcatgacccacaggctcatcatcttgtggctctagattctgtcaaggtgacaattaacattacccattataatttcatacattttaaagcagtaagttataaagaggttatataaaactgaattataaaactttctaacactccactctttgaataatttgaaattttcagtaactattttgtgttgggttctttaaaaaatagtaatagctcaatgacatgtgatccaaataataaatccatcttttaaaaaccaacagtggctttccagtatactcagacattcatgtcatttgttttttgggatatatatatatataacaaatactaatatatgtgttttaatttgacatatatcgtacatatttattgagctcaatatggtactttgtgtgtgtatgtgtgtgtgtgtgtgtgtgtgtgtgtgtgtgtgtgtgtgtgtgtgttgtaaatgtatgtgtggaaatgtgtgtgtatgcccaagcaaacaaatgagtaaggccaggagacaacctcagattttgtctctttctttttttttaaaagggggtttcttattggtctggagttcaccaagtaggctataccagctaaccagagttcctaaggattcacctgtccttcccaacaatgggattatatgtgtgcatgccatcatgcctggctctttttcttgcctgagaacaaacttagatcttcatgattataggataagcacactacctgctgagctactgtcccctgccaccagagcacttttcaacatgtgtatatgctcatcattgctcataaggataattgacatattggtcactttaaacattatcatttttattacaaagatccaaagtcgtcttcttgcgctggggaaatggctcagtggtgggatgtttgccttatataaagaaggccctagtttcaatccttacaattgaaaaagaaatagactctcctagctatgttgaagcacacagctcactgttgtcaatcatattaccctactgtgctccagagcattagttatttctcccctttgcctgtgcctctctgtacctgtcaatcatcttctcccttaccctctccagtactccctgggctttacaaaccattaccctgctgttttcttctgtaagagtaacatcttagctcacacattttagtgctaggcaggcatttgtttcttaaatgtatagcaatagctcacagtaggattgctaatccaaatgaaggattgatgctcagcagaatggtacttggcagaacttagggatttgaggctatttttttttttttttttttttggtttttcgagacagggtttctctgtgtagccctggctgtcctggaactcactttgtagaccaggctggccttgaactcagaaatctgcctgcctctgcctcccgagtgctgggattaaaggcatgtgccaccatgcccggcttgaggctattttttaatttgtgcttgtcctagcagtgtttaaaaagaaaacataaatattgaaataagctaattattcatctctagagaaactaagttataagttagtttctagagaaaataggttatatgaaacatatttcttataagtactgctgagtaattgaaataatatttcatggagtatatctggaatgtcaaggggaaaaatctgaaatacacatgtatacgctttttacaaggccaaagtatacatagttagtacacatagtttaaagtttatgaacttgagtcataggaaagctttaggttacgtatcctgaaagtttgctaaaatgatagtgcagaatatgagacacactaatgattttttagtgagaagagtaagcagtttttaaaaccaactatttaacctgctaaagctgcaaatgttgccacttgagctataccaggtttgtctacaaagcatttataaagtgtacctctctcccaaccactatagatctctttctccttccactggaagaacttgtagtttggacacattccctagacaatcttattgatctaatgaatacattaactgtgagttttacatttgcctttcttcccgagcccttcactctttcccaggttctaattttaatgcctcatcctagtcatggtttctttgtataccatcagctgtaatctattttaataacttaaagactaccatataagcaacccaggcaacagagaaaaccatctgtgatgtgcttatacctgcatgttaacgagtctgaagtagatcccttccttcttcatcagctcactgtgacttccttgttccacaatgactccatcctcaaacccagcgatgacatctgcgttccggatggtagacaatcggtgagctatcacaatggtggttcggccttctctggcctaaagaggaaaaggacagatgtgtggcacactagggtcgtggcattaatacaccagcaatgagccggcacaattaacccttgggcagatgctgcttgcaagcagcggtgagaaagtgacactccatacttctgtgtacttaaagcacgggtaccactccttttaaaaaaacaaaccacttctgagttcagaaccagactggtggctgaccctttcaatatgagcaaaggttactctggaagctatggtggtttctgatactcaagaaagttaaagatttgccctgataagtatcctcacatttgtcagatgagccctagctctgagctgtttggtgtaccagagactctggcagaagcattttagggagatcattggtaattgacagccttcaccagaactccatattaacataattccaatggactatggactataaggcagtagtgtggatagtctgaggatagttcaaattagaactcaaagttcttcaagagtagggccaattctgctgccttttaaactctgccccacttgactttcataaacggtgaaatcagaccagtcctctaagtcattcagtgacctcacatgttggtttaatggagtgaatgaccatttaaacagtgagttattcccaccaaattattcatgttatgtcaatttctggtgctcattagcttcatttgaccgataatctcttgagacgaatacctacatcatagactcatcataatttagcttaattgacctaagtagttagaataataataactaaagaagtaggaataatctaaattctcatcagttgaaaatggttaaccagatgtgttatgtctatacaactggaatccactggaccctgtaaagaatggcatttgatgccaattactacattgataaagcttgaaaattctgtgctacatgaaaaagacagtaacgaaggccagcaagatggcttagcaggtaagggtgtttgcgattcaagcctggtgatatcattggagtctgggaacacatacaaaggtggaaggaaagaactgactccataaagttgtcttctgacctctccacaagtgctgtggcatatgtactatatcatacacacacacacacacacatacacacacacacacacacacacacacacacacacatcatgtacacataacaacagcaaaaacaacagcaaagtatggttacatctatataaaatgtctagaactagcaaagccacaaagacagaagagtgtgcacagggctactgagaagtagtcaactagtttcttttgggcaatgaactatttctggaattagtattgatgattgcataatctgatgagtatactaaatgccatcaaataatacattttaaaatggaattttcttcttttgttttgttaggtgatagtaatccagttttatttcttttactttatttatttctaaatttcaagtcttttaatgaggagtattcacaatcaccctaaggagcaagtacattattttgatacaatttaatgtatcattaacaattaaattacaaataatgatgccattattaccacaaaataggttattttgaactatttttaaactagagcagtgtttaggtaatcagagttacatgtgtatgcacatatgcatatatgtattacattctcatatatatgtatttatatgtatttccacatatacttgaatataagtgtttgtctttttactgatttaacaaaaaaaatccacaaagaaatagattaaaacttagaatgaaatacaatacatccaagaaaatgacagcatatcatcactagaacttgttacataaaaatacctgaatttataaattaatttcttcacatattttagcatattgttatcaaataaaacccatgtgtgcaagaaagaaaaaaaaaaaaacaacccccacagttcctcccacaggcctggtctaggttcactgaaccatggaggaaacctgtaaagatcattgacctctctctgcgacaatgtaacgggctcaagaaatcaataaatcccaagagacaacctcatctgccctttgggttttatttctcaatctagattcccaaaggactgggaaaagtctgcacaacaatttgctccccatcccccgccctgggtgtttacctcgggtactgaccttatccagtgcggcctgcacctcagcttcactttcagtgtccagggctgaggtggcctcgtccagcaggaggatcttggggttgcggaccagggcccgggcaatggcgattctctgtttctgtcccccactcagctgcgcccctctatcaccaaccagggtgtcaaatttctaaacagaaaacccagaacagctccagaaacctactcattcattcaattttatagtgttggggatcaaactcagacaggaccttgaatatgctaaaaaaggtctctatcacggagctatatgtcagccttttaaaagtattttaaatacaaaagtacagagagttttgtagaaataaatgaagacaaccgaaactttgattcttgtagtgtatcatgaagtataataaattaacactgagttgcaataattaccaatgcatgtcctatatgtctttatgttatttacatatagaatatagtcgttaagccttgtctgaataatttaagggatttgcccaacaaggttgaataacattgtaacccagagcttagcttttgaagcaagaactcatgcctcacgtttcagttgtgattttaagggaaactttacctggggcagtttcatgatgaagtcataggcattggcctctttgacggctttctcaatctcatccatcgttacattcccacggccatagcggatattttcagcgatcgtagtagagaacagcacgggctcttgacttaccacaccaatgatttcccttagacacctgacgttaaagttcctgatatcctgcccatcgatgctaatctgaaagaaagaaggatttcctagtcaatattttaagcaacctgatttcaaaggcacaagggctttttactagtattgagttcattcaaaagttagaaataaaaactaaacagtaataagcaggaataaaataaagcaaccatattttcctgatatatacattttttttttcaagaacagattattggagacagctatatcagggtcctgtcggcatgcacttcttggcatccacaggagtgtctgcgtttggtggctatatatgggatgtatgctcagattggtcagtctctggatggtctttcctttagtctctgctccacactttgccaccgtatttgctcccgtaagtattttgttaccctttctaagatagctatctcctgagaggttctgccaacctgacatatacagaggcgatgctctcagccaaccattgaactaatcacagggttcccaatgaaagaactgaaggagctgaaggggtttgcaaccctaataggaagaacaacaatatcaaccaaccggagctcccagggtctataccacccaaggagtacacttggaggagtggctcctgccgtatatgtagcagaggacggccttgtcaggcatcaatggaataagatgcccttggtcctgtgaaggcttgatgccacagtgtaggggaatgcaagggcagggaggtgggagtgggtgggtagggccacaccctcacagaatcaggagaaagggggatgaaacagaggttttcttggtggggggtggaactgggaaaggggataacatttgaaaggtaaataaataaaatagccaaattgattatctaccataagaaattttggatatattagttaattgtcatagtgctttaaaaaatgaccccaaagcatctgtatactcaggaaaacactctctctgggacatagcctccagccccagttaggttttaggcatgtcactgtgtttaatttccgatgataaatttaagttaaaatgtccccttatccaacatatagctagatgacattttggtgttttgctatgcttaacacactataatgtactttatcatttcttaacttttagccatttgatattttcttaattgttctaaaagcaaagaatcattaaattgaaagacatgatttatgttcctatattaatatcaattgctttactgtaaatgactagtgtttatggggcatttattccttgatgaacataagctaaataaatgactctttataagtaatttaataatggacattggcgaaatatataatacatctgcttcattgtactttgttagatctgggagctcttgaaggagcagtttatctttgtaatgctgatcactttttaattaagtttattctttggcaattgaatacagacatacatacaccccccccccagacacacagacacaaacacacacactgtttcttttcttttcttttcctttcctttcctttcctttcctttcctttcctttcctttcctttcctttcctttcctttcctttcttttcttttatttgtttttttgttttttttgagacagggtttcgctgtatccctggaactcactttatagaccaggctagcctcgaactcagaaatctgcttgcctctgccccccaagtgctgggattaaaggtgtgtgccaccacgccctgccatattttcaccctcaacctctaccttcctcccagctataaatcctttacctagctcatgtctttttgctgtgtgttttttttttaatctactgagtttaaccaaggccatctatgtgattatgggtttgaaatatctattagcgcccagagggtcatggcagtagggtatataagtaaagaaatgattgcccctcttctattatctatcataaccaataattaaagctaaccatttctctctctctctctctctctctctatatatatatatatatatatatatatatcctctcttttaaagattgtttgagaatttcatactttgtattttgatacacctaccatattgtcccctccacaccctccaactctgggtcctcatttagaatacccatggaatccaacctgtgttgacttcacattcttggatgttgtcatccactggagtgtgggaagtctaccaaggcccataaagaaaaataactctcagtcgaaaccactgtctcctgtgtgagatacatttctacccggagctctgccattatggctccaccatgtggtcaaaaccactgtctcctgcgtgagatacatttcgacctggagctccatcggtaaactacctcatgcttttacatcaagatggtcgtctgttcgtgattcttgggtgcacgccgaacgggaattgagtgggggtttccccactaggttctttcatttggaggcctcagcgagatctgtgtgacacccaggaaacccgaaagaccccttggaggtacatttgtttgtgtgcgtcttacatgttgtctgttgtctaagtgtggcactgctgaatttgtgtcttggtttttcaagtctgagattgtgaatttgtgtcttggtttttcagttctgagattgtgaatttgtgtcttggtttgtgaatttgtgtcttggtttcagggttatgagatcgtgggttcgagtcccacctcgtgccttgtttttagggttccgagatcatgggtttgagttccacctcatgacttggttttagggttacaagatcgtgggtttgagtcccacctcgtgccttggtattagggttccgagattgtgggttcgagtcccacctcgttccttggttttacatctggcagagtgaagaacaagtatgcttagatactggtgtcttttattctctgttgctgtcttgtttttgtgttgctgtcttgtttttgtttgtggtttttgttatgggacagactgtgtgtgtagtgccgactgtggacttggacagatgttaggacagaatttgtcagtgatagttaagaaaaacaactcggcatccctggccacacgcagcagggcctgactgagaacttcgggcttcagcagtagtggcacgcactggctgagggaggcgccacgtgggaaactgtggcccagggaggaacaccgatgaggaggtttccctgggatgcccgccccaccaccaccaccaccaccaccaccaccaccaccaccaccacggatttcatctcctgcggtactggcaagaaaagaaagaggggcactagccccgcctggcttcctagagcgaaagtgatgcctgctggggaggggccgactagagtcgccgcctctgccaccttcccccccccccctccctgagttggcctggtgcagccagctgtgagagctgccttcctttccctgccccaagtgttttctcttctagggcagccctgccctaagctgctaaccagtgagggagatatctgcccacttaaaaattcctgtcccaggtaaggagcacctatgagtttaatcaccaggctctgacaaatgggtatagaggtctagaaaaaggtgagtttagactgtaaggaagagcaaagctccagcagactcaggagagacagtgaattatagagatgaaggagattagagaggtctgatatgagagagatactctgaatgagaaatatttagagtagaaccagtaagtaagaggcagagaatgagtattacaagagagagagagagacagagagagagagagagagagagagagagagagagagagagagaggcgagaggcagaagaaagagaaaacaggagggatcgtagacaaagaaatttgactagaaacttggctgcagtaataggagagaaagaaaaagacaggatctagacaggaaatctgggcaacagaagacctagcctcagctaaaaaggctcagctgtgtcagactcaagttatctatttgagatacaccgttcgaggtggaaaacaatggctaaaagaagccagaaaaagactgtaactacaccaaggcaagtaagagagttcttgggtacctctggcttctacagactctagatacctgggttggcgaccttagcttcccattgtaccccctaaccaaggaaggggaaatgtttgtgtggaccccagatcaccagaaagcctttagagaaatgaaaaaggccctactgatggccagcctttgcctgacctaaccaagcctttcactctttatgtggaagagagatcaggggtcgccagaggagtccttactcagactttgggactttgaaaaaggccagtggcttacctatccaagaagttagaccctgttgccagcgggtggtttcttgcctgaaagctatagcagccatagctctgcttatcaaggatgctgataagctcactctgggacagcaaataactgcagtggcacccccacactcttgaaagcattatctgaaagccccctgactgatggatgttgaccaacgctcctgtgacacattatcagagctttttgttgactgaacgagtgaccttcgctccacctgctgtcctcaatcttgctaccctactgcccaagacttcacctacttagcactgtgctgacattctggcagaagaaacaggtactcaaaatgatctgaaggatcagatcagccttggcctgagagttcaagctggtacaccgatggcagtagcctcgaggttgaaggtaagcagaaggtgaggacagtagtacagtggtggacagaaagcaagtgatctaggccagcagcctccctgaagggacgtcggcccaaaaagctgaacttgtgactttgatataaaggggctgctgacatctgcagagaaggacctaagatgctatggctaaaggaaatcagatggcaaatctaatcgccaaacaggcgggccaaagagcaatgatcctggcagtcaaggagcctaaagattattatgatgtcagagagaccagttttagatacacccctgagcactatcaagttatggacattatttgacccacctgggggccaagaaattaaaaggtgtggttaggtcctttgactactatgttacaggactctctgacttggcagaagaaatagtcaaaagctgcaaggcctgtgctatgacaagatagaatttacagaaattaagccagctagatatggcaacaagtacttattagtgtttatagatacctattcaaggtggatagaagcttttcctaccaggactgagacggccaatgtgatagccaagaagatcctaaaagaaatcttcccgaggtaatggacctgcctttgttgcccaggtaaatcagggactggccaagatattagagattgattagaagttacattgtatatacaagctccaaagctcaggacaggtagaaaagaagaatagaattctaaaagagactggtgcagacttggtgctccttccccatgcccatcgctgtcttaaatgatgtgtctagacctacatgttgttgtaataataatctgtaaactaagttaaaaggcttgcaggtggtgaagaaagaaggctggtcacaattggctacagtgaacgagccaggtaccccaaaagacatctcaccagttccagccagagatctgatccacgtacacctacatcatgcccagaccctcaagcctcactagaagggtccttgcctagttctgtttaccatcccttcttattctgtttttgttcttaacctttggcccatgttatgatttctattctccacatagagatatagacttctaaaattctaagattagaattacttagtagaagaagaggggaatgaaaggaaataaaacttgagacctgtgattcatgtaatgtatgtcaaatagcccaaagagttgtttgtgagctttgaaacctggggctgagaacatagcagaacaggccaggacatgcccgggcaggcctgttgttaagagtttcctgaggctgcttagcaataaagataaagagaatgacatgccagactggcccggtgcctccctatctcccgcccttctgacagtctgctaatgtttaaatggaccaatcatgtgaaaccacgccaatttctcccccagccccaccccttttctataaaaacccctagcttccaagcctcggggtcgaaaccactgtctcctgcgtgagatatgtttcgacccagagctctgtcattaaactacctcatgcttttacataaaaaaaaaaaaaaaaaaaaaaaaaaaaaaaaaaaaagaaaagaaaaaaaaagaaaagaaaactctctatatttattctcaaatcataggtagggttgctttcattaatttcttaaatactaaactgctaagtgatgtaggaaggcccagcacactgtctgtagttccattgagaaagtggtcctggactatagaatgtagctgagcatggtccagaaggagccagcaagcagacgttctctaggacttcagttccaagctcctgcgtgtgtgtctgttctgactcaatgatgggccgtagtctataagtataagccaaatacacccttttctttcccaaggggctttccattacaatgtttgtcaacacagcagaaagaaagctaaggccatttgtaacgttgtgttttacagttgttgactaacattggaaaactcaatgtccttaagttgggtcaactgaagaacaaactgtgaattagtgttgtttacttaggatttcattagtactgatcattgttctctatgtaagagaatatcgttttttggaaacgtattctgaagtatttgtctgtttagaatgcatatgcaagaaagaagaataaatcaaatggataaaaataaaattagtgagtagagctgtgtgaagggtatatgtgttccctgcaagaaagaacatcctgacctagtctcacgctctatgcaccttccagagattcagacttctcggtgctatgctgttctttgttttagatgaccaaaagataaagaaaatgatcattttgctgaatttagttactattttaagatttgtggcttctattaccaggctgtcaagaataactatatggaatttgtttggacaaatcaaactcactgagagtgaccctatttgtctttggataatagaagagtcctttctagctccagctgttctcaagacttcaaaaatacctgtccccgaaatacatgttttgtccagatgcattgcaatattgtatactctttccaaaatcagactcacatatttatttgtaaggaaacagtttctaagggactacttctgcccaccttccgatgttggggactttggttcttcccacttaccttaccctctgtggggtcgtagagcctctgcagcagctggacagttgtgctttttccacagccgctgttgccaaccagagccactgtctgtccactcttcaccttcaggttgaggcccttcaagatctgcagaggaaagcaaggaagagcacacttcacaaccaagctccaaaaaaggaataattcaattctacttagaatttagaaaagaagtatgacttaagagtttaactccaataggacaaaagtatataaatatcaaaggaatcagactctattgggaagatcagagatcagcttacgctaggaaactagtgttgctgacagtaccttgatattagcccgagatggataggaaaaatgaacatcactgaactccaaatttcctttgatgttgtctggtttgtgtcctctctctgaaaaactgtcaattttaggattctaaataaaacaaaattcaatgactattttatcaaataagaaattgtatgtttaaggaataggaagcattaaattctaaacatagagttcagagtatcataatccccttcatgtaagcaaactcacagtgaacatgcaggatatgtgtgtgtgtgtgtgtgtgcatgcacacatgcatgtgtgtttgcatgcatgctagcacacaagtgtttgtgcatgtatgtgtgtatatattaatctccttcatgagagtgaatacacagtgaacatgtgggatatgtgtatatgtgtgtgtgtgtgcgtgcatgtgtgtctgaatgcatgttagcacacaagtgtatgtgcatgtatgtgtgtatacattagtctccttcctgtgagccaacacacagtgaacacgcggaatgtgtatgtgtgtgtgcacatgcacacatgcatgtgtatctgcacacatgttagcacaaaagtgtctgtgcatgtatgtgtgcatacatgtgtgtgatttactaaaacttttctgaaaatgcatagggaatatttattttatttcatgcaacacgttccagtttttggcacatattcataaattttataaatggtcagttatacatgtttagaaaaacaacaaaaacatattggataagtgcagttatttctgcctttagtgaaacttatttcttcctaaacaataaaatagaacatggattgaatgacgagcacagtattacgtaggaaccatgtaaacatccaatacatttagaattataaattagatctacttctataatttcaatttccaactttgaattttactatgtaaatgcaatggcatgctttagtatgtaaatcttttcattttcaatgtagtcagtttagtttattcaatgtagttgatttaaggttagggagaagagcaaacctcatagcaaagttcactgttaatttggtcctatacacaatttatccccctgcccactctactgtatagaaattataatctggtcaaacatgcaaaggaagtaaacacggaaaggaagcatcttaacctacactctcgtgatggacataaacatcgtgatggatataaacagactccagtggagtcagtgatttgatattgccaaataaacttgtagagtttcctgttgttagagtgtaccttactaaataacttaatacacgtgattcaatacttgattatcaataccaccatgactctctcagctttcagacaatgaaagacttacattatcaataatgtcaaagatcacataggctgctcctcttgcattagcgaaagcatcaatacagggggcagcctgccccacactgaaagccccgatgaggattgagaagaagacctgagtgaaagagttaggaacagaatagcatcatctgcgttagagcttgcttgaaatatacatgaaggaccgaatttaggatttattggacacttagtaacttttttcttactgagaaacaatatttgtacatctttatgaaacacattgtgataattagatacatgtatataattagtgtgataagacacccatcaacttgctaaaaataaaattgcttcagtaaagaacacatttttttttttttttttttttggtttttcgagacagggtttctctctatagccctggctgtcctgtaactcactttgtagcccagctggcctcgaactcagaaatcagcctgcctcagcctcccgaaagaacaaaattttaaaaactaacacaacatttcattactaaatgtgtttatttatattttatttccctttgtatgcatcaaaaataagctttgtttagtctgccaaaccatttgttgcttttttccctgatcacaaagtattagtcataaagacatttgactcctacttcattagctctgaagctaatgccaccagaaaaagcattcctcctgttaaagtttcattccattctttatcattttatctaactctgcaaggaattgcacaaaatattcaataggaaacatacagattttggccccatgtggttttcctttaaaaagctattatagattgatagatatatggtcagatcaacggaagtctaacacttcctttatattttaaaaacagggtgtcttcctgcagtccatgatggtctggaactcattatagcctctattctccagcccaagcctcctgtgcgctgggattaaaggtatatattaccattcccagtcaccagtcagttcatccatttatagaacataaaattatgatcattatattttgcagcacacaaaacgacacatttcacatctgtctcattggaacataaactgatgtataaatccaacacagtttcaggaaaacagatttatagcatatataacttaagaaagatataggagaagagaaattactcctttctctccaagaacttttacatatatctatgttctttgaaataacagtgacatacgtgtttacaaaacccaaatcccttccactatctatctcttatctcaggaccaatgagaaaaaattcttaatggaagtagatattaaggcattattgcaatgaagtcatagctctttgtgtagaaggcttgccagtttccctttacctgtgacacagacattatgtaccagggctacaaatgtggacaaattcaccatgcaagggtaatggcaaaggttaatgccacctcccttatttataaaacgtcgggaggaaatgcggaagtgaaaacatgtggtgagctgccacaatgcgccagagaagaacaggaagtcgggagactctgctgttactgatacccccaaccttcaccaacttcaggcccctgtaagcacactgtgagattcaaattctcatatggagaaagtctaaggaccaaattatatttagaattttcattttgaaagagtcaagtgcaacttttgaaacatgatcaaccccaacgtggaagatggtcacaaaatgtcactggtttatagaaaagattaccaaagacctacgtattatgacttaagtttcggaagagaaaaacatacatatctgggaaatacatatcaaaaaaaccactaccaagtatgcatggattcttagaacgtaagtaatttaacttttaaaagtttttattttagtcattagtataattcaaatgcattaccttcacaatcatgctatgagcgtatctacatcttcatatagccagatgatctaacatgacttttcttttctattttaaaaagctgcatgatgtgtgaattgaatgctcttttacacaatgacctatctatagtaataaatgaaactctcttccacagttaaactcaacaagagaacaaggataactccaatatcttcttattctaatcatgttttccatttcatttccctttgtgtgaatatgtatttctccagtggtcaaaccacaagctattatcttgtcctcactcaccatgaggacttgacttgcatattctagaacgccaactctacccacaggacggcaaagatcaaacctacaatcacaactttttcttccaaaaggagaaaggggggaaaggagcaggcaggggatagagagctggctcagggtcaagaatgcacactgggctattatccacttatcagtgagtacatatcatgtgagttgttttctgattgggttacctcactcaggatgatatcctccagatacatccatttgcctaggaatttcacaaattcattctttttaatagccgagtagtactccattgtgtaaatgtaccacattttctgtatccattcctctgttgagggacatctgggttctttacagcttctggctattataaataaggctgctatgaacatagtggagcatgtgttcttattaccagttggaacctcttctgggtatatgcccaggagaggtattgctggatcctccagtagtactatgtccattttctgagggactgccagactgatttccagcccagaaacttagaatacccaagatacaatttacaaaacacatgaaactcaagaagaatgaagaccaaagtgtggacacctcatccattcttagaattgggaaaaaatacccatggaaggagttacagagacaaagtttggagctgagatgaaaggatggaccatgtagagactgctgcaaccagggatccatcccataatcagccaccaaatgcagacagtatacatacacatacaccagcaaggttttgctgaaatgagcctgatatagctgtcccttgtgaggctatgtcagtgcctggcaaacacagaagtggatgctcacagtcatctattggatggaacacagggcccccaatggaggagctagagaaagtacccaaggagctaaaggggtctgcaaccctataggtggaacagcaatatgaactaaccagtaccccagagctcgtgtctctagctgcatatgtagcagaagatggcctagttggccatcactggaaagagaggccccttggtcttgcaaactttatatgccccagtacaggggaacgccagagccaagaagtgggagtgaatgaatagcggagcagggttgggggagggtatagtggactttcgggataacatttgaaatgtaaatgaagaaaatacctaataaaaaattggaaaaaaatgcatactgctctcacagtgacctgagtctggttccttgtacctatggcaggtggctcacaaccttccataactccaactccagggggatcctacacctctggcttccacaggcaccttcatgtatactctacccttccacaaaaaactttaagtaatactaaaaataaataaaaaataataaagacaaggtaggtgcagaacaattccagatttctcataatcattagcagtattacttactgtcattgcatttccaattgtatattcttttgatataaccagagtggatccataccagaaggccagtgcataggatgcatatattaacaagaaagcaatacccatggagatgttggctgagatagcctttttaattccaatctttttggcattttctaaatgtttctgatacctaccgaaaaatgaagagggaaatgttataatgtgaataacactttacaacccaaggcgtaataaacccctattcagtatggggttaagggtggaagccatgaaggtaataaagtcttgaggagtccagtatcccaagaattgacctggttcaggattagtgctcaggagaactgacctaagcctactcctgacttgcttggctcatctcctttgaactctactgcactaacttgtgttcccatggctatgccagaattgaagcctcagtcctgggatactaagaaccttcctgtcaggattacatacaggtaaaaacaaacaaacaaacaaacaaacaaacaagcaagcaagcaagcaaaaaccccaaaccaacccacccagggggctattctagtttctttagtggttatattcttaactattctagactcgttagtggttatattcttaactattctagacttgttagtggttatattcttttttttttcatgactttgtttaaaacttagcagacaagactgcagaaaaacatccatgtgtcagggtctaaagctgcatcttagattttagttggcaaagaccacatttagcaaatcaactctttagtcttccacgtacaagccagagacgtactaaaactgtaaaaaagagaaaaaaatagtttcttattgttcaaaaataccactttatgtgtaagtgtagaaaaaaatgcatagatcttcatcgaaagagctggctgtcctggggaatcattcaccctttccacagtactgaggcgagttactggctatgcagtagggctcccttgctacagcactagaaggcagctatttagggaggaggcaggaaaaggagaaaggaatgtacgtaaggcatactgtaaaggaacaagcgtaatagtgtttcaggaagaggagagaagaattattcaaggctagcttgggtctcactggataaaacaatggactaaatactgcgctcctgtgtgtgactctaataatcaatgccctggtcatcgccatactggtaccctcgagggtagtcgtctgggtactcgccgtgctattcattggggtattctgcctgataatcgctatcactgatttccgacccattggtgcccgtgccctggcttccgctgtgaatgacaggttctgtgggtgcggcacagtacttggggtcatacacttgccgcccaagccaatacacactcattcctttctgggaagcaactttgttggtgcccatctgtagagaaatggtcaagttgtccactggctgtaatgtcagcttctggtcatagatgtctcttctggtacctggtgctaacatcccagcctggctggcccctttgttggtgcccatctgcaggctaatcgtggtctggtcaaagggtttctccgtctgcatcttgggaccataaagatgcctccgagtcccataggctgtcatgcccgcctggctggcacatttgttgtacccatctgtaaaccaattacactctggtcagcctttaatttgccttcatcaaaacgtcttgtttgtttttctgcatacttaacgccaatgtcaatggttgtttggaatctttctgttttcgccagacttgctagagccaccagcgtagcctggatcatgttgccattctcaaagaggtcgtttgcttcaaatatatcatggggcttcataccgtaagcctggatagctttaatgaagttgccgatattctccaactgcggccaatttagtgaggattcgttgactttcttcacagagcctggctgtagcttgtttatgagttcgcacaggatgatgctgtccttcagccccagctggaagttgttgccaatgtctatctatgcctgtcacctcttcttttcagttgtgcagatcttcctcagcctgctgttcatacttggatgcgatcttgttcttaacttcggcggagagcccgtaggaagggcccttgttgaagtgggctgcgctcgggttctagtggtcagtcaccttcggtgtccctgctcttggccccagcggtggccgcgtgggtgagcttgctcccctgcgtggagccggagaagcctgaacgtcgcagacggacgtagatgatgcttcgaggttcactaggactcgagtcccgtggaggctccgggtcgctctggactgggaccggctgccctgctcgctcagtggttatattcttaactattctagactcgttagtggttatattcttaactgagatccatgttttcctttcttagaaaagaaaaatgtccccatgttgttcttctgggtaaaagacaaaaattctacatgttcttatatataagtcatgggcttcttactttggtcttttaaaaatcaagatgtcatcaattgccaagctaggtataaggtataaagtagatctcaccagagatatgggtctttctccatttttaaaacattttagtttcattgtctgagatttggaagaaagaattctcctaactactgcctgtttagagagacaatcatgagactgatagataaatatgaagagtagtaagtgttctgacaggcacatagttggcaaacttgtattcttgttcctgttatccccatcatactagaacattacctctcatattttattcatcctattaccatcttaatttggaataaaattttagtatttgaatattttaaatttatattgctgacttacacacacacacacacacacacacatacacacacatatacacacacaactcttcagaatgattttaacaaattattttttttacatcgagttaaatcaattctatagtgtagaaatttcaatgttgactctaaaattatggaaagaaataatatgggtttataatgaaactggggggtgaatcccatataaattagagaatttctttttatcaaaactccccagttaaaccaaatggagcatgggaattcattagttgtttttttttttttttttttttttttttttttttttttccccaaatgcgtgctgccacacacaaaggcttctctaactgcttctcagcacccagttctttggggcacttccctccactgtgagtactgcattcgtggaggagagctgtgtgtgaggagcggactgtgtaccacatccaacactgtgattaccgctgggtggcttggggcttccgggtacatgcagcagcaagattgacatgtgccccactgtgacacagcgctccagtgagagtgggcatgctgtaattaccttcacttggggaagggagtggcatgactacaccgacatcctgaggtccacctgagggttagtgtggtctgtctgtctgtctgtgtggactattgtgtacaggaagcagcagtgagaaagaaaaaaaaggaagaagttagagaaccagaaacatgttggctttgtagaggggtgaagaacagaaaagtagaaaatgaaatggaagggatcgaagaagcttttcatttaacacgggcaactttgtagagaattttcagagactgtattttggaaaattgtgggtatcaaaaatctcacacatagagaagatgtttatatggggtcatatttcagttatgtcaggggaaattatttgaatgagaaagttgctggtttatatacatgtttatttatccccaaactcactgagatatacatactaaacatgtatagccctttctcaattctacctcaatgaggttgctgctgtttgtttgtgcagttgtgtggtttaagcatttgctcacgtcctcaagcacgagaccatggagaagagcttccagcattgaggcagaaaggcaggtgggaagctctgtcttgttcttacaaagacccacacagtcccacagaaaatcctgcattgtgactaggaaatccatgtctcgggggtttcccttctgtgttccagtttggaaccctctatgtttccctttaagcatttaataacatttttctgacaggtaagtccctagggatcatcaggcctaaaatggagtttgtcgaacacgtaaggttgagaactgcaagtcagagcctgacaaaccacagccagcagcagcaatggtgctagcagcatgcaggggaggggttgctattaggagaggagagagtagcaaacataaaccacaaaagaatgaatggaaccctataaatgtggattctctgacccaccagatagagaaaattctttacctttctagctctttgttctggcccccgaaagctatcacggtcctgatggctcccagagcctcttcagccacggcacctgcttttgcatatgcagctagctctttgtcactaaatgttgagagtatctgtgtagaagagaaacagtcatgacgtttgcatcgaaagaaagggtaaaaggcagtctgcacagagctttaatgcccatttcccatccagacgtttagtgatgtgtgctttacatctttaaagcctggtctcaatgttcacctcctataaaggctctgagctgccagagtcaccagagtaaggaaaaccagacataaatctgtaagtagtatatctgagtcatgtcaaattccatctctctcatagcttttctctgtcaactatgaacttggataaaataaaacctgagaggattaattatacttttcttttatcatatcataatctattgtgtgtgtaacatgtgcacatattcatgtatgtgaaagtacatgtgtgtaaaaggaatattaatagtaaacatttttaatactacattttactccaaattgagcatctacatttcttttttttttttttttttttttttattttttttaaagatggtctctcagtggcatagagctcactagttaggctagattaattcaacagagatccccagggacctgcctacttctgcctccccaacactgagtttataaacttggagcatcaaacctgggaatttttcagaatttggattctgggaatctaactcaaatcttcattcttacaagataagtcctttgttggctgagttctctccccagccctatgtcacaattttttaatcatgatgaaaatggtactttcaaacttaataatggtaattctactagaaaataaaatgcttaaacaagatagcacaggagaaaaaaaatcaaagcaagagagatacaagtagttacctaagtgactcttcacacgcagattatacaagaatagccagcaaaactgctcaagtctgaagcactggccagtaaatgtatgtattatatatgtattatacatatgcaaaatctgtatgtaaaacttcaagaatgagatgtaattgttatagtgaacaatatccctactctatttaaatctttaatatttgttcaattatttggatggctgtgctttcaacttgtatcttcttaaataaaaatatagccatacatgtcacttcatacaccacatcggaagatttattcaaagagataacagtgaaactaagaattgtgattaaaacaagaactgtagtgtttggacgcaggcaagacaatcattttcatattaaagctctgtgtgaatgaaacattcctgggcgtggtttccactgcctctgagcacatttgtgagaaggttacagcactctgcatacacaaagcaacggcctttgtgggttagcacacatgaacatgcctaggtttcacagacctttgcccaaacagctgtagagagccccaggatggggctgatggccatgatcacgagggtgagcttccatcctctgatgaaccccactatgaatcctgcaaaaaacgtggctattgcttgaaagaacattccaaccttgtcaccaattccttcactgattttggagacgtcactaaaagagatcacacctaggtggttacaggcaggaggtcttcagtcagaaaggtgaagtagacatttaataaatgcatagacaagagaagcatgcccctcctacggtaaaccttttacagagtcttagactcttggatatttccccacaaaagaactatacaaaggaaactcagggttagctcatgcttctaagaagctaatgtgactgacgttgttactatgaaattagttaatcctattacagaggcatccacactgtgcacatggatcagtttgtttaaaagaaggaatcaggaaaggtagtatgacagcaaaagaacatccacaggcaaaaaaatagtccccttcttaactgaacaccacttatccagaatatacattcacgtatacatacacatcatatacctgtatcatatattcatctacatatgcatcatatatgtaattctttctcctgccctccctcatgcctgccctcactccctcctcccttccctcctttcttttccctcccctttcctcttgttgagacaaggtctttctatatagcccaggcttgctttgaacctttaactgttctctcagtattctataactcagccccctggaatgctggcgttggaactctgggccaccacagccagtatgaagctttctatgaacactgtgctgatgctaaaaaaaaaaatgaaattcagattttcccatttaagagtactccactggtaatatgtcacaatccaaaaagtctatacatcagaaccaactcctggttctaagtgtctcaaatattcaacctatacccttgtttgcattcttactactggtgtgactgtaatgtgatcatctaaagaaaggaagtcctacgatgttagctaccacagctcacgatttcccatggctgccatttctttccgagtgaaagctgaagctttcagtagggcatggagatcctgattgccttcgtcttctctcctgttctgacctcctctactcatgtgcccgaatgacaaagctatgtcacccatcttcccctactggaacagaacaccaagaagacagagctgcttgctctgcttgctcataggaagcttccaggaagacactcagcttgtaacagacccttagtattcagttagtaagcaaagcatcaacacttataaagcaagtctttttgcaactaaagcaaccatttgttcagccattcaaccatctctacttggggtctagcacctgtcaggcctgcagcaagctccataaaagataactggacacaaaacatgcatttggtcctcaaataatgagagggaaggagggagggagggagggagggagggagggaaggagagagagagagagagagagagagagagagggagagagaagagagagaaagagagagacacagagagacacagagagacacagagagacacagagagacacagagagacacagagacagagagacagagagagacacagagacaaagagacagagagagatagagacactaatataaatggaaaacatgtggcataagctatagagacttctagaaatgactaccagagatatgctcaattcatgtctaatgcttaaagtagtaatttaatgttgcttcaaagctctattcccttgtcgattttcatacagtgcttcatttcctcatcaaagtgtgacattatcaacatacgtactctgttagacgtgtgttgagttcagtggtgcccttgatgtcaaaccagcccatttcttgtcggaggatggcatgaaaaaatttttgcctgattttctttatttgtcggccagctgccaaagtccagaatgagacttggatataggcagccacaagaactccaccacctagtcccgaatagtagtatgcatatctggaaaataattgggaaggtactttcatctcttggttttgttttgagacagggtctctttgtgtagctcaggactgccttgaactcatcctgtagcccagaccgagactgggctaagacatcagacatgctagctagacaggcttttggggagaaagttcagaattggaaatcagttcaattttctaaacagatcataaacatagaggacattatcacaaatatgcatccatttttctctcttcttaagtggcaggatgactgctgtgtgacagaaaacctgttgcctgaaacatggtacaatgcaaacacaaacagttgtggttgactgcataaaaacagtgtcaggtggcttgttttaaattggtgacaattttcataactgtagcctgggcttgaatacagcgaaagtgtctctactactaccacacggcaaacagcagtaaacatacaaaacatgtaaaatggttctgtgtgtaaagttctccatgtttttaatttaaaaaaccatcttatttggaaggctcaaacttttcaaattaattttctaaaaacctaataaattcaaatagatttggaacagaagtgcatctaattgaggagatggtgtccaaaatctatttctaatctactcttacaaactattttcagttagcctctgtggtctgctttagtgtgcacaaagccctgtttagtcagtaagagcgataaaagtgcagccatatacaatccctgcgctacaggattctgaggtttctgtcaggaagactggacaggctgtggatgccatcgatgtgctgaaatcaaagtgacaaatgggaatgaagatagtaaacaacttttattaattttattaaagcaataattactatatacatatatatacatatatgtatatatgtgtgtgtatatatatatatgtgtgtgtgtatatatacacacatatatacgtatacatatacatatatatctgctgctaggaatcatatgcaagtgaaaggccataaagaaagcaactttcttgaaactgggggctgggccacaaatgataagaggaggtggcactggagaaagacattgggtgttttgtatattctcacaactctgtagtatgagatcatttttaaatggaatgttaaaagttagtggacaatatatacataaacacaaattacctagtcatttcttcttccaaaattcttcctggatttagcattgacaatgaaaaattcactaaataaaaacaaaagaagtcatttttaaaaagagggactactaataggaattgctggatttaaaaaaaaaatcaatctgttaagaatgtgagcaatatgtaggagtttctcaaggaaaaattttatacccaagggtacttttaagttcactgaaacacagttgcaagtgtgtcggtccagctgggtggggggggcgggacacgctccggtcctaccctatccacacactctgtggtagagcagcttcctaaggtagcgtggaatggacgaccaaaggtggagacccagaggtgcacaccaaaggcagaagttgggatggagactatcagatttggtggacactgctattttattagtgatttaaaagacttgcttatggaattttttacttgtatcctttccttccatgcttccctacgacagaagtaagcgaaaggccagatttctcccattgggaaagaagaaaattccaactgcgtagcttagaaataagtcacaggatctctgctaactactcaagtcctacagtgcatcttgcttattaagagcactgagtgtgtgtgtgttccgcagcattaactgaaaagaaccatgctaattattgtgagctaatgtgatttaaaaaaaaaaaatgtcacagggcccccaatggaggagctagagaaagtacccaaggagctaaagggacctgcaaccctataggtggaacaacattatgaactaaccagtaccacggagctcttgactctagctgcatatgtatcagaagatggcctagttggccatcagtggaaagagaggcccattggtcttgcaaactttatatgcctaagtccaggggaacaccaggaccaagaagtgggagtgggtgggtaggagggggggagggtatgggggactttcaggatagcatttgaaatgtaaatgaagaaaaatacctaataaaaaaattgaaaaaaatttttaagcaagactttcttagctgtcacacttaaatgtcaactgctattcattgaatatttgttcaatgccaggctctgttctgaacacttcatatgcatttgtttaattttcataacaacaataggaggtaagactatctcaaaaggttttactttatggaaaaggaaagcgaagcaagagagaaacagacctgtctaaagccacactgctagcaaatagcaaatatgctgtaagccccggcagtgtggcctttgctctcagcttactctctgcctcattgatctgtgtggtgatgagttatttccacttaaaaacacacacacacacacacacaatgaaggggaaaagtaagcattgtctattcacatctgtgaaataactggataaaatgtccgtgaagcattattgagcaaggagaaggcaggcgctttccgttctccgcagtcctcagagaagaagtgctctttctttatccttcaatcctgggcaaatggcccaggggtcatgttttcttgctgctgtgtagctgtgttcccttcttagctttctcaaaaggaagatgaaaggttgaaatttattttaaacttaaacagcatcagggtcaattgccgagagtgcagtcagagtgcagtgcctattattgtgggttttttccctactaatgtgaaaggcttttgcttagctgtcgactctgaggaatcccctcattttatttctcttctacttagttctgtgggcccttttccttcctagtatttaaacatggaggataggactatatctggattgagagacagctaagctgtcctgatgctgtggaatttgtggaaatcactaggcatttctcttgaatttagacattaggtgaaatcttacatttttatcagttccaatccctaccttttaaatctctccacgaggataacaaaacacattgaacactctaccccctgtctcccgctccctgttcactcctgaaaatatgaatctatgagcatttcagatcctacctacttcttcccatgagtcccaggtcaagaagggcaatataattctgggtgagaacctctcctcagggctgccaggtggtccagtgtccctggtgctgggacaccatcagacaaacgtgtacagagggctccaggaagagtcaagggattggaagtttgcaaagagcctggacccagcgttgtcagatgctacttaaatctgtgtcttatagtcccagttgatcatgtagtttggtctttaaaaagttattgggaactctgaaaataaaatactttgccaatcttacccaaacccaatacaccagtccatttcactgacttagaatgtttcagttgattctactgggacaggatggagaccgttaaccggatcttgtccataacatgaaaatgaggaacacttaaagctgcattttcatcgtagaaaaattcagtaaaattcacctctgttagatggtgaaacaaaattagactggttgtgttatttccatactcttgactactccccacacatcctctgaacatttgtcacatcttttcataagtaaccaatatgattccatcactcaatccatgatcatcattcaaacgctattttaaaatagtaacactacactggtttagcaatttggtcatgcttacccagctactgagagtaggatctgattaataaggagatattgaggaatagagaaagtatttagactaccacattagactctccaagtaagttggcacccacttttctagagtctgcttaggaatccctctttatacagaattgtccaacatcaaaacaaatggtgtttattcaggcagcttgggtgttatggccagttaatgtaactcagagctctggcacactttatctggtctatcatgaaacaacacaagaacatagaaactgcagcaatcttcttaaagaattttctagattattgtagtcacacagagttgtctaaagcaataaccaactctttgatactctgcagatgaactgttttctatgactctgttcttaaggttttggatggaaataatctttgttcacggtttgtgcacaaccaaatcattgtgagagagcaatcctgtcatgaagtagcttcactccgctgacaaggatggattctgttcacagtaagtcattgtcagagcctcttgtaatttaaaccttttcccctctaaaattccatcttacttggcttccatgaagtctacttgcccaagaatccacccattctaaataacatactaaaaaacaaagcaaaacaaagctctatttgatgagctatgacttcagctaagtacacaaccccagtgacttttcagctcaattctactttgccaaacataacagtgaatactctaaaattggagtgagttcattgatgacttcatttttctccaaagagaatgtggtatgagactattacttccacaaactacagaagaatgaattactcgtgagaaattcatttggcttcccatagcaaatcctccatgactggcaatatggcccctgaccgtgtggtttcagcgaggcaagggtcaaaacctctgcatttataatcgagggtaccgtgacagagttgttaactctcttgagtctaccaccccagtaatctcttgcttggacagtttccctagagagaccttgaacttgtcccttagcacaaagtgcctgcctgcctcgttcagcttcaaagccatggaattgcatcattagttacaagtacaaaacaagtaaactgcttcaaagaagcaagtcattgagttattctagaaaaacaaaacaaacaaacaacaacaacaacaacaaaaaacccaaaagtgaaaagaacaaggctctcatacttggtccagaggcaaattcattcataataaataaattcaattgttttaagctgattaaaataaaaatacatgtagaatgaaatgtaccatctcgatagttttagctctacagtttaatagtggtaaatatactcattttttgtccaaccaatctttctgagttgtttttactctaaagaagaaaacccctgtgccaattccacaatagctccctaggtccctctccctagccccttgtaagtaccatttgaattcttgtttctatgaatttaactgttcgagataatccacataagttgatggttcatgcagaagccatcatttacccgctactctagcttagcataatgtcctcattgtcctctaagtacattcatcctatatcctgcatcaacaattttctctcttaaaggcagagtaatatccttttcaattttttcactatatgaatctgattttttttttaaaccctagaagaagtcagtttttggttggtgttttctactatgggtaccacacgtgtgtgtgtgtgtgtgtgtgtgtgtatgtaaaattaatatgcaacaaatgtaaagttaagatgtaaatgtaacagatcaatacaaaatgtctacctcttacactttcttaaatatttttattattttctttatttatgtatctgattgtttgcttgcttttttgtttgttttgagacaggtctctctatataatccaagctgtcttggagtcagttatgtagaccaggctgatcacaaactcacagagatccacctgcctctgcctctgaagtactggggctaaaggcatgctccaccacgtcagtctcaactttttttttaaataaagatttatttttatttaatgtacttaggtgttttgtctgcatatgtatgtctatgcaacacaaatatacagtgcccctggaggcctctggcaagctgccatgtatgttctgaggtttgaatccaggtcctgtagaacagccaatgctcttcactgctgagccatctttccagaccctattaatgaccttgtcctatctccatttatccagtccattaaaactatcttgtcctatttcaacttatctttatagcatttctgttaaggtcaccagcaaagcatcagaaatccaaattcatctgaaacagatttttttttcatagaaaagcatagttatttatcctggaaaaaatatcatggtcctgattatagctgagatgatagaaagacctgggttggaagtctgtcataactcaagtagcatactatgaacagtttcactggacttctgaaaggcattatatttatcaccattaatgtaaacacattttctgtaatgatcaagcaaccacgttatctttagataattgcatatatgccttctaatggccactaaatatgtagttctcaaccagcgatctatgctaatgtatgtagaatgatatctaagtgatgagtgtactttactcagttacatttgtaatgaaatttgccttcctttattattttttattctattgcctatgtactgttacagcttcattttgatttttttttccaccctagacccttattgtctcttggaagaacaaagcctttggtcttgggataagacatgggaatattgctgggcgtggtggtgcacgcctttaatcccagctcttaggaggcagaggcaggcgaatttctgagttcgaggccagcctggtctacaaagtgaattccaggacagacagggctatatagagaaaccctgtataacaataaacaataaaccaaaaacaaaaacaaaagacatggaaatatttctagattaaatttaattactatgaagacaagtgtggccatctgctccttaccacaatggtactggtgtgcccttttttgcagtgacttttttgcggtgacatgagctcatgtgactccattactttaaacctttactgaggtcgttgatatttagtaaagtgtcacattcaattctagttactcttgttagtccaaaacatcaaacataaaaagtagacattttgaagatgagagtgggcaagagagaaaaaaatgaaacccagacagaagcctacaaaagttaccatgtccaagaagcaccgctgtgccacctgaactgtttcaaaacagttgcttctgtgaccacagaggacagacactgcatgagatactagagtcccactttatttagctgcaaagttttcttcttgttttaaacacaatgtactttttgagatttaaatgagcacttaaatgttataaaaatttcacaactccccttgtggtatttagggtcacctggatgtctaaatcaataaacaaacagatgacgtaaattaaaactagttcctaatacctttcacccagttaggttaatataatgtattttttaagaggcaaagaaacaattacctggcaaggaaaagttcccagtattatctacaaacttatctgtcatttctccaaagactatcatcatgaggggaagacctgatccatgagctatggccatgagggtgcccaggaacataaacaatttatcctgccagtcagagtatcggaactgaaaagagaaaataaaataagatttcatttaataatttgttcgttggggatttttgtttcaagttagttctagtatcacagtgacaaatgtgtttatctgagagaatatatgaattgcaatccagataactgtaagcttaatttcatgattttatgtatataaaaagaaatcaatctaattctacttaattagcatttaactggggctaattattacaatgtaatcaaggcaacaaagatttggatccatgtagaaatactgtttaatctcccagaggttgtgtgtagtgagttaaggtgagctgggaaccaacattaagttcacatgaacgggtgcatccttcagagacgtgcatgtgcagaaacctagaaagtaaaccaggaacaaacagatctcagctggaagccagatccctctgaaagggtgaaattagcctttaaaagcctttaaaagcagttcagtacagaagagaaaaaaagaaaaaaaaagaaaaaaaaagaaaagaaaaggaactttatgaagtatctgtgagctttatggaagtcttgattatgaaaaaccttgaaaaatgaaagagaatcaactggaaaagaacagggaatgtagaggaagttgggattttaagcttgcaaagaaagctggcttaggactgcacagagcacagcaggatcacattataggtaagcagaaactatcaaaacttttgggtttagtgctcagcagggtggctaccaattattatagcaaaatatacaactcctacttactaaacaaatacctcttcagaagacagaaattcactgtccttttaatcttctccaatttacaccttttgctcaacaattttgatgggttcctctgtggatttccctttgctctttttcctgtcttctagactacagctttgttgttacatttccctttccagcttcctctccatcccttgcatgtctcctctccttttaaactttatactctgtttacttccccccaaatctcccctttggagacaagaggttatttgaagagtatacaatgagtcaggatggtggagtgggtggcgtctttgactgattcacactgcccagtgaggctgaggttgggagcgcatagcaggccctgggcatgtgtgcaaactgttttccaagggttttagagttcatctggggccaagggcagcaggggcagattccactcaagcacacaggacaaagcaagaagacaaaaagagaggaaggatgagaaccaggaggaactcagaaaaaatcaaaggcaacgacaaacacagagactgaatgcaaaggtatcctaatggctacaagggactagtgtcttcaaggtccactgttggtggcttctaaacgaagggagttagaacatctgggtcgttcaacatcctttcagggcacacagtcagatttccctgcggcgtttctttttagtggacattatatgacactgaaaaagtttctaatgctttccatgttggtcgaattaaatttaagtttctaagatcaaatttaaagttaggatacattcctacgtaaatctagattagtttttagtgacccttttcaacaaaacaagacatctctagtcctattacagcagctttgttctgaggtttttctacacagacatctactcagataaaaggtgatgattaaatttaaattcagtgtcaactaaacttattaaatgcaaacaaaatatcaattattctactttttaatatatatttctctttttttctgtaggaaacagattctaaactgacactaaaattacacatataaataaaattctttttctaggctggagagatagctcagtatggaaaagcatttgtccttcaacactgacaacctgagatcaatgcctggaaccaaaaggtttaaaagaagagaacagattcccaaataattgtcacttgacttccacccatgtcctgtggcactgtacacctgtactcacacacatcggccacacaacatgttcagatcttggtccactgtctattgtaaatcaatacaacataaatacacaataaaaactgaacaaaaaatggctctcactgaaactttttaaagcaaaaacaaagagtacaggaagagtgtgagcagagccttagaccaacggagaactaagttgttgtgtgccaagtgtttggatgcccttcctgcatttgctttctaacttgatggcttcaattgatatacacctctctctctctctctctctctctctctctctctctctctctctctctctccttccctccctccctccctttttttttttttgtcaaagactgtctgcttgaaacacatcacttttttcaaagcaagcactttcctgacctgcctctctgagacacattacaaatgaaaacacatttgatttcttcaaaacaaaacaagacaaaacaaaaacaaaaacaaaaacaaacaaacaaacaaacaaaccccaaaaacatgtaggcttgccttgtacccttggaaaaccctgggaatggcctggaacagaatcagaatatgtgatcattgagttgaggttcattgatttcctagtaagctagttgtatgtgtggattttttgttttaaatgttgttttgctgggcaggggtgggggtggggttagtgacaggttttatgaatcgagatgtttccatggcatttctgaaatgcttcttctttttaacctccctgagagtagtgagctcgaagccagcgtaccccaaccccttcatcgtctgtcttgtgacttaaagccatcgtttacaattaggcaaaccataggcacaagtgcaacagaggcaatccagtgctgctaagacagacagacagacttaaagcactggctggctggctattgactcaagtctccaaatttgaatgaagggcaggattcttagcacttagtatttcacaacttaccagtgtcaacaggccaattaaattcactttcttcttcttttctctgccttggttgctgtaaaatataattgttcaaatttaaaactgttatgagcaataaattgaaaataaactttagcagctatggttttgactcacaacatttttaaatacaagaagacaaccattgtcaaaattatccagcttcaagcatgctgcaaggcagccatcaagtacaaaggtaactgtccaaggtactacaaggacatctggatacaggagaaagggtcaagactgccagcctcacagtctacagtgaggagatgcataaagtaataatgttaccaaatcacctaaattgttctttttctaagaaaagtacgagttgttctatagggagactgcttttctggattatatggggagtggttttaggaaatactgtttttctggattcaagatacatctaagattctgttacttccccccccccccatttttcttgctacattcccattagaatagtcccacttaacttctatttacatttgctttagtgtactggaaactgtagccaatataattacttaagaactcaggctacttctctactcaggaaatagcaatggctccatttcttctcagagtgaaatcaaaacctttatattggctactcagtccacactctctgagggtaccatcatgacaccatcccccgctcccagctgctcagataggcagacctggtttctctgctactttgtgaatgcaacaaatacagtccggacctcaggatcatttagctctaaattgttgctgccagaaaatgctccccaaatacccatggttctttctgcttatttcccctttctcagtaattgacttaaaaataagacctaccctaaccaccctccttaaaatggatagacacttctgctatgttctcctaattttctcagtcttcattaattttcttcacacttggtacctttcaacagatggacatttgccactgaatatatacaagagaatgtgccacaggctatgcagcatatctagaacaggtatattagccctcctcagtttgttgtgcctaacagaagtgggcttagctttccttgaaggtaccgcccttggtattattatataaaaattagtcccatatttcattttgtaatcttacaatatcaagctagttctaactttgtgtatttcggttttgaggtgtttccttcttcctaaccacatgctgtgagcttcttctgagagcttcctgggccctgagtgttactacaccttttccagggactgctccttctaatactagtcagtgtgctcagccagtataatacataaatagccgtcttcgtgaaaatgccatctattaatagagtcacagtcatccccagcctaaattgccagatgacaaaaccacatttttctattagaagtaacaccatccatacatttggggtttgtttgtttgtttgtttgtttttgtttttgcttttttatgactcgatatggacaaacctaaattttctgtgaataaatgtcacgattctaagaatgagtagggcgatgccacggtccaaagcaattaacagaagcaatgcttcagtttaagattcagataggcatatttgtcagttggctaatcaggccccttgcagcttgagaaccaactacagaagctgataaattttctccctctagaagacaacttcatgacacatgtcagtttgttccgggtggcctagcatgaactcagagactgtaatagcctcataaactatttgaagctgagggtaaaaatgattcactgtccccacagcgaaagaggaaacacgcacacacttgcctaggcccttctgcctgacagaaagccgtatgtgtgcttcactgtggctgggggagaacgagagtcagggagaaagacagacccactggcaggggaagcgtcgaggttcaccctcttgcaactgggggaaaaaaactgatttcgaagcagaagttagtgaagaatgaggttgttctccatgtcaccccctagagaggagaaatagggcaaacagtctacagatgggagaaggggaagacgaggcaaagaagagaaacacaggaagaggggggccttgcttcgctacccttgttcagaagtacagccatcaatagcaggtgtctgaagttctaccaactcgagtagccagatgatggctaaaaagagtgaaacgtttactttataaaaatacagtgaatgttacacaacgccaatattcatcaaatcacccgtgtccaggggaggggggcgcttttgaagacagcctcttctctctgaacctgttccaaaaggagcctgggagacagtcctcaagaacacttaaagacttcatcccaaaggccggaggcatcaaccggttctcacaacttcttttcaggactccgctataacggaaaagccagtgactctgcggtcctgtatacctgatgctgcctagttcaaagtcgccgtccaggcgccgtgctgttccgtttctcgctgcctcaagatccatctcagcctggggagaaaccacagcctcaggtccaagtgcacccggctcagctgcctggagagggggacctccaggctccgcgcagagccggcgcagagccgggggcactggtggcagccgctccccggcaggtcccaccgcaactgccttccctcggtccctttctcccgccgcgtcctccctcacctgaacttcacgcgcgtgttggccgcagcgggtggcgcgcagacctggactttgctcgccgcggctcgtccccgcctcccacacgcacccggcgccggcgacgcctcccgctgcggcgggggcgagggcccgggcccgcaggagagctcccgcaagccccgcaggctctgcaggccccagcgccaccagcgtgtcgccctcgccgccaggggcgcgcgtctccgcggccgcccacccgggcgagctgccagcagcccgcaacgcagcaccagctgcagccgataagcctgctcgatgcctcctctggcaggctacgggcccctaaaagtgactgccacacctcccccatgctgagttttcttttagaacacactggggaagtaatttccaccagttcaacaaccaggcgctctgagatcccaataggaagttaagtagcgaggtcgccacttatgcatcctcggctcgagtctatatggcaccaaattgcaactaacaccccagatgctgaagattaagcaggtccagcccagaatcgtcagcttaaactccttggagatgaggaatatcgctggtgtcccacacgggggagggcacatagagacacagaacttgggggctgaaaaggattcccctattaaaagcacacacttaaaaaatattattcattttacatcctgatctctgccccctctctcggtacccgcctcacacagtctcttccccaatcccccttaccctgtcttgtcaagtctctgcaggaataggtgaatcctctcccactgagaccagacaaggcagctagcttccaagcttcacaatttgaatttgatctctgctacagacatagtggaaggagacaatggtctctcaaattgttctctgattttcatacatgcatcatggaacatgtgcactcctatacatcaaaccacgtgcagaaaataaataaaatgagagaaaaaagcacgtacttttggtttggttttcacaaaagtgaagacatcggtgttcagagaagctaagtaacatctccattcccaacgctgcatctttcagactggcaccgatgcaaagcctattgactgtggctgttctgatttcctactctaatccctccatgccaaatcgtcttactcttagggcctatgtgaatatggcttccttgtgagttctcatcgatttctccactcttcccaaaacgaaggcgctaaatcagataataaagcgacaccttctgagcttcaagcaagcaagtttcatacttaagagcttcacaggtcagtgtgtggctgtgggcactgcttatttctctgggcttcagtttcttaagagtctgtcttccttattaggttactgtgaaagtacttagtgttgcttttaaaacatagcacctgtataatatgtggcttgcttttctcctagtccagtggctgaatttgcggctgagccttgttctgtgtggcatttgcacaatagctgtctaactgctttccagacaaccttaaagtatgaagagtagaagagttgtcacacagaccctgaaggcagctctgctctgccgtttaccggtgctctggctttggatgggttatttaaatctcaattcagtctcaacatccattaaaataggggatctagtaaggttggaaacaatgagtataaagtgtcctccacacttactaaatgacaactactgtcatggttaaaagcttagaagagatgggcgggagagtagggaagagcgtgcagatacatccagctgagtgtcctgggcatctccatctggctcttcacatagggggagctgattgcaactatgagatagacatgaatgtagttacatatttgggctcaatttccagtctaccccaaccacaagaagttgtcttgatggaacagaaggcctttccttcaccagtttaccaggtgttcagattattattgtatggtatcccgaggctaaagcaactacggaggtgaaagcagttagaattgctaagttcaagaggggagttttaggtaactgggggacattacagaattcagtagtgtctaagggatgacatatgcctgccaatctctaatataagacagcctgagggagtggaatcaagactcatgaaggaatgagaagagtctgaattaaacataaatgaacaaaaacctggaaggagtgaagtgggttactttttctgactgtctgatccaacccacaaggttgtccttgcaagaggttctctgcatgagcacaaaagttagaggtaggcccacagtgtctacagggaaggagaggtcacatctccatagctacacttatatatttgcccaagatgaaaagctgtaccatctaaaatcccagtagcactattatagaaaaaaattaaaactatttaaaatataccttgaagagtcctttttattccattttgtctccactcagaaactaggccataaacaatttgctatcaatcctgcagctgatctgcctgtctgagtttctctgaggctagaagctgcagtttagtacctcatagtaaaaactgtgggaggctaggtaaagaagccttttgttctatctctgcaagagactctcagctttgagttaaagtctagggaagaaaactggagggagacctgtctctgctctcagcactgtacaacaacttaagagattgtattcaccacagggcccccaatgaaggagctagagaaagtacccaaggagctaaagggatctgcaaccctataggaggaggaacaatatgaactaaccagtaccccccacccccaagcttgtgtctctagttgcatatgtaggagagaatggcatagttggccatcaataggaggaaaagccttggtcttatgaagatcatatgccccagtacaggggaattccagggccaggaagcaggagtgggtgggttgaggagcagggctgggggaaggtataggagactttcagagaggaaactaggaaaggagatagcattttaaatgtaaataaagagaatatctaataaaaaatttttaaagtaaaactaaaaaacaaattaaaaataaaataataaaataaaaaataaagagactgtgttcacatggtaaaaagttaattacaagtttgcacatacatttaggtcataaattgaaaaagagatttataacagagaattcatatatgaatataccctagaattaattatctggctgaacattcatcatttgttactagcttacagattcatggagagttaaaaaacataactaagttttccttgtagttttgtatagataaactcagtcactattttatctcatgtctttgcacctgtggtgtatatctttagctcctttttttattggatattttctttatttacatttcaaatgttataccctttcccagtttcccctctcaagcccccatcctctccccaccccaccccctgattctatgagggtgttcccctcacccacccactcactcctgcctcaccgccctagcattcccctataccggggcatcaagccttcacaggaccaagggccactcctcccattgatgccctacaaggccatcctctgctacatatgtggctagaaccatgggtcctaccatgcctacagacataccttatgtaggcattttctcaaattagagttcttcttcccaaatgattctagcttgtgtcaagttgaaaaaagaaaccaacctaaaataatgcccatcaacagaaaaatagataagaaaaacactgtacatgtacagaatgtaatattactcatctataaagaaaaatgaaatttgcaaataaacagaactagaaaaactaagacaggaaactaagacctagaaagaccaatactacatgttcttactcatacgtagatcctagcttcagatctttggtttgtatttttaacctggaatctaagtataagcaagtgtagaatgggacttttggagtcatgtcaagagaggtggaatactgggagccaaaagacttaaccaaggaaggtcatggtgtgttttggggaaaatctaggaataaaacaggggtgggtagctacttcaaaggaaaggaatatgataagccatatagaagccatatcatgattggttagccagaatcaaaggtctatgaaagtcttatagaaacccattacttaaaaatttcaaaataaagtttctataaagagttcaaggaataacattcatggattgagaatgttactcccagaataggggttattaggtgaaaatcacatgataagtcaaaggataaaaggatatctcctatgagttattggccagggatgtcccagaggtaaacaaaacaaaacaaaacaaaacaacaacaacaacaacaaaaacccaggaaacaaacaaaaaaaaaaaaaccaaaaaccaaaaaacaaaactagtgtccttgattgcccttggttattgtgatggtttgaatattaggagatgtggcctggttggaggagatatggccttgttggaggaagagtgtcactgtgtaggtgggccttggagggtttctagtgctcaagctccactcagtgcagaagagatcctcctcctggctgcctttgcatcaagatgtagaactcttgcctcttccagcaccaagtcagcctgcatgcttcccaccattattataatggactgaatctctgaacctgtaagttggcatcaactaaatgtttacctttataaaagttgccttggtcatggtgtctcttaatagcaaaggaaatcctaagacagtcatttaccacaactatattgtaagaccctactgatgaagatatcacatactttggtttcaggaaatagagaaatcaatctcaaatctttctggaaatgctctccttgctggctagttcttacagtgtcagaggtgctatgcaggctgctaggagagaaaagaaatagatggtcctacctagcattggatcctgtgtgctacaacacagacttgatgggcaagatgtgctcactggtgcgatagtggcttgactgttttggagaactgttttcaggttgaatttgaggcctgttacccaggaggacatttcatgcctcaggctgtaatcctgattaaaagcctatggttggagagatcataggttatagggtagaaaccactattttttttctatctaaatggtcaaggtgtcaaattgccttctgaatgtttatccacagatcttggatgctcactaccttggtcagagtagcttgttttggggatgtaaagcagtcaatggactgatacataattggccaaagaactgagattaagaaactgagtactcagccccaaatagggcatgcacacaaacactgcaccatacaaggctcaaaaccatcacagaagaggaagcagaaagaatattagactgagaggaggagaagaatgccgtgaaatgttgtcttttggactttgcatggctattgtactcataaattcacagcagtggtcacctgcacacaaactacacaaaatcaagtcagcccaaatttccagcataaatgggcaagatgatctctaggccctgccccttgctgaggagctattattggcagtggatagttgctgggagaaggatgatcatttttgaagatgtagctattagcaggtttcccatgtttcagtgggtagtttcatacccatgcacatatggacagtactaacttgactttaatggaatacaatattattttttttttcgagacagggtttctctgtatagccctggctgtcctggagctcactttgtagaccaggctggcctcgaactcagaaatccgtctgcctctgcctcccgagtgctgggattaaaggcgtgtgccaccacttgaaagaatgcttgggggacatggaggaaggtagaagagggaaatgggagtagaagtgattgtgtttgattatatacatatatgaaattctcaaaagtataatagaaatcagtcaaatatgagttgtataaagatatacaacatagctggctgaggtgagcactcaattatatcactgtggccatctgaactgtagtaacaagaaactggggagatgcctcggctgtaaagagtacatgttgctcttacagaaaagctgagtctggttcccataacctatactgggcagcacacctgagcctgtagctcaggtccagggaggtccaacacctctggtcttcatgggcacctacacttatatctcctacctacacacaggcacacacaggtacacaacttaaaaataatttagaaagtaaacttttgaaatactgtgacaaacagcataagtcttctgatactattagtcacaaatcttgctgggtcactactgagtatggagctcacccaaggagtcaaggtcctgagaaattttatcttttacaaatgtaggtatttaaggaggagaagtccatttgctgaagaagacagccagggctacacagggaaaccctgttttgaacctcctgccccaaataaacaaaaacaaacaaacaaaagcccaaaaccaagaaccaagaataatgctgaaattcaaatgacaacaaataaaatagcagaagtttaaaacaacaacaacaaaaaagaacttttgactttcaggaatttaacatttgggttttaatctctcgggatcctggttttggaggggttagggctattggtgttcaagaaggtgtcttttaggattatggtgagcaccagtttatctgaatcatacttaattcaggaattccttctgcatgcgtataataacaagaacacccctgtcttataagtgcctccagctagaacgtgagcatttactgcatttaagctataatgatgccgagtgtaaggcaagctggaagaatctgctgtcttcctgtttctatttgtcctgtgggaattttccttttctataagaatttttgatctcttttagataaatgttcttttttattaatgctttcatttctactctttaatatagtagtgagtgcctccatcaggattacagcagtcacctttgactaaccattgtgctttcttcttccaggataatatgtggagtctggaactctcagcctcacttactccacccccaactttgacaaagttacctcacatcttatctatgtattcatggctcttggaatgtcatcacatcgtgagttcacacacacacacacacacacacacacacacacacacacacacacacatatatatataaaatctttcttttgatttctttatacttcagcactactgtcttgggccattttcctcaggccaatgcagccacacttggtctacttttgctgtcttgggtagtattctttccagcttaaaaacacactctttagtatgttaaagaaaagttgatgatgaatttttctcagccttttccctctgacaattcatttcacttttagtttgaaaacttctatgttgtttgggatcttggcccactagagatgaaagctcatcatgcaactacagcaatcaagaagatgtgtgcagcacatctgtattcctctgcatgtctgcaccccacagtccctccctctcattttcttaaggtggtcctatgccatggagtatctatcttctcttttcatccctgcaccccatttctcctaacatacacacacccatacttcttccttcctgaaagactcctggccctcttccctcacaagctgctgtgacagttttttctactttgaaggtagacttcttgaaagagatgtgccagtcacctctgttgcctgtccctttgttttttcttagatccaatctaaacaggaatttggtcctttaacaccaatgaaactgctctcatcagggccacagataacctccacgttgctaaatcgaaaggcctaagtccagtggttctcaacctgtgggttacaacccctttcagtgttgcacacagatatcctgtatatcatatatttatattatgattcataatggcagcaaaattgtagttacaaagttgcaacaaaataattttatggttgggggggtcaatacaacattaggaattgtactaaaaggtcatagcattaggaagattgagaaccactaccttagtcctcgttttaacttgagaaatttaagtatttgataacttgatcatgtttccttcctgattcactttcctgattttgggatgccacccatatcttgtattatccagtgctttccttgtcttgctttctcagtcttctctgatggcttctcttttgacaagttttcattttgttttatttttgagattataatgattacgacatttctcccttccctttcacccctctcctatacctctcccctctctccttaaaaatcatgacttttcactaattgctattgcatgcatatatgtataaacatatatatttctaaatacaatttttcaatccatataatgcatgtatgtcttcaggagtgaccatttggtactggaaaatccattggtgtgctcccatctccagctttccttggttgcctgtagttcttggtgtagtgttgagagctcatgggcttttctctgtctactttggcaagctcacctttgggcagaatgttggtgagactttatgtgtattgtctgatgttacaaggagacacaatctcatagcaaatttcatgatcctctgacttttacagtctttctgcctccacttcagcaaagtcctctgagccttaggtacaggagtgtcttgtagtgtatccattgggactggactccacaactctgcattctgaatgcgtgtggttttctgtagccacctctgctggagcacagggagtgcaaccttggagtgccaaggcataggtggccagtgtagactggggcacgggcggtgggacctgattcaggtatgacaacctgtgggtaagtgaagattggatggtaggggtactcaccaggccagcttgtggaggaggatgggggatgtctaggtacgggatggagtggtggaggcggccttttgttaattcttaagttacatgaggtgctccaaagctcacttcttggtgtttcagtctcaccattcttacattttttttttgtcatctcagtctcacagctttaaatatcattcatatccaacagtttctcagttttatttctatattagatctctttcccaaatcctactttttattttcaaggcatactgaatggttgtattgaatgtttggtgccatctcaagtctaatatgctcacttgactcctgatctgtccttcaagctgacccctccaacaggcccctcctccttggctggtatgttgtgtgtaatttattttttcttttatgctaccacctttgcccaggagctgcgattgtgctaccaaaccctcctgagaccctagctccatcaagccaccagcactgacccggcttctttctctacttgccttgttccaggagttgactgttccaccagcccattcccaagaccctttctccaggaggggtcaaattaccagttccaccagagacctttgaatccgaggataaaaaacacacagatagttctattattttaaaacttgctggctaggcacaattgctgagcgcagaatctcctgcctagaatgtgtatcctcattaattcattatcccatctctcctccatatccttggtcacctgcctgtagtggaggcagctgtccctagctgtccccaaggccttacatgattgcagcatccctattcctccaaggcatggcaggaaaaactcctgtctttccctgcttctgccttttctcccagggacccagaaggcctacctgtacctttcatccagcaattggctcccactcttctttattgacaaaatcaagaaccaatcagggaacaagaccttaatgtcagcacctccttctacactagtagctctgattttctagttgtcaacacagagttaccttatatccttctatttttttcaatattccataatcagtcagtctggaattatgttgattttcctttaatatatactccaaatctgaacccttctccatgtgtccagttccactagtgttacacaagtcactaccatctctagcctgagttgctatgagagcttaattgttcctctgctttggtctctgcccccatctctatctctttctctttctaaagaagggtccgatcctcagtgatgtgagaggtgaatcaacttgtgttactccactcttcacaactctgacttgggccagttccagttccatagtcacaacccgcagtgctccgccctcaccctagccttactgacctcattctttttcctttccttgcccaactctgccctacccacacttgcattttggattttgctcaaatcggagaggcagtacacagaccagttccctttgcctcaaactcatcccccagttgtcacagggctccactttcacctcttctgagccaagtctcagttaccatctttgcaatgatggcagcccggtttccacctagaagctgagttccacggtccttaggcctcagttctgccttctctacttcgtttgatttctctacagcatcacttggtttctaaaatacaactatgaatgcaataggcttcttgttatccttatctcaatagtatgtaagattcatgtgagcaaagataattttgtattcattcatggagctattcaacaacccacacaagcgccttccttacaagaattaagagtttgaagacagaaagaaagcaaggtgtcactctagttcaaaatcatccaggtttacacgacatcttatagcacaatcacacgcatggatatgatctcttctgaatctcaaaataaaaagcatatttaaataaaaaaaaaagctactgttttcagcttggagtgggaaaacagggactcccaaaaagtaagttaattttatacaattggtaaatgatggaactggggctctacctccagccacatgaccccaatgtgtccttccctatggctggagaaggctactaccagtaagtaagcatgtagctttttttttttttctatgaatggtcccttagcatgaagcaggcgtgtgtgtgtgtgtgtgtgtgtgtgtgtgtgtgtgttgaatcaatattaaaaataagactttcctgtaagtaaaggtcaacagaaagcaaactacatttaccaaaatattctaaatttgccaaagtattgtcaaatacaacacagtattagctttttctgaagaaagtgtcttagattctattctaggacaggttgactttagctctgtggtgttttctcccagtgttttgctttcaagtctactaaagattgggtctagcatgcttcagaaatgctcacatgttaaaggcctggtccccagaggtggtgcactttggagaaaagctagaatctttaagaggtggaacctagtgatagatacatgggtcattaggggatattttgaaggggactgtggggccacagtgccttcctcttctttttttaagtctctggcttgttatataagcagttttactttgccacacattcctgccagcatttgatgctccaccacagacaggtggagctcttggaaccaccaaaggagctgtgggatactcatttctcgaagtgctcgccttactagcctgctcccttctaggtctactggctcgagggtagggggactttgtttctgcatgttgtcatttctggattatttcctccttcagctggaacaaatgaggcaacaaagcaacaaagcaggaactcgatgccatgtactgtcctttgggtcccaagacctttgttcagtcttctggactatctccagttttcagtcttaattttttttagatatatcattcagtatttttaattgtacttagcagaacagatagaaaacaacaggcctgctttatttccccaaaagttactactgaaaaatttaaggtgggggatgggctgattaattttgctcatggtatggaagggttcagtatgtggcttggccccaagcacttgggcagaaccttgtggtgcagagtgactccttcacctcatggtgaatggaaagcaggggaaaaagaaagggactgggaccaggtataatcttaaaggagtggaccagaatctcatatatatatgtgtgtgtgtatatatatatatatat

SEQ ID NO: 13 - DNA, 50348 bp, Homo sapiens
tccctgcctcagcctcctgagtagctgggattacaggcgctaccatgcccggctaatttttgtatttttagtagagacagggtttcgccatgttggcgaggctggtcttgaactcctgacctcaggtgatctacccgcctgggcctcccaaagtgcatcagtggtatttttaatactcttttttaaaaaaggattcacctaactgagggtggaggatgggaggagggagagcaggaaaaaacacttgggtacaaagcttactacctgggtgattaaataatctgtacaacaaaaccccgtgacactagtttacctatataacaaacctacttgtgcatccccaaacctaaaataaaagttaaaaaaagattcattgcactcaagttaacagcaccctcttctgaatgatgtactaattattattgatttgagaaagtaagcatcagattggatccagtttccaaaaactttcggtgagcctctgtctgtgacagctgttcaagctatgaatgcggattgggctcaggctcagaacatcttcctaccgtggagctaggaatgagctctttccactcccgcagatggagtgttttctgcttgtttgcttgtttgttttggagatggggtctccctctgtggcccaggctggagcactgcagcctctaccatccaggttcaagagattcccctgcctcagcctcctgagtagctgggattacaggcacctgccaccatgcctgccaccacacccgccaccacacccagctaatttttgtatttttagcagcgacggggtttcaccatgttggccaggctggtctcgaacccctgacctcaggtgatccgcctgcctcggcctcccaaagtgctgggatgacagacgtgagccaccgtgcccggccccagatggagttttgatctccaaaaaccaagaagcttcttcacatgatctttctggttactgtgcagaggctctcagggtagaaggggcctgtgcaccacctctgggtgtacctcatttaagatccctgagaacatgagtggaacaaaatagccaggagagaaacctgggagagaagcttcagagccaggctccagggacacagaggacttcaccaacattcacagggaccacggattcccactcagaaagcaggaaggccacgttttctgagcaaaactttgtgagagcggtggggagccttccaatggaggatgcctgtggcatctggggagactctctgatatggtttggctctgtgtccccacccgaatctcatccgaaattgtaatccccacgtgtcgagggagggatctggtgggaggtgattggatcataaaggtagatttcctctatgctgttctcatgatagtgagtgagtttaaaaagtttacactcttatggtttaaaagtttttggcagttcctcccctcattcttctctcctgccaccatgtaagatgtaccttgcttcccctttgccttccaccatgattgtaagtttcctgaggcctccccagccatgaggaactctgagtcaattaaacctcttttctttataagttacccagtctcaggtagttctttagagcagtgtgaaaacggactaatacaccttccatgaactaagacaaaacacccactggcattcaagacccttattcaatggctggaatctccaaatcaataaactcatcaattggaaaccacttttggcattgctgagagtataaaagaaactaaaatgcctagggctgctttcttttcttttcctttttttttttttttttttttttttagacagtgttttgctcttgctgcccaggctggagtgcaatggtgcaatctcagctcactgcaacctccacctccagggttcaagcgattctcccacatcagcctcccaagtagctgggattacaggcacgtgccaccacgcccagctaattttttgtattttttttttagtagagacagggtttcaccatgttggccaggctggtctcgaactcctgacctcaggtgatccacttgcctcagcctcccaaagtgctgggattacaggcatgagccaccgtgcccagcctggctgttttctttgtattttaaaaattatggccagcgttcttttgtgtgtatgttgggcagggggagagggggatggcagtaaaagtcacaggaagtgtagttgatgaacctttctaataaatcattttaataatttcagctgctcagttaaactaaatttggcctgaggctgcctgcatactttgagttcccacagagcaaactgcaagcaaacttagtatgtaaacaaactgcaacttatcttagcagtatattctcttaagacagagactggctgagacaagttgctgagtctcagccaatcatggcagccaagcatcagccaatcacaggctaccgactgatgagctcctgtccatacccaacacctgatcacatcaccctcaaataaataaggtgaacacccaactgtaaccaatcagctatttctgtagggcacttcctttttctgtctataaatactgcctgaccaaattgcttgggggagcctctgaactggtcctgtttttgagtgctgccagattcattaatcactatttgctcagacaactctactatttatttgtctaaagttgtttgttgttgttttgttttttgtttttgttttttttacacaggcaagtaaacctgaagccaaacaacactgaatctataaacaaccaggagatgctcggtgcagtgactcatgcctgtaatcccagcactttgagaggccaaggcaagcagatcacctgaggccaggagttggagatcagcctggccaccatggcaaaaccatatctctacaaaaaatacaaaaaaaaatgagccaggcatagtggcacccacctgtaatcccagctacttgggaggctgagacatgagactcgcttgaacccaggaggagcgggttgcagtgagccgagatcacaccactgcaatccagcctaggcaacagagagagactgcctcaaaaaaacaaaacaacaacaacaaaaaaaacaaaacaggagactattcagtgtaatttattcattcctttctaagagacgggatcgtgctctgttgcccaggctggagtgcagtggcgcgatctcgactcactgcaagctccacctcccaggttcacgccattctcctgcctcaacctcccaagtagctgggactacaggcacccaccacgacacccagctaattttttgtatttttagtagagacggggtttcaccgtgatagccaggacggtctcgatctcctgacctcgtgatctgcccgcctcggcctcccaaagtgctaggattacaggtatgagccactgtgcctggccgggatctacttttttcttatttaggtcaggattgcagggacagggacagagtgagagggacttcatgactgtgatgctgtttcagttacaaagtgcatttatacataagatttcatttgatctttggttatacggtaaacagaacttatctaccagacgggtgtaaaagtttggagcagaatgtttaaaaaattgagtaatctctacctctggaaatgattaattaaaagatataaaatgctctctccagcactatgtaagggtgtcccagggagaaatgtcttgatccgagaatgatgaaaccaaagttctagttctagctctgcattaaatatgtgtccttacgagaatccctcaatttctttggatttgagtctcctcatctgtcaaatggaggggagtgtgtgtgtgtgtgtgtgtgtgtgtgtgtgtgtgcacgcgcgcgtgcaggaggatactctagacacactgaggagtagggagtttgaacaccttcctctgaaaatgcttccaaactggtagggagaaagaaaggtggaacatgatgagaatgacctctgttccccaagccccctttcagctcagacattctctcattttaaatttggccatggaaatgacaatttgaggcactccaagaacctggctctttgcagatgagtgaaagttgtgctaagtaagacactggagaggctgtctgagaggtgagagtgtggcaggggctgtctggccataatcagaatgtgattgtggaggaacaacctgaaccaatgcccctcatggctggaggagtctgaaaagaacattacatgctggagctgtttgctgatctctccgtccaggtgttagccaaagtcagatgctctggccacagcctcgggtggacaagaggcgcactcatgactcttaacaacagcacctaccctcaagccagcaaatggaggagccaggatttgagcccaggtctgtctgacccagaacctgtgttctcagccattctgctgtattattctactagtcagcaaagagctccataagaagcatccatttgtccaaaggaccattctgtatcccaggagagaaaccattgcccagcgatttgcctttccggtacctgagctccctatgatggccagcatctgcccacttctcactttgaagcttaggttctggatgcccagctcacaagaattctggcagctgggagatgtccagggcatcttgaactgagccagctgctcaaaccaagggacctgagaggccaggtccacctgtggggagatatcagaaggttccttagagagctgaatggttcagagggcttcagcaacttctgttcagcatcttcgttccccaggtggcccctctccacagaggatatgtcctcacctacacacaataggccccaacccaggttctaccaaacacggaagcaggacccatgctgagaacctgtagctgctgtttctaggtctgaagataagaagaatgaaaagcatgtacaggccaggcatggtggctcatgcctgtaatctcagcactttggaaggctgaggcaggtggatcacctgaggtcaggagtttgagaccagcctggccaacatggtaaaaccccgcctctactaaaaatacaaaaattagccaggcatggtggtggttgcctgtaatcccagctacttgggaggctgaggcaggagaatcacttgaatttgggaggcagagattgcagtcagccaagattgcaccactgcatcccagcctgggtgacagaatgagactccatctcaaaaaaaaaagtaaggaaaaaagaaaatcatgtgcaatagtggtacagaaataaaaataaaacacgaagcaaaatgtcttcacttgatactagtaatttactaataatttatcagatgtttactatgtgcaagacattgtgttaatcacttaacatccatcaccttattcaatcctcactgcaaatctataacatagatatgctcagaatccttgttttacagatgaggctcagggcagttaagcaacttgctcaaggtcacacagctggtaagtggcagagcagagaaaggctcattggcttgtcccaactcacacccacaggaagccagactcaggcctctgaagttcaccatcccagaccccaccatgtcccatctgggtccctggggagctgtgggaatatggatccttgaatctgaccagggggttcctgggtgcctctgaaaggtcagtcattgtctttgcactctggatgttttataagctccagggatagtacattttacaaaaaaaaaattatatatatatatatatatatacacacacacacacacacatatatatataactaatgaaatctgaataaagtctgtagttaatagcattgtacattgttcatttcttagtgttcataattatactatgggtatgcaagatgttaacattaggggaagctggacaatgggtatatggaaacactgtgttatttttgcaattttttccaaaatctaaagttatttcaaaatatagtttaaaaagagtcccagagacatttttctataggttcacgcattttgttttatgtttatacaacagttttattctcttttcaagcctctcaacctccagctctgatatatgccattgatgacacctattgcacctgacacgtgaggcatcaatgtggactggactctgtccttgcgggcagagggcctgcaagttgggcccacccttttatttccacccggggaatttcctggctgtccctgcctgctcctctccccttgaacccaggcgtgcctctacctggtagttgaggtctctgacctccagggtgttgggctggccactgtaggtgaagtacaggctgttgtcactttcagaggagaacaatctatcctggaggccctgtgggagacaggagagatgaggggctcctttagaagctgctgagaacataggagaagacaagaaggaaaccaacaggtgagagcaacttcttagagccgacgtggttaaatctcaaattggcaacagatgggattgcacaggtggaacctcagggctttgggaaaataggagtgctgacaagggcccatctcctcttcccttcagagagaggtttggggcttctcccggggcaccttcccagagaacctcaacctcaggctggtggagcctgaagccaagcagcttctggtaaagagacccagactctggaccggagagagttctataaaaaaacctctgtgctctgagaagacctgactggagtgggcaaactctttgcctttaactttctcttccctgcagctggcttaatatctcctgaggccaaacagacatgacacttgcagcatgtgagagggaagcagctgttgagagttaatgcccaatattcatgaagataccaccctgagaaaaattctaaccaacatcttagtcctcactaacatctggcatacttctcctcatatctgattttgatgaagagttcatgcaacaaagtgatggaaaatgctgctgggagctttgagaggaagtccctctcatcatcatcatcatgttgttgttattgtcgaagtggtggtatatttgaatgtacattaaaaaatcaatgtttcatggtgtcggctgatacctttgaatggtattaaccatctgcagatctcaattcctcctattttgacaattcaatcatttaaaccattgaggcccaaacaaagaagcaacaggaagtcccccatcatttctttttctttggattgggtctcgctctatcacccaggatggagtgcagtgacatgatcacagctcactgcatcctcaacctctcaggctcaagcaatcctcccacctcagcctccccaccacacccagctaatttttgtattttttgtagagacagggtttcaccatgttggtctcaaactcctgggctcaagtgatccacccacctcagcatcccaaagtgctgtgattacaagggtgaaccacctcgtctgacctccattttttactgcattcaatttttcttacatttctgtcaggcaggaacaagtacactttcattaacaagttcccatagactttcctcctcaagctaccattctcacactatacattccttcaatcaaccatgcacccaacaaacacttatggggagcccagaacacccttcaggcttggaatttgggatgtgacaatgaaaaggccgttgaaaagcttagattttggcagatgagacaggtgattacgatggagcgagacagaccaggcagagagggaggctgacctcaagcatctgaccagggtttattttcactatgtacacaatgcacgcacatgctgtaggtgaaactaacatgacttatgccttacgtgaaaataacaaataacatacagcagtcttcttgtcaaagtacccctgcaatgatgggggccagaagttctcggaaagaacattccaggtcagtggaggtggagggaaagaaattcggtgacagtatgccgcaggcgtgctgtggggaacccttagagttctgggagagtatgaaaaacagcagacgaaagtgacttccattgcttaatgtttgaattatcaccataaagacccaaaattatacagaaaaaaatgggaaagataaacacctaattcaggagaggggttatctctggggagcggggagagatgaaaggagaaaggggacacagtaggagtgcggggatcaagcttcaaagcttttggtaattggtggtgtgtacatgagagttctttaagctgatttgtgtacgatatttcacaatatgttgtcaaattgagagagcaagccagtgagtagaactccagagttccattcccacctcaaccccagttgccaaagcccccaagcaggagggaggttgagggagaggaggtaagaaggtctgtgccccaagctcctgaggagattgaaagcagctcggacagatgctggactcctggcagatcagcccttcggccttgcccctcactcgccctctccgctgtcactgtgcacattgcttcattgtcccatttttgttgttgttgttgaatcatcaaaaaatcttagccattgccagctgtgcgcagtggctcatgcctgtaatcccagcactttgggaagctgaggagggcagatcacctgaggccaggagttcaagaccagcttggccaaaacagtgaaaccctgtctctactaaaaatacaaaaaaaaattgccgggcatggtggcacacccctatagtcccagctaccctactcaagaggttgaggcaggagaatcacttgaaccggcaggtggaggtgcagggagccgagatcgtgcctctgcactccagcctgggccacagcgtgagactctgtcaaaaaaaaaaaaatcttatccatttctaagagactcatgtgggctaacatgcatcttgctgttgttgtttttaaaacaaatatctgcaggagggatattagacaatgtaaatgagctgagaaattacttctgctggccaaaacatccccaggtcggatttaggcatggaggaggcgctgaggaaggaaggtcagacatttggagtctggagcaatgtgtggaggtaacctgcagcccaactgggttccactgtgtggtgctttgagaaggggagggagctggcagacagaggaggcagagcagaaactgggtaagaggaaggggagaggtgcctggttgcttgttccaaggctcaccccaagccccttcactgtggcctgggaaggcaggtgtgggccagccctgactccaaccaccattgagggattgtgccttccaggagttgcacaggcagctcatctttcggaggaagaaaattcgtgcctgggttggggacgacctctgttccattttaaaatattttccttggctcccaggaaggatttgttagactcttcctgaggttttgacaaactctctgtatttttcaaatacttaagtatctattcggctgacatcttaatcagtacgactgtcagaacatcacttgaatttctgacaggtgacacccaaaaaagcaaaagcaggtttatttgtaggtaaccagctctgctcatgctgggctacattgtaatttctcctcgtattaacttctgatcaaattcctgagtcagatgcctaggcaagaaggaaactcacagagcacatgtttctagttctgagatgaggagcctatgccccggggggagtgatgtgctgacactcacggctggagggttggcaagaggacacgcaggacttgttcctggctgaagaaattttatcgaaacattcagcctaggtcacacacagctctgcctgctgccagggtttctcttgtccttctctgttgctgctcctgcccatggcatgaggagtttgtgggttaagggcacttgccactccaggtgcccaagatgccagatattctctgtgcaaatggccccaagtccatccccagggtctgtacacctcttcccaggcccaacctcctgaggacttttaggccagagaagtatatgtctgtgcagggcagggctgcaatgcaggtaggcaggagggtgaccatccagggtgttgagggccccatggagtgggatggagctgagggggccagaaaagggggacaggttgtggctcgggctggaagtggctcccccgtaccagcgcattctagccaagttgccttagaatttctcaatttacacatggcctttcaggttgtgaggaagatatgtcaagataagaggatagaaactattttatttaactgttcttatagcttgactgatgacttttatatatctagacataggaaatgtgaccctcatcctcttgttccaagacccacaggtgttacgggcagaccgtcactcagcacctggagtgacaggatcggacagaagggaagcagaaatggcagggcctgcgtgcatttctggtgtggtcctagcatttctttgcctctcaagctgtggtggctgaatcgtcagccctcccaggcaggaagtgttcccaaagtcccgctgactttctattctattcaggctttaaacatttcccgaagtggtgggccccacagggtattcagagagcagagctggtcagatgtggtggttgcagaactgactagaaatggtgggctccttgggtctggccgagtcaagtcctggaaactcaaggccagtccaggttgttttccccattgggtgtggaatcctcgatcatgcttgtctttctctcctccctcctacccacaacaggcaaagatggaaaggtaggatggggtgaggtggtgggagtggggatctgcttctcgcttgtcttccagtttagcctcctgcttcaaatcctgccacatcccgaattcagtcaaaggctatttcttgagtaaacacttctcaggtaaaatgaggaaggaaacatacctccacctcctgccacctggctgcttctactccttccagctttctcgcagaacttacgattgcctgttagagccacacatgctgatgttcccacaaaagccgtctgtcaccctgtctcacccatcacttcattactgagaccaacctgacagccacatggatggaggagacaccagtggagtccctggcatgtgtgagcacatttctatgatggagtctcattcggaaaaagcgaaactggccaggcacggtggctcatgcctgtaatcccagcactttgggaggccgaggagggtgggtaacctgaggtcaggagtttgagcctgaccaacatggtgaaacactgtctctactaaaaaatacaaaatttgccaggtgtggtggcaggtgcctgtaatctcagctacttgggaggctgaggcaggagaatcacttgaacctaggaggcagagcttgcagtgagccgagatcacgccactgcactccagcctgggcaacagagcgagactccgtctcaaaaaaaaaaaaaaaaaaaaaaaaaaaaaaaaaaaaaaaaagagaagaaaagaaaaaagaaaaagtgaaattgtcccacatcacacaaaagaacatcatttccctaaaagagcatttcttagggcaggaagtgacctcagaggcctctgggaccctgaatctgttcccctccgccctttgacatgcaggaaacagtcctgcggccatgtcctcacactgcttgatgtccgggtggtgctaggacagaaggctcctgagggaagagagaaaggtttgatttctcctacccgcccaccaggcctgggccgacttcccattgctcactcaccgaggtatcctggggagtggcccctttcggcagccctctctcctctgccgccttcccggccatggggcccacaggtctgtgaccctgggctgcagctctcttagacccagctgctgcctgccagggccagtgtcttcactctgtttcctggagcagggacacctcggcctcctgccctgggcccgtctctcccagcattccttgctggcaagcccacctacaaacgtgtgtgttctgcccactgtcaagataaggacgcgctggctaaaggtacatcagataatggtctccgtggccaagtcccagtcctgctgtcccaagggactccggggtcaggtggagcaggcagggcagtctgccacgggctccccaactgaagccactctggggagggtccggccaccagaaaatttgcccagctttgctgcctgttggccatgggtgacctctcatctttgacccccggagggtccatgggtctccaagtaaacagaggctcccagagctccctggagggggctcctgccaccgccccggagcctcacagcctgggcatcctccatgcctcctacagcgtcaggtaaggcagagcccttgctgctgctgctcccccaggagtgcggggcccggcgctcacccctctgctgcctttcttcactctttaagtgccagtctgggcacttcgggctccctctttagtggatcgggtggagagaggagagggagaagggctgtgctgggaaacatggagcgacagtgaatggcccctccccctgcccagggaagggcctgggcataaacaaagtggcagcagtgccctgccaacccagtgtctacggcctgccctctgtggatgggaatgggggtactgcgaatgcaaggagtcttgaaacctggtgaaagaatgcagggacagccacctcgcagccaaacggacaggacattcagagcaactccagcacaggccccctccctacgtggcagacagcctcagtcgctatctgccaggttctacagaggagggcgcagagactgaaacacgttaggagcctgtccggagactactggggtggggcacaggtaggatcaatgctggggacctgggtgtggccccttccagggccccaagctgcctttgccttcctggggtttcctttaaagccaccgcgtgaggccctggtgggacatcacatcttgccggcagcagtggaccaggcagatcctcaaagatgtctccttgtacgtggagagcgggcagatcatgtgcatcctaggaagctcaggtaagcttgggaaggaggattctaaaaaggatttggcttgagttaaactccacattgaagaaacagattaagttgtaacaagaaagccacaggtttgatattagaatgaattctattgatatctgactgtgaatggaactgctaccaatgtgaaatctttagaaagatccttgaaagagtataaaattctgcctaacatgtacgtgaattcatatttcaaaatataaaaagcccccacagttccatggcatataaaagtactcaggaaacacaatttcccctatctgtacactgcctagagacaggaaaaggattaaataagcacaaaaatgcccattaagcccctatctttgattccagtggtgcttttttatgatggtatattttggacatacaatcaagaatagagaataggctggtcacagtggcttatgactgtaatcccagcagcttgagaggctgaggtgagaggattgcttgagcccaggagttcgagagcaacctaagcaacatagtgggaccccatctctacaaaaacatacaaaagttagccaggcatggtggtgcatgtctgcggtcccagctacttgggaggctgaggtgggaggattgcttgagcccaggagattaagacttcagtgagctgagatagtgccactgcactctagcctgggcaacagagcaagaccctgtctcaaaaaaaaaaaaaaaaagactggagaataatatttaaaagttcatgtattaacatcgggccttatcagatcttatctggtcgtttttcttttctttttttttcttttttgagacagagtctcactctgtcacttaggctggagtgcagtggtgcgatcttggctcactgcatccttaacctcctgagctcaagtgatcctcccacctcagctgggactacaggtgcacaccaccatgtccggctaatttatttttatttttatctttttttgtagagacagcgttcttgctatgtttcccagactctttttcttttttaaggaattaaacattacaaattgcactgaggtcatccactgcccgttctccacatcatccttctcctcctctttcccagggtagctgcatttgagcctacagtcggtgtttgtgcccctgcatcagccagtcattgccccagagagtctagcctttggtgagacagctccttgtggccgagggcaattccctgggagggtccctgtggtgaatcttctgcagctgacgttctcagcagctgggggatggctgcattggccctgaagaggggttctgtgtggcacaccacagtgtctgctacactggattaccatctacattttaaggttaaaagcttctgacaaattggctccacagaagcctcttgattgagctattgcttgcaaattgttgacattcactgccactctctacttgtgttattctcttcaatggagatggggactccattgaagtctatgaccaaatgtaggcatggtcagcctccttagactcagggaattgaatccatggctattcacctgctacagcaggtgcacaaccagatgccaacagtagtgttgttaagaggaattcccaggccgggcacggtggctcatgcttgtaatcccagcactttgggaggcagaggcgggcggatcacttgaggtcaggaattcgagaccagcctggctaacatggcaaaacccgtctctactaaaaatgcaaaaaaaaaattagccaggcctggtggcaggtgcctgtaatcccagctactcgggaggctgaggcaggagaatcccttgaacctgggaggtggaggttgtagtgagccaagattgtgccactgcactctagcctgggcagcagtgagactccatcttaaaaaaaaaaaagaagaggaattcccagactgtctcagtccactcaggctgctacaacaaaataccatagactgggtggcttataaaaagcagaaatttttttctcacagttctaggggctgggaagtccgagatcaagggggtcaacagattcagtgtctggtgagggagacttcctcctagacagccattttctcaccctaaccttgcatggcagaagtggggaggggtctctgaggcattcatctgaattgtaagagctctccataacctaatcatctcccaatatcacctccttgcatgccccacctcgtaatatcataatcttgggtgtgaagatttcaacatatgaattttagggagacataaacattgagactatagcactgactaaagctgttacacttttcaaagactttgtcagttcttatttccatttttaaccaacatctagctatacacatgtaccgtaacatccagggtcattctcagcttccttttgataaatacagtgtgcttctttaaaaagaaaaaaaactgcctcttctcctttaacaaattttcacctgttgcagtccttataaagaagtaaacaaggtggcatttagcacccttctcagaagtgtgtcccacttctaagaacaacaagaaatggaaccccccatctcagaagtgcaccccaaaggccaatgctcagaagtgcaccccaaaggccaatgttgtgtttcatgcacatacagcaggacagcaggaggggctcttgattggggtgggggagtgggctgatttctgatgagatgcctaattacggctttgggacaatgcctacactttatactgaaatgaatccacagtgggctgcaagttctacaagggcagggactgtattctactgtatccttatcacctagaacagggtcggtcacgtagtgggtgcttaataaatatttgttgaataaaggagtaaaataattttatgaattactccatagtattgcataaaatgacaatttcattggtgtcttatctcaagcagtattatctatcaaatcttcattagcgaggcaaaagatgatgacatatacgttcaaagtctcactagagtatagtctaaagcaagcctgcacagagccatccaactccaggggaactccaacttatttgaattgttatttgctgttgaggagggcgtagactctgggttagatgcttctttgcagattatttagttgcaaatgtcatagttttatcgccctttagggcattaaccttatgatccatccgccttggcctcccaaagtgctgggattacaggcatgagccaccacgcccagcctctcatatcctcttttgaatgagctttgtcatcttgctggttccctcattaatgagttaacaaatacttgacacatttttttaaaaaactaaattcattattataaaaaaaaaagtatcccaaaatttagtggcttaaaacaacaccattcatgatctctcagaatgtctatggatcagaactctggaagtgacttggttgggtagtcctgtcttgggatccctcccagagaagtatacactggatttggcaacaataaagtggctttaatatccctggggaggccagttttgatgaagtggtggggctgggacccaggctgcaggatatttgcagcttctgccagagttcagattggatccaaaaaatgtaaagccaggatggctctggttagaagaaccacacgactgggaaattacagggcacattttgaaagacaatcccaatgaagtcacattttgtttctttataatgggttttcctctctttccccactctgtccacctcctgaacacgcaggggctatttctgagttttgtcaatgatgcattagaaaagaagacaactgctaagggagttgattcatctttgtacctctcacagcaacaagcaagtttctttaaaatatttcaacaagggccaggtgcggtcgctcacacctgtaatcccagcaccttgggaggccgaggcgggcggatcacctgtggtcaggagttcaagaccagcctggccaacgtggtgaaaccccgtctctacaaaaatacaaaaattagccaggtgtggtggcacacgcctgtaattccagctattcgggagactgaggcaagataattgtttgaacctgggagacagcggttgcagtgagctgagatcttgccactgtactccagcctgggcaatagagtgagactccatctcaataaataaataaataaagggctgggcccggtggctcacgcctgtaatcccagcactttgggaggttgaggcgggcagatcacgaggtcaggagattgtgaccatcctggctaatgcagtgaaaccccatctctactaaaaatacaaaaaaaattagttgggcatggtggccggcgcctgcagtcccagctactcaggaagctgaggcaggataatggcatgaacctgggaggtggaggttgcagtgagccgagactgcgccactgcactccagcctgggcaacagagcgatacttcgtctcaataataataataataataataataataataataatatttcaacaaaagatctctttggctctgcacaagccatctcatcagtagatttctcttgctatcttcccagatagttcagaacttcctgcctatttctctgttatgagtcccaacttctcagcctccttggataggaaaggcctgggaggtctattctgtctccatgaactctgggcctatggtaaacttgtgtccaatatgactgaggggccatcaggttcttgtcctaaaggcatcacctaacctttaaccttagaaaaaagcagtggctcacgcctgtaatcccagcactttgggaggctgaggcgggaggatcacctgaggtcaggaggtcgagaccagcctggccaacatggtgaaacctcatctctactaaaaatacgaaaattagccgggtgtagtggtgcatgcctgtaatcccagctactcaggaggctgaggcaggagaatggcttgaacctgagaggcggaggttgcagtgtgctgagattgtgccactgcactccagcctgggtgacagagtgacactcagtctcactcaagaaaaaagcaaaccaagggaagcatcatcccccagtcacctccagcaggcagttagttcaccacaacccctctgtgggaacttcctagtgacatccagctaggctatgccccaggctctagtgcaggctgtggccaacttggtcttaccaaaggacttaccaagccagtgcttctcaaactcgactgaagcagagctgactcagcaggtcttgggtgcggcttgaggctctgcatttctggcaagctctcaggggttgctgatgctgcttgctttgtgagcaaggctctagacaatgtcacctacatccaggtacaaccagaccaccccaggggggcacaaaaagaaatccgtcctaggatccaaacgtttccaagagtcttggctttcctcttattctgatacctataagtattttgtttttcaatccaaaacagttttaaagacaaataaacaagcagagaaagcacgttcggtcttgacccagatgagagaaatggcatgtcccctctcactcaggggacaatccagagactcacttgcgcgtgagactgctgcacgcacagtgcgcgttccatagggcagggcctgtatcctgctgtgtccttaacacctagaacagggtccgtcatgtagcactcatggcccgcggggtcatgcctgcacagagggtctcgggaagctcctccaaggccggcacagagtggttcctctagggccttctgttgtcgccccgcaggctccgggaaaaccacgctgctggacgccatgtccgggaggctggggcgcgcggggaccttcctgggggaggtgtatgtgaacggccgggcgctgcgccgggagcagttccaggactgcttctcctacgtcctgcaggtgggcgcgtcccccacacccctggcccccccgcccgccccgggggcttaggctacactgacgcccgagtctcctgcagagcgacaccctgctgagcagcctcaccgtgcgcgagacgctgcactacaccgcgctgctggccatccgccgcggcaatcccggctccttccagaagaaggtgggtgcagccccccgctcacagagggcaaactgagtacctttgcaccccccgctgccctcctctcttcgcctacgcttgcccattccttccctttgctcgtcactccttcactctagagcgcgccctgcgtcctgcaccgtgcaccctgtgctgcccctagtcacatgtgcctttggagacttgaaatgtcactagtccagactgaaacgtgctctgagcgcaaaatacacatcaaatttcagactcttagtctgaggaaaacagaacgtgaaaaagcccattaagaatttttaggtcgggcagggtggctcatacctgtaatcccagcactttggaaggccaagatgggaggattgcttgagtctagaagtttgagaccagcctgggcaacatagcgagactcagtctctataaaaaatacaaaaattagttggacgtggtgatgtgcgcctgcactcccagctgctaaggaggctgaggcaggaggatctcttgaacccaggaggtcgaggctgcagcgagccatgattgcaccattgcactccagcctgaaggacaaaaagagactctgtctctcccaaccaaataaataaataaatttcaaaaagtattgattacaggttgaaatggtatttttggctgtaaataatatgttattaaaattaatttcacctgtttctttttacttttcaaaatttggctactaaaatttcacttctgtctgtggcttgcattacccttctctgggaccatgctgttctacaagttccctgtttgaacagacatagttatttttgccactgatttttctcagcttgcttggaggcatcttgaatgtgcctcatccaaactggactgagttaatgaaggaagaaatgattgaattgtcaactccttctaggttccaatctctttcttaattgtctccagtttggaagtagccacaggtaaacccaccggggaccttacctggaaactgcttcatttctctctagactgggaaggcccacaagcacccagggaaccaatgacaggtggacatgcctccttcaaggggcacagctccctgggagcaggagaactcccgatagcagagttctctccaattgagagtcatttctgagcaaatccagcccacagcgtgtaaaatcctgataagtaattcagtgggaaggaagtgctgatgataataaaggagatagcatggcagatctgcttctgtccttggaagaacctggaaataaagcaaggccaatgtgagcaggctatgtctgcggggctgttggctaaggctcaggcttcctggaccacttcagagagcccagagagtcctctcaatcctggccctgccatttgctaatggcattatcttgggcaagttatggaactttgttttctcctctataaaaaatacaataagaatgcatttctcctgggtttgatgtgaagaatacatcagattacgtgaaagcacagagcatggagggttggacttgctcatcccaatagtccttccagggactctgaattccatttccaaaatttgtttccaaaatgtgggagagcattcctgctggggtgtgaaacctctgagacaaattaagtaaatgtcttctctgtccatctcttccaagccaggaggggcaagcttactccttatgatgttacagagatgagaaggaggctcgggaatctaccctggctggtcagcacagaaatctcactgtgtcaagcaaagcttaattctaggatccttctaccctgatggcaagagaagagctttcttttgttccagaatatatctatatctagtttatttatgcatttttaccttctcattattcctttgtacctatttcagatatgtccattctttgggtgggtcaaagctacatctatgccgtcaaccccactccctgactcctcttgaatgttggtccacaagtcattccctcttcttctgcaatctagcttattgttttttaatgcaatggttttgtttccattttcataacacggccttattaggggtgtctggaaacaaaacttattaccatatgagtatcttctgtctctttctgctttccccctggggtttctgcagttagaggtaatcagtacagggggacagaaacagatttgtgaacaggtctctggagaggagataagctgaggaaggaaagacagtgagggaggaaaaaagccaagcttcttgattagaaattcagtaaagaattttttttagtcgttattgttttgggagagttgagaatgaggaggaaaaacggtttcagggagttacaggctttaagtacagcgaagagaattggaagaaagggaattttaaatgtggctgggggttataaattgggtccccattaaagtccttaaagaaattcaagtaaagattggaattatttttaattacttctgaaggctggattatatgtctttgatgtggactcacactgagattgtaccacatgggaccccagcacttatttgggttatacagtgggaaacaggtttagttcaaatcaggttggatttttgtaaacacataaagcatttatgataataaaatttcaaaacccaaacacttatgaaagtaagcgatattgtaatcatgaatttgggggatttttctgtatgggctgcagtgactatggctcctgcaaataggagtttaatgaagtatctgttgtttcctggttaattttcctgaagcaagtgtaagcagtttgtgttctagggaatcttattttattttatttgtttatttatttattattattttttttgaatcggagtctcgctctgtcacccaggttggagtgcagtggtgccatcttgcctcactgcaaccttggcctcccgggttcaagcaattctcctgccttagcctccgagtagctgggattaccagtgcctgccaccactcccagctcatttctgtatttttagaacagacagggtttcaccgtgttggctaggctagtctcgaactcctgacctcaagtgatccacccacctcgacctcccaaagtgctgggattacaggcataagccgccatgccaggcccattttattttattttattttagagacagggtcttgctctgtcacctaggctggagtgcagtggtgccatcatggctaactgtggtctcaacgtcctgggatcaagcgatcctcctgcctaagcatcctgagtagctgggactacaggcacgtgccagcatacccggctaatttattgtttttttctttctttttttttttttttttttttgtagagacagggtctctctttgttgcccaagctggtctcaaactcctggcctcaagcaattctccctcctcagccttccaaagtattgggattacaggcatgagccactgcacccagcctctggggacgttttaaaaaattcatattatttatttaaatctgacacatgtattacgatttaagccgaattggatcatattattatcaaagacatgctttccccagggtgtggtgagtctggaagtggcccttggattcttgggcggtgtgctgcctctttcatgtcctccccagcccatgaattgaaatagcagccacagagactcccagccttcctgtaatttgtgtctcctgcaggtggaggccgtcatggcagagctgagtctgagccatgtggcagaccgactgattggcaactacagcttggggggcatttccacgggtgagcggcgccgggtctccatcgcagcccagctgctccaggatcctagtaagtggcacccagaactgttactagctgctgtctgggcatcttctgtgtgtgtgcagatactttgggccctttcttcacggtcctcatttggaaaggggtttgtgtacaactgaaatcacaggtttttcaaactgaggacccagtttttttggaaatgctgtacagttcatttcctgatgcgattccatcatccaaacaaaacagctcctggacccggaagcgttgcattggtgttgaagtgttccattggggttttccttgaatatggagccttgccctgccaatcatttcttctcaccagggcaataccactgtgtgggctggggaaagccaatgagttttgatatgaccacaggtgttcatgaaatggcaggaattaaaataggaatttgaatgataaactcaaaagtgtatatgttgtggggaagggagtatcaaaacagagtagtcagtcctctgccaggtttggtcattttccccatcacctggggaaacctcgccactcatgcagctggagaggacaaactgcatctggatcctttctttgcactgtggtagaccaggacggcctgttcttcaaatggtgcttggtcactagaaggcaaataagagagatgtttttaacagctcttgtcactttttttttttttttttgagacagagtttcgctcttgttgcccaggctggagtgcagtggtgcgatcttggctcactgcaacctccacctcccaggttgaagcgattctcctgcctcagcctcctgagtagctgggattacaggcgcctgccaccacacccggctaatttttgttcttttagtagagacagggtttcaccatgttggccagggtggtctcgaactcctgacctcaggtgatctgcctgccttgacctcccaaagtgttggcattacaggcgtgagccaccgcgcccggcccccttgtcactttttaggaagaaataagttactttaaaccctctaaagaacccaaatgcctgccacacttcaggccttgttttattcgtcagatttttttcttttctgtgcaaagaccctgctggtgttggaaagtgttacagacatgaaatggggttgtctttttgaccagccttctctcagtcttgttttaaaacaacttgatgccagcctgccagcccttgttccctgacagggtgccctgagcagagcccagatggcccgtaagaggcctgatctccttactccctgtgccctggaggatttgagcccacatgtgctccagagctgggaactaggcccttccacatcaggtcctttctcctgagctcaggctgaaagccagtttacatgtttacttcccaccgcacactgtttgaatggggtacaaactcaataaggaacagttcagaactctgagttttaagcacagagcctgggctctgcactaccttagaagtctggcccttctttgctggcagaggtcatgctgtttgatgagccaaccacaggcctggactgcatgactgctaatcagattgtcgtcctcctggtggaactggctcgcaggaaccgaattgtggttctcaccattcaccagccccgttctgagctttttcaggtaagaggttcaactcgtaaaggccgggtctatggtgtgttgagctgggaatcacaggggcaggggcaagatttgtaccagtggccaggcacagtggctcacacttgtaattccagcactttgggaggctgaggcaggaggagcacttgaggccaggagtttgagtccatcctgagcaataaagtgagactccccatctctaaaaaaaaaaaaaagaaagaaagaaagaaaaagaaaaattagccaggcatggtggtgcatatctgtggtcccagctacttggaaggctgaggtgagaggatcgcttgagcccagtaggtcaaggctgcagggagtcgtgatcatgccattgcactctagcctgggtgacagaggaagacctcatctcaaacaaacaaacaaaaaaccgttagtgctagagaattggagccaacagctcctgagaggggaagagcaaaggatgaaaactcacttctttcagcacctaccatgttccaaatactttctgtacatagctcatttcatctgcacaacactcctatgaggtgtgtttcagtgtattcaccttacagaggaaaagagtgaaacttagcaatgattcaaaattgatagttgggcgtggtggtgtgcgcctgtaatcccagctattcgggaagctgaggcaggagaatcgcttgaacccaggaggttgcagagagctgggattgtgccactgcactccagcctgggtgacagagtgagattcggtctcagaaacaacaacaacaacaacaataacaacaaaacaacaacaaattaagccaagatcacacagttgttaatagtaaaaagctagcattagcctttcacagccaagttggcttcaaaggctgtgtttttccacgaaatcatactgatttccttccaaaaaaactcactttctccgcccagtatccctttagttagctattatttgctttttacagaggaggagctgagatttaaaatgaaaacaaaaaaacaaactaagacccacccctgctcgcccgaggtcactcacttggcttggctgggacttacgcccaggtccagtcatgcttgtctatcccagatatgaagctgggcgtcaggatgggaggcagcatgacccacagtggtagcctaggctcacaagggtagggatgcatttcgaatgtctccaagaatactgatgcagggccaaggtcatcgaaggactgactgcttatgggaaatgcatttcccataaggacttggtgaccataaggaatacctgaccttggccctgcatcagtgttcccagagacattcaaagtgcatcgctacccttgtgatcacacactaactacgtctgttgtctggtcagctctttgacaaaattgccatcctgagcttcggagagctgattttctgtggcacgccagcggaaatgcttgatttcttcaatgactgcggttacccttgtcctgaacattcaaacccttttgacttctatagtaagtttttctttcacattccccatcatgaatgttttttaaactttctcatctcagacttctgcctggatgacaccagtctagtggatttgatttttgcttttgtttttgtgttttatactcttcaaggaatcaatttggccgggtcaatgaacttgccagagatgactatcagaatgaggtcagggatctctctcaaacaaactggcgcactgctactactttatcagagcataattagctgagcttctgaattctcccagacaatcccaatgggatcctcaaggccctgctgggatgctttaaagtattctgattttataggtgggcattaaccacaaattttatcttgatgggatgaggtattatggccagtactcctgtaccaattgtatatccatgtacatacatgcatttaaaaacacatgggtgacatcttttgggaaaaacttttagtggacctgacgtcagtggatacccaaagcaaggaacgggaaatagaaacctccaagagagtccagatgatagaatctgcctacaagaaatcagcaatttgtcataaaactttgaagaatattgaaagaatgaaacacctgaaaacgttaccaatggttcctttcaaaaccaaagattctcctggagttttctctaaactgggtgttctcctgaggtaagaggctcacaaatgtgagaaatgcctgttagaggtctttagccatcccccaataacaattctgaaaaggaattaaaacagggttgtttgttttcaggagagtgacaagaaacttggtgagaaataagctggcagtgattacgcgtctccttcagaatctgatcatgggtttgttcctccttttcttcgttctgcgggtccgaagcaatgtgctaaagggtgctatccaggaccgcgtaggtctcctttaccagtttgtgggcgccaccccgtacacaggcatgctgaacgctgtgaatctgtgtaagtgcccacgtgctggaggtgcacctctttctccctaaatacctcccttctccagctgtaaccttacaaaagtctaccattataagggtttttctctgagctaaacccagccctctccaggttccctctctggggaaaggcaactattgagttaccaacacgttaatatgaatgagctcaccaggtggatctctctgagggctaaggatccagggaaacatgaagtgacaatgtactggtggggagagtttgaggagtttttcaaaagatcattcctcctatctcatcttggccatctcagatgcacagcccatggggtgctcagcgaccaggccaactttgtaccgttagcttctctttggagctgattttaggacagccagcacctaattttcaaattcagtggaattccagagacaaaacctggttgcctaacgttgcaggaagcaggtgttagagggattccccaaaggcaacactgttagggaataagagggaaggacttcgctattgtgaagttgctctagagcttgacatgaggggcaatgctaagtgtctgcatctgtggggtttgcctggccttccgagagcaagtctaaaatgcaggctgctggtggtgggggcggggtggggtggggggaatcctgcacagaaagaagacaaagtgcttcaaatcacttattcatgccccttttgcatgtacttttcgtgaattggtgacaactccccactttagagagaaggaaataaatgacatcttttgcaattgtattgcaattctggtagagtgtagatttccggggtggggatttattgtcctgtggatggcaggtcccctccttctatgactagggaacccccctagctggtcctcaccatccagccctgacagacctcacattcagcttgggctagccctccctttttcagctgggtggtgactgactgttctgaaacctgccttccatccccagttcccgtgctgcgagctgtcagcgaccaggagagtcaggacggcctctaccagaagtggcagatgatgctggcctatgcactgcacgtcctccccttcagcgttgttgccaccatgattttcagcagtgtgtgctactggtgaggggttgttcagttcacccagggccgggctcccatggagtcatggagctagtgggactcgtgcagggagagctccagggtgaagttctctgctctggaggatctacactttgcccatcagtgtctagtgcaatgtcgtatcttccaggacattaattttattgtaaatagcccaactgtgggttgcaggagacctgagaacaaaccaacaagatgacatgtgcctgggaatgacctgtcccacattcacggcagggcctgggccagagaagagaggactctgaagtagctaggacccaggtgcatgggggggggcctgggggaggggagaaagcagcctgaatgtaaaaccttaaaacagacacattcagagggtgggaagaggacagcaaccaacagaggaggcagagggtgatcagggaggtagaaagagaagcaggattgggcagcatcagagaggatgaggaaggagagagtttcaaggaagtgtcataaacacttcaatattgcaggggttaaaggaggtgaagcataaagggagaaggccattgcaatttcccaaaaaagagcttcggtagagtcatgggggtgcaagtcaggtttacaagaagggaaggtgtaagatggaggaagcagattctgttttgagaaacttggtgttacagggtaggatgaagaggggcagttacttaaatgatgatcaagttcaaaaaatggttattttaggatgtggtaaataagaccatcaaaaaacatcagattgagagtagatgaaaatgcagccaaaatttggataagtcaaagaggaagttcccagagtagaccaaggtagggataggggaatcagaataacatgggatcaaggatgcaagcagctagggtcacactttcaaagatggggtgcgggaagagagggggagagagagagaatgaaaaatagagatgatgaagatatcaagaaattcataaaatgggaggtgaattcagctgctgagcactggggagagagattgaaattgggaagggggaaattttaaagtagaggtttatatcagtcatcatgggacatgctattagaattcaagacacaacaaggaaatcttaggggtccaggggccagctgaggcaaagtggcagaggggatccagttagtgcggcaataggcattgtccagcacaccttccattgcttaagggagaatagggtccccagatgtgggaactgataaggcaaagaatggcagaaggggtccagcatctgcggcagtgagggcactggggaagtgagaggcaggaggctgtgctcagagagggtgtcctcagactctgaaatcctgggagcgaaaccattttgagtaatatttaagtccaagacatggtgagtgatgcagattaggtagctggagccattggaattgagattcgctaattaggaaccactgatgtggatggctcatcaagaaggttaaagagcttgaggaaaatgataggggagaggagcaaaaagaatgactctggtccagatgctataaaatcatcaaaggcaagaggatgttttaaacatcacagaagacaacaatgaggaacggcattgatagcataagcaaacttcatgatttgtacagaggaaaagtagatggccttgaagagtaagtggtaaggaggggcgagtataagacatgccaacattttttgcttactctacaaatgggataaagagcagccatgcctaatggtcattgaagatacgctatcaccagggaaatgtaatttggagaaaggaatataagaggaaaggtgcatggatatagggtggtttgtttacaagaaaatgaaggtcaggccaggcatggtagctcatgcctgtaatcctagcactttgggaggctgagatgggcagatcacttgaggccaggagttcaagaccagcctggccaatatggcaaaaccccatctctactaaatacaaaaaaattagctgggtgtggtggtgcgcacctgtaatcccagctacttgggaggctgaggcaggagaatcactggaacctgggaagcagaggttgcaatgagccaagatcacgccactgcactccagtctgatcaacagagtgcaactccgtctcaaaaaagaaaacgaaggtcaaatcagtggaaggggttggtagaataaaagacaagaatggaatggagtagggctggggagggctaacctgatcgaggacaaaagaagtgagggattttcacgtaggcaataatcccatataacagagatgaggttcagggaagggggtgctgggaagcgggttgggtgagccctttaacattaggtaggtgtggtgttggctaggcagaacatggttatttatgaagatgcctgtagagttcaacaagcctgcttactgcggttagttgtgaccattgtctaagtaatttaatgttttcctatgagagctgaaggagccgtgaaagggaaaaggtggctcccaatgagttgcagccaatgggaacaatttgatataataaatagtctcatgttgactcctttccaaaacggcctttcaaaggggagtgtggcttgccctgcaaacttctcccacccactcaccacaaaggatttattcacagaggcaagtgcagtatttttcttaaatgatagcccttggagaggaaactaaagagcttatgcttttctaggacgctgggcttacatcctgaggttgcccgatttggatatttttctgctgctctcttggccccccacttaattggtgaatttctaactcttgtgctacttggtatcgtccaaaatccaaatatagtcaacagtgtagtggctctgctgtccattgcgggggtgcttgttggatctggattcctcaggtaagatatcataattcaaaaaatttagattgggataatctgttattaatgatcacctaataatgactgaagtaaaggaataccagagaactgatagtggttatggatattaccttatagtctagagcatttatactgctcgttaatcattgccttagaccttgaactgttcatttgttcaataaaatgtcttttttatcgggaatcaggaactaacaagtttatgttatgatatgattcacatgtaataaaccattataccaagagaagaaaaccagcccggatgttccaggaaaaactcacagcccacatgataggctaaataaattgcatgcattagttcatttctgacctggtactgttgagtgtgaactgcagttctcaattcccagttattcttaggaattaagactagtcagacaaaaaaaaaaaagcctgcaggataaaagactgctccaaagagtatcaaggcttaaaggatatgcaccaaatgatagcagtaattatctctatctctaaaatcaatatcaatagtgatattgattttaatttttttcttcatatttctgtattttatcaatgttctgtaatggacaagtatcattttataaccaggaaaaaatgtatccacacacatttttaaaaagcagcagcaaaaagggcagaaaattttaaaaggctaaaaatgatcccaggcaggtggtgtgagtgggatctagtaagtaatctctgggtccccaaggaaacatgaaggctgtttctttgacttaaaaatgtaaaaatcaagtcaaaaagcaaaagcattactgagcatctactatataaaagtatatgtgtgtgtttaattatttaactctcagagcaatccattttcagataagaaaatgaagctcagacttgactttgctcaagtcacaccactatgaaggctgtgacgcacgtgacttcgtggagagaggctgacctatgagtcagaaacttcctctaccacttgccagtctcttttctatctaaattagtttcctcatttataaaaaagagatcactatttcagccccacctgcctcaagggatcatgagaaggaacggaaataatcaatatgaaaacacattataaattgcagtgagttatacgaagtgagatattataaagcaaagtgaattaggctttgataaatcaaggaggatattttttcacacgaagaccatgatattgtatttgtccgtgttgcttaagtggattgttaatatttatgaaaaatgcagaaatcaaatcacaccaagagtacagaatcaagccagcaatgtacagagccaaccttgggcagcatttcctcttttatattatttgaatcattgtttcagttaatctggtgccatttcatgtacagatgatccccgacttatgattttttgagaaagtgatactcgttctgtagaaaccgtattttgtttttgtttttgtttttttgaaacacagtttcactctgccgcccaggctgaagtgcaatggcgcgatctcagctcactgcaacctctgcctcctgggttcaagtgattcttgtgcctcagtctcctgaatagctgggattacaggtgtgcgccaccatgctcggctaatttttgtatttttagtagagatggggtttcgccatgttggccaggctagtctcgacctcaagtgattcgcccacctcggcctcccaaagtgctaggattacaggtgtgagccaccgcagccaacctagaaactgtattttgagtagccatacaatcatcctgttttttactttcagaacaggattcaataaattacattaaatattcaacaaattacattaaatattcaacaatttattataaaataggctttgtgttagatgatttttcccaactgtaggttaacgttaagctttctgagcacatttaaggtagaccaggctaagctgtaatgtttggtgggctaggtgtcttacatgtgtttttttgtttgtttgtttgttttgagagggaatcgcgctctgtcacccaggctggaatgcagtggcgcgatctcggctcactgtaacctccgcctcccatgttcaagcgattttcctgcctcagcctcccgagtagctgggattacaggtgcctgccattacacctggctaatttttgtatttttagtagagacgtggtttcaccattttggccaggttggtctcaaactcctgacctcaggtgatctgcctgccttggcctcccaaagtgctgggattatagacgtgagccaccgcgtctggccttaaatgcatttttaacttagaatattttcaacttatgatgggtttatctggaagtaaccccatcataagaagcatttgtattagggttttaggaaaaggaggttagttgctctttatttttatttttgtttgtttcttgacgcagagtctcactcactctgtcacccaggctggaatgcaatggcacgatctcggctcactgcaacctccgtctctcaggttcaagcaattctcctgccttagcctcctgaatagctgggattacaggtgcgcaccaccacgcccagctaatttttgtatttttggtagagatgaggtttcaccaagttggtcaggctggtctcaaactcctgacttcaagtgatttccctgcctcggcctcccaaggtgctgggattacaggcgtgagccactatacctggtggttaattgctcttaaaaggtaggcagttgcaaagaatactaaatgttctcagattagttgcaaaatcttaacaacccaaggcttcatatgaattccacttccatcgctgaaaattaaaactccactcttaaaggccacatcaacctgctagtcattccatttacccatttttctccccagtcatcatctttctgggtgaactgcctaaggcatttgtgctgttggctcccttctcttttaaacacaaaggaaattagctttgctgtgttttctgcttacaaaatcatgcaagttcttgggggaagaagtgctcacaatataaatgtggatgtggaagaaagtaaaagttacctgaagtatcagagcctagagttaaattttgttgtagttcttgctagaattttatataatttttaacaaagatgaaatcatcctgttgtataagatataaaatatgcatactttttttcccatttaacaacataatatgaattaggtgggtgtggtgtcacgtgcctgtaatttcagctactcaggaggctgaggcaggagaatcacctgaacctgggaggcggaggctgcagtgagccaaaatcatgccactgcactccagcctaggtgacagaacaagactccgttcaaaaaataaaaaagacaaagcacaaaccaacctaatgtggacaatgtcatgtcaatacatccagatctatggttcctcccgctgcttctccttctgtctgtgcctttcactgatccatttctctctctccgccacctgcacaaagtctgttggttgttcccaaggctagaggcgcactctctttgaaggccccttttgttttctctctcagcctatcacacactacttcctgtcacggtcttcctttgctgtaatagattatccaccccttgaaggcagcagctgtgtctcattcatcattttagaccctctcagcagccagcccaattaggccttggaccaattaggcctgcaaacattatttgttgagtgaataagtaaatgactctgtctttgaactgtatacacactgcatcactcaccaaatcatgttggttttcttttctgatatcaaaccataggtgcatgtggaacattttgtgtttgactctgtgtggtacagggagaaacaaaggttcacagttcctacctcagaaagatagcaccctagccactaggcagccaccatctcatggccatcatcctactccaggcctttgtcatctcatagttgaactttttttgtagtctggtcctttttttttttttttttcttttcctgttcttactctgccctcattctagccatccttcttgctggagtcacgttaattttctcagaatgctgatttcaacgtgacctgtctcattcatggtcattcaacctcaactcacagcaaggccctgaaatggctgttgctggctattgttccgagctcccctcccactgttccttcacatcctctcttccagtgtttctggtccagtcagtcccatatgcagcccttggcatacctgtactcataccatttctgccttcctagaatttccatcctcttcccctaattccttcccagagtcccacgtatccttttcaattagcaacctctcaatgtggttaattcaatgttgtgccttaggaaactgaaaggttgaggacaccttgcaaataggtgaaaccataaatactaaatacaagaacatcatggatgtgtggtacacatttttttatactttcttggcacaaatagttcactactgtatatttttatagttttaaggatatattctatatctccaactacattatgagttctttagggataggatacatcttttgaagttctcaagctcctagaactagtgccttgcaaacagaaagaattttataccttttgattgacagaaaatatacagtggactaagaagaccacagtgtcagcacacagtttcacctgaaatagattggagaggagacatatttcattttcacaatgaatgttggttcggtctctccttcctttttcctttgtattctaggttagttctaactttctacgttggtaccttcaactttctgtttaatcacaaatctcctcctccaattggtatgtgttaggtctgtattttcttgtacgtttatatcagtagtgcttaccaaaataagtagacagtaatcgtctacttgagagaactgttaaattaaggtcttcactataacaggccaccaagctgtgcctaaaaatgacaaagtgctatgcttactgacttggaaggatgtctgagacatatgtttggcagaaaaagagtaagttaggaaagagcatgaagagtttaattccatttatataaaacttttaaacacacatgttatatatattaccaaaatgttaacaatagttatttctaggcaacggtatttctttatattgttcaatgttgtttgaaggtttttttatagtgagcatcatttttataataaggagatagaaaactatattcctgttggaaaatataaggattgcctttcttttcatttggtaggactattgccagagcctactgaatttcatttttgttttctttttcttaagaaacatacaagaaatgcccattccttttaaaatcatcagttattttacattccaaaaatattgcagtgagattcttgtagtcaatgagttctacggactgaatttcacttgtggtaagtattctatttggggatattatttttgcatgttactctgaggaagcaatttcttggaggaaatgtatttttgaaataaaaactgtgttttataataattcaatttaaaactctgttttgaaatacagtccaacattttctctgatttttaagatgaaagaaaataagcagtagtcaagttagtctcctgtcaaaggtcaacaggtaagggacacttggatgttgttagaaaatgacagaccttatgtacactgaggtaaactccagaatattctggatagactcagttcctgtatctactgaacacattcaagcaggctgaagtggcttcttgttccccaaaatgtacatcgtacatagctaaataaagctacttttggcaaaagtctattcctcaatcccaccagatggaagtagaaccaagacaaggacctcatggccattagaaatctcagggtggccgggcacagtggctcacgcctgtaatcccagcactttgggagtcggaggttggatcacttgaggtcaagagttcgagaccagcctggccgacgtggcaaaaacctgtctctactaaaaatacaaaaattagccaggcgtggtggtgcgtgcctgtaaatcccagctacacaggaggctgaagcatgagaatcacttgaatctgggaggctgaggttgcagtgagcccagatcgagccactgcactccagcctgggcggcagagtgaaactgtgtctcaaaaaaaaaaaaaaaaaaaaaaaaaacgaaaaaaaaaaccccaaaaaaaacaaaaaaaaaacaaccaaaaaaatctcagggccactccaaagacaaccaaagaatatggctgaatttagtagtgttttaaataattttaagtgataatgtcagtaactttaggatagtctgtgctaagggatcatgatttttatcacaaatatggtaatgaatctatacccaaaatagaaacaaaagcatgtccatcttcaaatgaagccaaaggccagaactgctcactcttgcttcatcaaattgtaaactctgggcttgctaaagtgtcctgtatttttcattaagggtacttagcaagcgcttggtaaatacttgttgattaaattacctgagataaaccacacctgacactgtcaatcttttccttgacaggcagctcaaatgtttctgtgacaactaatccaatgtgtgccttcactcaaggaattcaattcattgagaaaacctgcccaggtgcaacatctagattcacaatgaactttctgattttgtattcatttattccagctcttgtcatcctaggaatagttgttttcaaaataagggatcatctcattagcaggtagtgaaagccatggctgggaaaatggaagtgaagctgccgactgtgcatgactgctctgaacgtctgaaatgagagtgccatgtatttctttcttgacaggacatctcaagtcttttaaccattaagactccatttgtgcctcttggatccaagcaggccttgaatgcaatggaagtggtttatagtcccttgctcttacaacttgcagggacatgtggttatttggaaattgtgactgagcggacccaagaatgtaaataatattcataaacctatgggagactcgtgtgactattttttttccttgttctaggcacagaaaaaaataggtcagcttaaaaatatgtttacattggataaaggattaggcaaaaataaaatgtttcaaggattcctgaccataagtgacagagaaagagagttgtgggtttagatgaagcaaggttatcatgcagaattgggtaagaatgcttctgttcctggaagacccagagttaaatgcagatgtccacacgaggggtcggagttacctgatcacatcgagagagtgctgggcagatggatggtgagcaccactgctacagagcacccagtgattttactgaggattaaaataaaaaaccgtaggaatgggctcaacagtgaacaaagcacaccagacaaacctctggttatgtttttaaagattcgtttgctatttttcactttcagctgagtttacttataggcacattgtgcacatgtaccctaaaacttaaagtataaaaaaaaaaaaacctaccgaaaaaaaaaaaaaagaattacaagtaaactttactaaagtatatgcactgagaaataaccccattaaggctggagatcagctgttatttaaagtccatatagaaaaaaatgctgacatagctagacatggtgtctcacatctgtaatcccagctgctcaggaggctgatgtggaaggatcgcttaaacctaggaggcaggggctgcagtgagctatgatggaaccactgcactccagcctgggcaacagagacagagcaagaccctgtctctaaaaaagaaagaaaaaaagtgctgacatattgtttacaaagaacagggtacatactagaaattcacattcttgaactgtaaagggtgctgatatgtataaatacagacacctgtattacatattttcaaggataaaataatgtaaataggttattaaaaatgggttctggccaggcgcggtggctcatgcctgtaatcccagcactttgggaggccgaggcgggtggatcacgaggtcaagagattgagaccatcctggccaacatggtgaaaccccgtctctactaaaaaatacaaaaattagctgggcatggtggcaggcgcctgtagtcccagctacttgggaggctgaggcaggagaatcgcttgaacctgggaggtggaggttgcagtgagccgagaatgcaccactgcactccagcctggcgacagagcaagactctgtctcaaaaaaaaaaaaaggttctgtattaaaattactgattctctttctgattgatcttcaagtaattccatgtacaaacctgaaatgaaactgtctcagtgttactatggtaactttgggtgagaatatggtagagagcgcatgaacttgttcactgactgtgacctaacttgtgaagaaagataaattatagcatttgaaatgtctcacactgaaataggaaagatcatttcattaaggaaaccacagtaaaattctatttcttagaacagtatttaaggatgtggaggcattggtaaattatcagactagtattgtcaatttttataaaaggtctttgacatggatgattatggtgtaatagttacacaatgtcttacagattatatatgtcacatcagttatagacaattctggagatgataatctattaaagtagttcaaagagagtcccacaggaacctcttttgaaatcactgatttcaacttactaaagatatgggtgtacaacataagtggaaacattttctactattcatatgcagatgaatttcattctagctcagaaacatttggaaaactgacatcacacgtgacttcaagctattaaatgttagtgatagcaccttagaaaaacacaatggctttcaacatgtgacagtttgtgtctcaagtcaaaaatggacagtgatgtgtaagaaaatcaaattacataataacaattcctattactcttgtggaataggctgtttcttcccaccaagtcagtgatgtttctgagatcataatgttcactgtaaatttaaagggatttctttttccatagcactcagcaagaaacgtgtgctaaagactgaggttccttggaaacatgctgaaaattctgttctcaagggtgtcagaaccatacgtactgcaaataatttatgaagtcctagttcattgcaataagcagatggcttgctatctgctcagacagtactcccttggggtagtaaatgtgcttatctgaagctgggagtcaatatattttgtatgtggacatggaagaacatagaataaatcatttttaatcatagcaattatacttactcaaaatgaacttggctagcaggtacacacatctacagattggaatggcttcttaaaggctatcccaccttggaaataatcctggttatccgcaacacatgatgttttgtcctgcttcttgataggatatctccttagatgtgcctgttcttcaaaaagtggtatttaaaataaatgtgtcagtctcacagcagggtgaaattggtgctgattaaaaatgccccattccagaccactgatggcgacactctaggtgtggggacctgggaatgtgcatctcctatttcaggtgcttcttgcgcctcactgttaagagtaaaattttgacatctgtgaacccaattccggtttcctcccagctacagctgagaatgccttttagaaagaatgtgtctaacgtgggcacttaaccttgcatttaaaactgtaaccaaatactcttacttttatattcctaaaaacatataagcagaaacttatacatgctgaattgagtatataccacttaaacatgttagaggtaggtagtagaagattcttttattttaaaaaaaattacacgtggttctacaataatttttccttttaaaaagcttcaagatatacagggagatgcactagtccaagaaatccagcttgtcctttaacaaattatacagtttaactttcttcacatattgccacaatagttaattcacagtataatcttatttgtatttggaaaagaagaaataaatatacaataattgaaataggttcaagaatcaagctcgatttgtttccaagacttggaagaacttcttttgtactgttccagttcctaaaacaaaaatatgtatcactttaagaaaaatcaactttactaattcaaggaggcaccttaaaactgccttctcattttttagatatatcaatgaatccttagtagcattatcattctaaatatttcttgccaattattttgtaaatgattatgcttaggacttattttctagaaatactgtcttcagagtttctgtgtggctaagcagcactcagagatgaatttattaaactttcagacaaaattatgtacataaactacataatacatatgaattgtctttcaactaatgaactagacatctgtcatccttcaagtattcaaaagtgatcttattttaattgtttgctgttcagctctaatcaaaaacttggttgaagttagcaaaatatttaaaaaatacatacccaggctgggtgcggtggctcattcctatagtcccagcactttgggaggctggggcaggagaattgcttgagcccaggaatttgagaccagcctgggcaacatagggagaccgtgtctctacaaaaactgagaaaaataattatccaggcatggtggtgtgcgctgtggtcccagctacttgggagtctgaggtgggaggatcgcttgaacctgggaggccaaggctgcagtaaactgtgattgcgccactgcactccagcctgggtgacagagtgagatcctgtcacaaaaaagtgtgtgtgtgtgtgtgtgtgtgtgtgtgtgtgtgtatcctttgtcccagtgattttacttttagaaatttatcatccataacaatagagcaatgcacaaggatgtaaaagaaggaaacccattgctctgtctcagcacaactggaaacaactttgatgtcccccagtaaggactgattaaataattagcgttcattcacaggtggcttccaaggcagccagcaaaaataacagtggccacatgaaaacataatgtgtgccacatgaaaaaagcacacagatagggagagggcaggatacttccattttctattttatatacatctatctatagctcttgaattttttcacaaggagtatatcttacctttacaattcataaataaattttagtggaggtggctatcctgcacaaggcaactgacatgtaaaagggaccatctaaggggatgcctcttggcctcctacatgttgttcaatgtctaaataactgtacaaaggttgtcactacttcaaataaaacgtggttactctgcaagatgaggcaatcaatgccctttggctaacataactgaagttcacagttgctatgaaaagaaaatccattctaattttcagaaaaattgcagagcgtacctttcatacctataccctaagttactaaaatttaaatgttaaatgtttcaaaatggtatatagacttaggaagaatttttccttgtgtgtttttttttttcctttaacttcctcattggattctaggaagaattttcatggtaataatcatatgtagtctttacagcttgttttatttttttctaataaagctaattcagttcaccagttatctaccacttgcggttttaaagattaactcataaagaataaacaaattgtttactgcaaactttgtctttaactggaagttaaattatttttaccaatgacaaaggtgaaaatgttgttttgagattctttgctggtagtatctcccttttgcagacagcagactgtgagaaaactagggctatcacacaggccatgccagagggagaaaaaggaataaccaatatgagacaaaaaccaccaagtccactagatcttcaacatgacaatgatacggcctcaaaataatgcattgatgttttaaagggatagcaagtaaagttttccgaagataactgtggttggccaagaagaccttaaaaataaatgttaactgtaaccttttttttttttttttttttttttttttttgctttaacaaaaataatagaaaagaagctgggcacagtggctcatgcctgtaatcccagcactttgggaggccaactcaggaggattgctttaggcgaggagttgaagaccagcctgggcaacaaaaaacaaaaaaattacccgggcatggtgatgtgtgcctgtagtcccagctacttgagaggctgagatgggaggatcccttgagccctggagttcaaggttgcagtgagccatgatctccccattgcactccagcctggatgccagagcaagacacagtatcaaagaaaaagaaaaaaacacaaaagaggtagaagggctcagcaagtgctttccacattcgcattcccttaaaatcgggaatgctctaaagctagaggacttttaaaaaacagaaaatactacttaagtattttctggtgcccatgtgaagtctggcaaaagacagaactttaaataattaaagagggctaatcacgaaagaccctaagtctgcaggaaagatgaaaggggtcttcctaccaatcctcagatccttgaggactgacttcacagcacacaattggaaacaacttaaggtctcacaactactcatgaaatagtatgaaataatattcaaattaaaaattttatatagtagaatgtcaaaatttagattcggattatcaatgaaataacagcaacaacactggtaattgttagggtatctttacagctaaagcataaaattatgttaaggtcctgtgtgtgcaatctggaatcaattcgtctaaaaccacacaaataaaagtggtttagaggcaaacttaggacagcataacttttcaggtaggttaaaaaaaaatctcgaaccaagagatgacaggaattggtgatctgctggcagtgagatacaagagatgaatgaagggtgatatgggtactgtggggctgccttccttttccacacaaaattcttatggttttaagtcatttagagaagacagatttgaatgtgaaaactcatgatgctcacaaataccctaatcctttaataatactgatgtatatgaacttaataaaagtgatcattatacaatataaacagatattcttatcaacaacaacagttaatcattgactcctagataaatattaatcagggatgacttccaactaatccttatagccaggctgcaaacataataagggttacataaggtcattttcctgtttctacaacatgcctctcactttgctacagctataaaacctctaaatattcatggcatatttttcaaaagtcttctggaccgtttacataaaatgttttgcttacttctccaacagcccccgaaggtgaatactgagaaaaaaaccctggctcctactcccagctgacagctgttttcaggttaccctcgcaacaacgtgactgccacctgagaagttgctggggctttcgatctagtgcttagcatatataagtttactcatataaggacagattctgtacaacgtctcattttatcaaataaaactaaaatctaagtttgcttgtttgtttttagaaaaatctaggccaggcgcactggctcatgcctgtaatcccagcactttgggaggccaaggcggatggatcacgaggtcaggagttcaagaccagcctggccaagatggtgaaaccccgtttctactaaaaaagcaaaaaaaattagccaggtgtggtggcaggcacctgtaatcccagccactcaggaggctgaagcagagaattgcttgaacccgggaggcggaggttgtagtgagccgaggtcatgccactgcactccagcctgggcgacagtgtgagactcgtcttaaaaaaaaaagaaaaagaaaaagaaaagaaaaatctaagtatttgagtgatggtgaatttgccaactcttaacattcttacatcagacttgtgtgttcaaatggggctatctagtgatacatgggatggtggtgtccacttttaagcattttcctgagagaacctgggttatgtcaggtatgtctgtgtgctttcagatcgtgctttcagtccttaactgggcaagatacgttttctagtacaaggaaagtataggtatgtctgaatgtcctaatcaaaaacaaagctcttcatgtaattccacaaaccaaagactattaagaaaatgtctctccagcagcaaggtaagaatcaccactcatctttaatataatgaaaactggaaaatcaaaaaggtttatgtgaacactaagtcatgtctgggtggtgggatgacaggtgatttaaaaatttttctttattcatatcaaatttttattttttctacagtatactattagtgtgttatttaaatagatgtactacttaaataattttaatagtaaagaagatactctaagtaaatacatagagaaaaatgtaaggaattcccaaggcaccccaggttttgtgttaaaatttcagatgaaattaagtaaatgtttaggataataccagatccttctgaattctcatctcatcgacttcattttcagcatactgaggatctctcgcagggtccttgatatctttcagcgtgttaatactctgaaattacaaatctcaaaatcacttcacgcccataaaccaaaattcaatggctaccatctgcctaataaaccaagctcccattcctcagcctgccacaaaggctctctatgatctttctagcttttctcatcaccactgaggcccacttccaattctgccaggtcccctttcagttgtctctcccttctctaacagccagataactctctttgaaagtggagcaggaaccatgtcttacctttttttttttttaacccccacagtgcctatttacattttcagcaaatgtttaattgatttttgagcataaaagatgaaaacaaagttatcataataagccctttgacacatttcctataactgttagacagtgctaaaagtcttgcttttaaaaaaattagaaatatgtacctttggtggaaagagcttttcatacacttttttccacaactccataggtgagtgggcatgaagctttccaatgtcattttcaggaacaggaggagatcctaaaatagcaagttttaccacaaatgactgcaatgattaaaatattacaaactccaccaataaaagaaatgacactaacaaaggtatacatctcggatcactcattttccctctccttaatatagtcaccataaaaatttaccctacccagcatagcaaggtcactgggacagattctagtactgaaagaagaggaggcaaagagtaatgggtaaactgtaactctcattctccacaccctatacctatacctgtatctatatcctattaaccagtaattccagtttttggtagtgtttgccctagaaacacctgcaaactggtactgtattaaggatttcacactgcagtataatttgttatcagtgaaaaattgacctacaaccaaaatattcatcagtggtgaacagtgcattaattactatgcatagccatgctctgtaacactatccaacagttaaaataagaaatagacccacatacagcattaatatggaaaaactactaaggtatattggtatattgaattaaaaggtactgaataatagggtatattgaataaaaaggggaaattccaaaatgatatagactgaacacataattacattaaagcaaatagtttttttacactatatacacatgtgtgtaaaggcataggaaattggaaagaacacaaatttgctccttgtatgtactcttttacctttttacaaggagatatctttatgtgttacttgtataatttaatttgaaaaatttaaaactttgctgccatttgcaatttgtaactggatatttcccatctttctatttccaacaactgtattgttccccaaaactgttttactggtgatcttccaggacatccttaccactttggtgcgaaagccattgatacgctccactgatgttattcagctttgccaagttttacttgtattcctttgtgtgtctgtgtgtatattaagttctatacaattttatcacctgcataggttcatgtatttgctaccacagtcgagacaccaacttaattccactagcacaaagatcctgtgttgccgttttatagacataacctcctccttcccgacccctcccctggtctccccatccatagttctatccctgccctctgaccaccactaatctgcctccatttctaaaatgtttttcatttcaaaattttttataaatagaatcacactgtatgtaatcttttctaattggctgcttttcactcagcatgattccctggagattcatccagtctgtgtgtatcaattatttgttcctttgtatgactgagtagtgtttcctggtacagatgtaccacagttgtttagtcactcacctgctgaacaacttctgggctgtttctaggttttgactactaaacataaagctgccatgaacatatgcctagagattttttgtgtgagagttaagttttcatttatcttggataaatgcccaacagcacaatttctaggtcatatggtagttgcatgtttagtttcgtaagaaactgttaaactgttttctagagtggctgtaccattttacactcccaccaccaatgtatgagagatctggtttctctgcatccttgccagtatttggtggtgtcactattttttattttagctatcctgttaaatgtatagtgatatttcattgtggtttcaatttgcatttccctaacaactaatgatattaaacaccttttcatgtgctgctttgctatgtttatgtcctctctgaaatgaaatgtctgcttatgtcttttgcccactttctaattggattatttatttttctgttgagtttatatattctaaacactagtcctttgtcatatatgtggtttgaaattcttttctcccacactatggcacgtctattcatcttcacatgggctttcatagagcaaaagtttttaattccgatgagatctaggcgccatgatttttaaattcagcaattatgaactctcttctggcctccaactattcatagaagcaaaagaattccatcagcattatctatcagtacaacagtgattctcactgctactggaattaagttggtgctaattataatcataaacatcagtctccatgaccattcactaagcaaaatcacctccattcctttcattccaattaatctataatctcattacaaagatttctatatttgaagtcaagtcacctttagcttgtaagactaacagaggatgggaaatacaaaaaaaaaaaaaaaaccctactgcccattagagttttaaaagcaaactacgccacctgcagaggataaagaagtgcgaggctcaaagatcttcacaatgaaaacagtttctgtgggaaggtaagggccttgagatataaactcttaaacttccttttgattcagaagcctatagagtctatgagtttaggaaatacattccattagatgaggcatgctatttcataacaaaaaatcaaatcatacctaattgttacaactgtgttctttttggtttactctaccacttcagtctctcatatacttgctaattgcctgtaatatgtagctttgaatttcctcactactctatgctcctagcttctttaaagccaaggagctaaaatttaaaagtacctggaaatcagttggggaaagaaaatacttgcaatttgtttttcagtggaatagagatcagaaatgaaaaatcagtctcttatgtggtgacatcacttccatcacaaacatgtcaatgtgatgcatgttacattaatactgggcatataaacaaacacacaggaaataacagcaatgataatgaaaccagaaataggagtatgttggagacaaagtgaacatggagtaggacaaaatcaataagcaattaaaaaaagattgaacaatcttaataagttcactaacctatttgaccgaaagaatccaatcctgctgtgataaacagcggtttattctgatccacacatattgatttgctacgtggagaagagaaagattctaaattagtttagcaattagatttgctgccacgctctcctgtaaatatgacagcaatattatcggctagttttacatttagccactaatgagagcattgccccgaatgaatgagtgactatcaatttaagtgatttcaaaaattaacatatagcataaataaacattttataggaaaaaaagtgacagaccctattaccttaaatcaaaaccaagagaagtagcaaggctaagaagatacataccaaaattttcaattccatttcaaatcagtaaaagaaagtgatagtagagggaagctactgaagtgtgggaaaggaagtaaaagaaatcagggagctagtataatattatcattattttattccagcctcaaactaaatgttatgtaacattttggttgtaaaatttaagaaatatttaaagaatataagaagcaggaaataatatgaaattatcccctttatgttgagtcttgacaaaataaataataatattaataattaaaaataataataaaataaataataaaataaataaaataataataatttaaaaagaaattatccctttaagaaaagccatctgggtcactttcctggtcaagacacaagagactgagtagaacaataatcagatgagacaacattggctaaatcaatcactcaataaatgatataaaaaatatcttagcagtaccttttgtcaatgccaaatgccaactggttgataactccacgtatttttagtaatagagcttctgatttactggtaaactttaaacaaatcaggagaacaaattacatgctctattttccaatcacagaaacaggtaaaataaatatggctttgaacaaatacagattacaaagagaatcactgttttgttgcccagcaaatacttctgtttgagtagacaaaacaaaacctgaataaagaaatcttggtaactttaactcgttcttcaaacttaatgagtacatgatgtggaaaggacttgtgtttatgtactcatcatttcagctactcacacaaatggaccataatcactgtcaaataatttctttaaaatatatatatatgaatgtatgtttatgggctgtatgtgtgtaaacatactcattatggtctaaaagaaaattttc

SEQ ID NO: 14 - DNA, 50348 bp, Homo sapiens
gaaaattttcttttagaccataatgagtatgtttacacacatacagcccataaacatacattcatatatatatattttaaagaaattatttgacagtgattatggtccatttgtgtgagtagctgaaatgatgagtacataaacacaagtcctttccacatcatgtactcattaagtttgaagaacgagttaaagttaccaagatttctttattcaggttttgttttgtctactcaaacagaagtatttgctgggcaacaaaacagtgattctctttgtaatctgtatttgttcaaagccatatttattttacctgtttctgtgattggaaaatagagcatgtaatttgttctcctgatttgtttaaagtttaccagtaaatcagaagctctattactaaaaatacgtggagttatcaaccagttggcatttggcattgacaaaaggtactgctaagatattttttatatcatttattgagtgattgatttagccaatgttgtctcatctgattattgttctactcagtctcttgtgtcttgaccaggaaagtgacccagatggcttttcttaaagggataatttctttttaaattattattattttatttattttattatttattttattattatttttaattattaatattattatttattttgtcaagactcaacataaaggggataatttcatattatttcctgcttcttatattctttaaatatttcttaaattttacaaccaaaatgttacataacatttagtttgaggctggaataaaataatgataatattatactagctccctgatttcttttacttcctttcccacacttcagtagcttccctctactatcactttcttttactgatttgaaatggaattgaaaattttggtatgtatcttcttagccttgctacttctcttggttttgatttaaggtaatagggtctgtcactttttttcctataaaatgtttatttatgctatatgttaatttttgaaatcacttaaattgatagtcactcattcattcggggcaatgctctcattagtggctaaatgtaaaactagccgataatattgctgtcatatttacaggagagcgtggcagcaaatctaattgctaaactaatttagaatctttctcttctccacgtagcaaatcaatatgtgtggatcagaataaaccgctgtttatcacagcaggattggattctttcggtcaaataggttagtgaacttattaagattgttcaatctttttttaattgcttattgattttgtcctactccatgttcactttgtctccaacatactcctatttctggtttcattatcattgctgttatttcctgtgtgtttgtttatatgcccagtattaatgtaacatgcatcacattgacatgtttgtgatggaagtgatgtcaccacataagagactgatttttcatttctgatctctattccactgaaaaacaaattgcaagtattttctttccccaactgatttccaggtacttttaaattttagctccttggctttaaagaagctaggagcatagagtagtgaggaaattcaaagctacatattacaggcaattagcaagtatatgagagactgaagtggtagagtaaaccaaaaagaacacagttgtaacaattaggtatgatttgattttttgttatgaaatagcatgcctcatctaatggaatgtatttcctaaactcatagactctataggcttctgaatcaaaaggaagtttaagagtttatatctcaaggcccttaccttcccacagaaactgttttcattgtgaagatctttgagcctcgcacttctttatcctctgcaggtggcgtagtttgcttttaaaactctaatgggcagtagggttttttttttttttttgtatttcccatcctctgttagtcttacaagctaaaggtgacttgacttcaaatatagaaatctttgtaatgagattatagattaattggaatgaaaggaatggaggtgattttgcttagtgaatggtcatggagactgatgtttatgattataattagcaccaacttaattccagtagcagtgagaatcactgttgtactgatagataatgctgatggaattcttttgcttctatgaatagttggaggccagaagagagttcataattgctgaatttaaaaatcatggcgcctagatctcatcggaattaaaaacttttgctctatgaaagcccatgtgaagatgaatagacgtgccatagtgtgggagaaaagaatttcaaaccacatatatgacaaaggactagtgtttagaatatataaactcaacagaaaaataaataatccaattagaaagtgggcaaaagacataagcagacatttcatttcagagaggacataaacatagcaaagcagcacatgaaaaggtgtttaatatcattagttgttagggaaatgcaaattgaaaccacaatgaaatatcactatacatttaacaggatagctaaaataaaaaatagtgacaccaccaaatactggcaaggatgcagagaaaccagatctctcatacattggtggtgggagtgtaaaatggtacagccactctagaaaacagtttaacagtttcttacgaaactaaacatgcaactaccatatgacctagaaattgtgctgttgggcatttatccaagataaatgaaaacttaactctcacacaaaaaatctctaggcatatgttcatggcagctttatgtttagtagtcaaaacctagaaacagcccagaagttgttcagcaggtgagtgactaaacaactgtggtacatctgtaccaggaaacactactcagtcatacaaaggaacaaataattgatacacacagactggatgaatctccagggaatcatgctgagtgaaaagcagccaattagaaaagattacatacagtgtgattctatttataaaaaattttgaaatgaaaaacattttagaaatggaggcagattagtggtggtcagagggcagggatagaactatggatggggagaccaggggaggggtcgggaaggaggaggttatgtctataaaacggcaacacaggatctttgtgctagtggaattaagttggtgtctcgactgtggtagcaaatacatgaacctatgcaggtgataaaattgtatagaacttaatatacacacagacacacaaaggaatacaagtaaaacttggcaaagctgaataacatcagtggagcgtatcaatggctttcgcaccaaagtggtaaggatgtcctggaagatcaccagtaaaacagttttggggaacaatacagttgttggaaatagaaagatgggaaatatccagttacaaattgcaaatggcagcaaagttttaaatttttcaaattaaattatacaagtaacacataaagatatctccttgtaaaaaggtaaaagagtacatacaaggagcaaatttgtgttctttccaatttcctatgcctttacacacatgtgtatatagtgtaaaaaaactatttgctttaatgtaattatgtgttcagtctatatcattttggaatttcccctttttattcaatataccctattattcagtaccttttaattcaatataccaatataccttagtagtttttccatattaatgctgtatgtgggtctatttcttattttaactgttggatagtgttacagagcatggctatgcatagtaattaatgcactgttcaccactgatgaatattttggttgtaggtcaatttttcactgataacaaattatactgcagtgtgaaatccttaatacagtaccagtttgcaggtgtttctagggcaaacactaccaaaaactggaattactggttaataggatatagatacaggtataggtatagggtgtggagaatgagagttacagtttacccattactctttgcctcctcttctttcagtactagaatctgtcccagtgaccttgctatgctgggtagggtaaatttttatggtgactatattaaggagagggaaaatgagtgatccgagatgtatacctttgttagtgtcatttcttttattggtggagtttgtaatattttaatcattgcagtcatttgtggtaaaacttgctattttaggatctcctcctgttcctgaaaatgacattggaaagcttcatgcccactcacctatggagttgtggaaaaaagtgtatgaaaagctctttccaccaaaggtacatatttctaatttttttaaaagcaagacttttagcactgtctaacagttataggaaatgtgtcaaagggcttattatgataactttgttttcatcttttatgctcaaaaatcaattaaacatttgctgaaaatgtaaataggcactgtgggggttaaaaaaaaaaaaaggtaagacatggttcctgctccactttcaaagagagttatctggctgttagagaagggagagacaactgaaaggggacctggcagaattggaagtgggcctcagtggtgatgagaaaagctagaaagatcatagagagcctttgtggcaggctgaggaatgggagcttggtttattaggcagatggtagccattgaattttggtttatgggcgtgaagtgattttgagatttgtaatttcagagtattaacacgctgaaagatatcaaggaccctgcgagagatcctcagtatgctgaaaatgaagtcgatgagatgagaattcagaaggatctggtattatcctaaacatttacttaatttcatctgaaattttaacacaaaacctggggtgccttgggaattccttacatttttctctatgtatttacttagagtatcttctttactattaaaattatttaagtagtacatctatttaaataacacactaatagtatactgtagaaaaaataaaaatttgatatgaataaagaaaaatttttaaatcacctgtcatcccaccacccagacatgacttagtgttcacataaacctttttgattttccagttttcattatattaaagatgagtggtgattcttaccttgctgctggagagacattttcttaatagtctttggtttgtggaattacatgaagagctttgtttttgattaggacattcagacatacctatactttccttgtactagaaaacgtatcttgcccagttaaggactgaaagcacgatctgaaagcacacagacatacctgacataacccaggttctctcaggaaaatgcttaaaagtggacaccaccatcccatgtatcactagatagccccatttgaacacacaagtctgatgtaagaatgttaagagttggcaaattcaccatcactcaaatacttagatttttcttttctttttctttttcttttttttttaagacgagtctcacactgtcgcccaggctggagtgcagtggcatgacctcggctcactacaacctccgcctcccgggttcaagcaattctctgcttcagcctcctgagtggctgggattacaggtgcctgccaccacacctggctaattttttttgcttttttagtagaaacggggtttcaccatcttggccaggctggtcttgaactcctgacctcgtgatccatccgccttggcctcccaaagtgctgggattacaggcatgagccagtgcgcctggcctagatttttctaaaaacaaacaagcaaacttagattttagttttatttgataaaatgagacgttgtacagaatctgtccttatatgagtaaacttatatatgctaagcactagatcgaaagccccagcaacttctcaggtggcagtcacgttgttgcgagggtaacctgaaaacagctgtcagctgggagtaggagccagggtttttttctcagtattcaccttcgggggctgttggagaagtaagcaaaacattttatgtaaacggtccagaagacttttgaaaaatatgccatgaatatttagaggttttatagctgtagcaaagtgagaggcatgttgtagaaacaggaaaatgaccttatgtaacccttattatgtttgcagcctggctataaggattagttggaagtcatccctgattaatatttatctaggagtcaatgattaactgttgttgttgataagaatatctgtttatattgtataatgatcacttttattaagttcatatacatcagtattattaaaggattagggtatttgtgagcatcatgagttttcacattcaaatctgtcttctctaaatgacttaaaaccataagaattttgtgtggaaaaggaaggcagccccacagtacccatatcacccttcattcatctcttgtatctcactgccagcagatcaccaattcctgtcatctcttggttcgagatttttttttaacctacctgaaaagttatgctgtcctaagtttgcctctaaaccacttttatttgtgtggttttagacgaattgattccagattgcacacacaggaccttaacataattttatgctttagctgtaaagataccctaacaattaccagtgttgttgctgttatttcattgataatccgaatctaaattttgacattctactatataaaatttttaatttgaatattatttcatactatttcatgagtagttgtgagaccttaagttgtttccaattgtgtgctgtgaagtcagtcctcaaggatctgaggattggtaggaagacccctttcatctttcctgcagacttagggtctttcgtgattagccctctttaattatttaaagttctgtcttttgccagacttcacatgggcaccagaaaatacttaagtagtattttctgttttttaaaagtcctctagctttagagcattcccgattttaagggaatgcgaatgtggaaagcacttgctgagcccttctacctcttttgtgtttttttctttttctttgatactgtgtcttgctctggcatccaggctggagtgcaatggggagatcatggctcactgcaaccttgaactccagggctcaagggatcctcccatctcagcctctcaagtagctgggactacaggcacacatcaccatgcccgggtaatttttttgttttttgttgcccaggctggtcttcaactcctcgcctaaagcaatcctcctgagttggcctcccaaagtgctgggattacaggcatgagccactgtgcccagcttcttttctattatttttgttaaagcaaaaaaaaaaaaaaaaaaaaaaaaaaaaaaggttacagttaacatttatttttaaggtcttcttggccaaccacagttatcttcggaaaactttacttgctatccctttaaaacatcaatgcattattttgaggccgtatcattgtcatgttgaagatctagtggacttggtggtttttgtctcatattggttattcctttttctccctctggcatggcctgtgtgatagccctagttttctcacagtctgctgtctgcaaaagggagatactaccagcaaagaatctcaaaacaacattttcacctttgtcattggtaaaaataatttaacttccagttaaagacaaagtttgcagtaaacaatttgtttattctttatgagttaatctttaaaaccgcaagtggtagataactggtgaactgaattagctttattagaaaaaaataaaacaagctgtaaagactacatatgattattaccatgaaaattcttcctagaatccaatgaggaagttaaaggaaaaaaaaaaacacacaaggaaaaattcttcctaagtctatataccattttgaaacatttaacatttaaattttagtaacttagggtataggtatgaaaggtacgctctgcaatttttctgaaaattagaatggattttcttttcatagcaactgtgaacttcagttatgttagccaaagggcattgattgcctcatcttgcagagtaaccacgttttatttgaagtagtgacaacctttgtacagttatttagacattgaacaacatgtaggaggccaagaggcatccccttagatggtcccttttacatgtcagttgccttgtgcaggatagccacctccactaaaatttatttatgaattgtaaaggtaagatatactccttgtgaaaaaattcaagagctatagatagatgtatataaaatagaaaatggaagtatcctgccctctccctatctgtgtgcttttttcatgtggcacacattatgttttcatgtggccactgttatttttgctggctgccttggaagccacctgtgaatgaacgctaattatttaatcagtccttactgggggacatcaaagttgtttccagttgtgctgagacagagcaatgggtttccttcttttacatccttgtgcattgctctattgttatggatgataaatttctaaaagtaaaatcactgggacaaaggatacacacacacacacacacacacacacacacacacacttttttgtgacaggatctcactctgtcacccaggctggagtgcagtggcgcaatcacagtttactgcagccttggcctcccaggttcaagcgatcctcccacctcagactcccaagtagctgggaccacagcgcacaccaccatgcctggataattatttttctcagtttttgtagagacacggtctccctatgttgcccaggctggtctcaaattcctgggctcaagcaattctcctgccccagcctcccaaagtgctgggactataggaatgagccaccgcacccagcctgggtatgtattttttaaatattttgctaacttcaaccaagtttttgattagagctgaacagcaaacaattaaaataagatcacttttgaatacttgaaggatgacagatgtctagttcattagttgaaagacaattcatatgtattatgtagtttatgtacataattttgtctgaaagtttaataaattcatctctgagtgctgcttagccacacagaaactctgaagacagtatttctagaaaataagtcctaagcataatcatttacaaaataattggcaagaaatatttagaatgataatgctactaaggattcattgatatatctaaaaaatgagaaggcagttttaaggtgcctccttgaattagtaaagttgatttttcttaaagtgatacatatttttgttttaggaactggaacagtacaaaagaagttcttccaagtcttggaaacaaatcgagcttgattcttgaacctatttcaattattgtatatttatttcttcttttccaaatacaaataagattatactgtgaattaactattgtggcaatatgtgaagaaagttaaactgtataatttgttaaaggacaagctggatttcttggactagtgcatctccctgtatatcttgaagctttttaaaaggaaaaattattgtagaaccacgtgtaattttttttaaaataaaagaatcttctactacctacctctaacatgtttaagtggtatatactcaattcagcatgtataagtttctgcttatatgtttttaggaatataaaagtaagagtatttggttacagttttaaatgcaaggttaagtgcccacgttagacacattctttctaaaaggcattctcagctgtagctgggaggaaaccggaattgggttcacagatgtcaaaattttactcttaacagtgaggcgcaagaagcacctgaaataggagatgcacattcccaggtccccacacctagagtgtcgccatcagtggtctggaatggggcatttttaatcagcaccaatttcaccctgctgtgagactgacacatttattttaaataccactttttgaagaacaggcacatctaaggagatatcctatcaagaagcaggacaaaacatcatgtgttgcggataaccaggattatttccaaggtgggatagcctttaagaagccattccaatctgtagatgtgtgtacctgctagccaagttcattttgagtaagtataattgctatgattaaaaatgatttattctatgttcttccatgtccacatacaaaatatattgactcccagcttcagataagcacatttactaccccaagggagtactgtctgagcagatagcaagccatctgcttattgcaatgaactaggacttcataaattatttgcagtacgtatggttctgacacccttgagaacagaattttcagcatgtttccaaggaacctcagtctttagcacacgtttcttgctgagtgctatggaaaaagaaatccctttaaatttacagtgaacattatgatctcagaaacatcactgacttggtgggaagaaacagcctattccacaagagtaataggaattgttattatgtaatttgattttcttacacatcactgtccatttttgacttgagacacaaactgtcacatgttgaaagccattgtgtttttctaaggtgctatcactaacatttaatagcttgaagtcacgtgtgatgtcagttttccaaatgtttctgagctagaatgaaattcatctgcatatgaatagtagaaaatgtttccacttatgttgtacacccatatctttagtaagttgaaatcagtgatttcaaaagaggttcctgtgggactctctttgaactactttaatagattatcatctccagaattgtctataactgatgtgacatatataatctgtaagacattgtgtaactattacaccataatcatccatgtcaaagaccttttataaaaattgacaatactagtctgataatttaccaatgcctccacatccttaaatactgttctaagaaatagaattttactgtggtttccttaatgaaatgatctttcctatttcagtgtgagacatttcaaatgctataatttatctttcttcacaagttaggtcacagtcagtgaacaagttcatgcgctctctaccatattctcacccaaagttaccatagtaacactgagacagtttcatttcaggtttgtacatggaattacttgaagatcaatcagaaagagaatcagtaattttaatacagaacctttttttttttttgagacagagtcttgctctgtcgccaggctggagtgcagtggtgcattctcggctcactgcaacctccacctcccaggttcaagcgattctcctgcctcagcctcccaagtagctgggactacaggcgcctgccaccatgcccagctaatttttgtattttttagtagagacggggtttcaccatgttggccaggatggtctcaatctcttgacctcgtgatccacccgcctcggcctcccaaagtgctgggattacaggcatgagccaccgcgcctggccagaacccatttttaataacctatttacattattttatccttgaaaatatgtaatacaggtgtctgtatttatacatatcagcaccctttacagttcaagaatgtgaatttctagtatgtaccctgttctttgtaaacaatatgtcagcactttttttctttcttttttagagacagggtcttgctctgtctctgttgcccaggctggagtgcagtggttccatcatagctcactgcagcccctgcctcctaggtttaagcgatccttccacatcagcctcctgagcagctgggattacagatgtgagacaccatgtctagctatgtcagcatttttttctatatggactttaaataacagctgatctccagccttaatggggttatttctcagtgcatatactttagtaaagtttacttgtaattcttttttttttttttcggtaggtttttttttttttatactttaagttttagggtacatgtgcacaatgtgcctataagtaaactcagctgaaagtgaaaaatagcaaacgaatctttaaaaacataaccagaggtttgtctggtgtgctttgttcactgttgagcccattcctacggttttttattttaatcctcagtaaaatcactgggtgctctgtagcagtggtgctcaccatccatctgcccagcactctctcgatgtgatcaggtaactccgacccctcgtgtggacatctgcatttaactctgggtcttccaggaacagaagcattcttacccaattctgcatgataaccttgcttcatctaaacccacaactctctttctctgtcacttatggtcaggaatccttgaaacattttatttttgcctaatcctttatccaatgtaaacatatttttaagctgacctatttttttctgtgcctagaacaaggaaaaaaaatagtcacacgagtctcccataggtttatgaatattatttacattcttgggtccgctcagtcacaatttccaaataaccacatgtccctgcaagttgtaagagcaagggactataaaccacttccattgcattcaaggcctgcttggatccaagaggcacaaatggagtcttaatggttaaaagacttgagatgtcctgtcaagaaagaaatacatggcactctcatttcagacgttcagagcagtcatgcacagtcggcagcttcacttccattttcccagccatggctttcactacctgctaatgagatgatcccttattttgaaaacaactattcctaggatgacaagagctggaataaatgaatacaaaatcagaaagttcattgtgaatctagatgttgcacctgggcaggttttctcaatgaattgaattccttgagtgaaggcacacattggattagttgtcacagaaacatttgagctgcctgtcaaggaaaagattgacagtgtcaggtgtggtttatctcaggtaatttaatcaacaagtatttaccaagcgcttgctaagtacccttaatgaaaaatacaggacactttagcaagcccagagtttacaatttgatgaagcaagagtgagcagttctggcctttggcttcatttgaagatggacatgcttttgtttctattttgggtatagattcattaccatatttgtgataaaaatcatgatcccttagcacagactatcctaaagttactgacattatcacttaaaattatttaaaacactactaaattcagccatattctttggttgtctttggagtggccctgagatttttttggttgttttttttttgttttttttggggttttttttttcgttttttttttttttttttttttttttgagacacagtttcactctgccgcccaggctggagtgcagtggctcgatctgggctcactgcaacctcagcctcccagattcaagtgattctcatgcttcagcctcctgtgtagctgggatttacaggcacgcaccaccacgcctggctaatttttgtatttttagtagagacaggtttttgccacgtcggccaggctggtctcgaactcttgacctcaagtgatccaacctccgactcccaaagtgctgggattacaggcgtgagccactgtgcccggccaccctgagatttctaatggccatgaggtccttgtcttggttctacttccatctggtgggattgaggaatagacttttgccaaaagtagctttatttagctatgtacgatgtacattttggggaacaagaagccacttcagcctgcttgaatgtgttcagtagatacaggaactgagtctatccagaatattctggagtttacctcagtgtacataaggtctgtcattttctaacaacatccaagtgtcccttacctgttgacctttgacaggagactaacttgactactgcttattttctttcatcttaaaaatcagagaaaatgttggactgtatttcaaaacagagttttaaattgaattattataaaacacagtttttatttcaaaaatacatttcctccaagaaattgcttcctcagagtaacatgcaaaaataatatccccaaatagaatacttaccacaagtgaaattcagtccgtagaactcattgactacaagaatctcactgcaatatttttggaatgtaaaataactgatgattttaaaaggaatgggcatttcttgtatgtttcttaagaaaaagaaaacaaaaatgaaattcagtaggctctggcaatagtcctaccaaatgaaaagaaaggcaatccttatattttccaacaggaatatagttttctatctccttattataaaaatgatgctcactataaaaaaaccttcaaacaacattgaacaatataaagaaataccgttgcctagaaataactattgttaacattttggtaatatatataacatgtgtgtttaaaagttttatataaatggaattaaactcttcatgctctttcctaacttactctttttctgccaaacatatgtctcagacatccttccaagtcagtaagcatagcactttgtcatttttaggcacagcttggtggcctgttatagtgaagaccttaatttaacagttctctcaagtagacgattactgtctacttattttggtaagcactactgatataaacgtacaagaaaatacagacctaacacataccaattggaggaggagatttgtgattaaacagaaagttgaaggtaccaacgtagaaagttagaactaacctagaatacaaaggaaaaaggaaggagagaccgaaccaacattcattgtgaaaatgaaatatgtctcctctccaatctatttcaggtgaaactgtgtgctgacactgtggtcttcttagtccactgtatattttctgtcaatcaaaaggtataaaattctttctgtttgcaaggcactagttctaggagcttgagaacttcaaaagatgtatcctatccctaaagaactcataatgtagttggagatatagaatatatccttaaaactataaaaatatacagtagtgaactatttgtgccaagaaagtataaaaaaatgtgtaccacacatccatgatgttcttgtatttagtatttatggtttcacctatttgcaaggtgtcctcaacctttcagtttcctaaggcacaacattgaattaaccacattgagaggttgctaattgaaaaggatacgtgggactctgggaaggaattaggggaagaggatggaaattctaggaaggcagaaatggtatgagtacaggtatgccaagggctgcatatgggactgactggaccagaaacactggaagagaggatgtgaaggaacagtgggaggggagctcggaacaatagccagcaacagccatttcagggccttgctgtgagttgaggttgaatgaccatgaatgagacaggtcacgttgaaatcagcattctgagaaaattaacgtgactccagcaagaaggatggctagaatgagggcagagtaagaacaggaaaagaaaaaaaaaaaaaaaaaggaccagactacaaaaaaagttcaactatgagatgacaaaggcctggagtaggatgatggccatgagatggtggctgcctagtggctagggtgctatctttctgaggtaggaactgtgaacctttgtttctccctgtaccacacagagtcaaacacaaaatgttccacatgcacctatggtttgatatcagaaaagaaaaccaacatgatttggtgagtgatgcagtgtgtatacagttcaaagacagagtcatttacttattcactcaacaaataatgtttgcaggcctaattggtccaaggcctaattgggctggctgctgagagggtctaaaatgatgaatgagacacagctgctgccttcaaggggtggataatctattacagcaaaggaagaccgtgacaggaagtagtgtgtgataggctgagagagaaaacaaaaggggccttcaaagagagtgcgcctctagccttgggaacaaccaacagactttgtgcaggtggcggagagagagaaatggatcagtgaaaggcacagacagaaggagaagcagcgggaggaaccatagatctggatgtattgacatgacattgtccacattaggttggtttgtgctttgtcttttttattttttgaacggagtcttgttctgtcacctaggctggagtgcagtggcatgattttggctcactgcagcctccgcctcccaggttcaggtgattctcctgcctcagcctcctgagtagctgaaattacaggcacgtgacaccacacccacctaattcatattatgttgttaaatgggaaaaaaagtatgcatattttatatcttatacaacaggatgatttcatctttgttaaaaattatataaaattctagcaagaactacaacaaaatttaactctaggctctgatacttcaggtaacttttactttcttccacatccacatttatattgtgagcacttcttcccccaagaacttgcatgattttgtaagcagaaaacacagcaaagctaatttcctttgtgtttaaaagagaagggagccaacagcacaaatgccttaggcagttcacccagaaagatgatgactggggagaaaaatgggtaaatggaatgactagcaggttgatgtggcctttaagagtggagttttaattttcagcgatggaagtggaattcatatgaagccttgggttgttaagattttgcaactaatctgagaacatttagtattctttgcaactgcctaccttttaagagcaattaaccaccaggtatagtggctcacgcctgtaatcccagcaccttgggaggccgaggcagggaaatcacttgaagtcaggagtttgagaccagcctgaccaacttggtgaaacctcatctctaccaaaaatacaaaaattagctgggcgtggtggtgcgcacctgtaatcccagctattcaggaggctaaggcaggagaattgcttgaacctgagagacggaggttgcagtgagccgagatcgtgccattgcattccagcctgggtgacagagtgagtgagactctgcgtcaagaaacaaacaaaaataaaaataaagagcaactaacctccttttcctaaaaccctaatacaaatgcttcttatgatggggttacttccagataaacccatcataagttgaaaatattctaagttaaaaatgcatttaaggccagacgcggtggctcacgtctataatcccagcactttgggaggccaaggcaggcagatcacctgaggtcaggagtttgagaccaacctggccaaaatggtgaaaccacgtctctactaaaaatacaaaaattagccaggtgtaatggcaggcacctgtaatcccagctactcgggaggctgaggcaggaaaatcgcttgaacatgggaggcggaggttacagtgagccgagatcgcgccactgcattccagcctgggtgacagagcgcgattccctctcaaaacaaacaaacaaacaaaaaaacacatgtaagacacctagcccaccaaacattacagcttagcctggtctaccttaaatgtgctcagaaagcttaacgttaacctacagttgggaaaaatcatctaacacaaagcctattttataataaattgttgaatatttaatgtaatttgttgaatatttaatgtaatttattgaatcctgttctgaaagtaaaaaacaggatgattgtatggctactcaaaatacagtttctaggttggctgcggtggctcacacctgtaatcctagcactttgggaggccgaggtgggcgaatcacttgaggtcgagactagcctggccaacatggcgaaaccccatctctactaaaaatacaaaaattagccgagcatggtggcgcacacctgtaatcccagctattcaggagactgaggcacaagaatcacttgaacccaggaggcagaggttgcagtgagctgagatcgcgccattgcacttcagcctgggcggcagagtgaaactgtgtttcaaaaaaacaaaaacaaaaacaaaatacggtttctacagaacgagtatcactttctcaaaaaatcataagtcggggatcatctgtacatgaaatggcaccagattaactgaaacaatgattcaaataatataaaagaggaaatgctgcccaaggttggctctgtacattgctggcttgattctgtactcttggtgtgatttgatttctgcatttttcataaatattaacaatccacttaagcaacacggacaaatacaatatcatggtcttcgtgtgaaaaaatatcctccttgatttatcaaagcctaattcactttgctttataatatctcacttcgtataactcactgcaatttataatgtgttttcatattgattatttccgttccttctcatgatcccttgaggcaggtggggctgaaatagtgatctcttttttataaatgaggaaactaatttagatagaaaagagactggcaagtggtagaggaagtttctgactcataggtcagcctctctccacgaagtcacgtgcgtcacagccttcatagtggtgtgacttgagcaaagtcaagtctgagcttcattttcttatctgaaaatggattgctctgagagttaaataattaaacacacacatatacttttatatagtagatgctcagtaatgcttttgctttttgacttgatttttacatttttaagtcaaagaaacagccttcatgtttccttggggacccagagattacttactagatcccactcacaccacctgcctgggatcatttttagccttttaaaattttctgccctttttgctgctgctttttaaaaatgtgtgtggatacattttttcctggttataaaatgatacttgtccattacagaacattgataaaatacagaaatatgaagaaaaaaattaaaatcaatatcactattgatattgattttagagatagagataattactgctatcatttggtgcatatcctttaagccttgatactctttggagcagtcttttatcctgcaggcttttttttttttgtctgactagtcttaattcctaagaataactgggaattgagaactgcagttcacactcaacagtaccaggtcagaaatgaactaatgcatgcaatttatttagcctatcatgtgggctgtgagtttttcctggaacatccgggctggttttcttctcttggtataatggtttattacatgtgaatcatatcataacataaacttgttagttcctgattcccgataaaaaagacattttattgaacaaatgaacagttcaaggtctaaggcaatgattaacgagcagtataaatgctctagactataaggtaatatccataaccactatcagttctctggtattcctttacttcagtcattattaggtgatcattaataacagattatcccaatctaaattttttgaattatgatatcttacctgaggaatccagatccaacaagcacccccgcaatggacagcagagccactacactgttgactatatttggattttggacgataccaagtagcacaagagttagaaattcaccaattaagtggggggccaagagagcagcagaaaaatatccaaatcgggcaacctcaggatgtaagcccagcgtcctagaaaagcataagctctttagtttcctctccaagggctatcatttaagaaaaatactgcacttgcctctgtgaataaatcctttgtggtgagtgggtgggagaagtttgcagggcaagccacactcccctttgaaaggccgttttggaaaggagtcaacatgagactatttattatatcaaattgttcccattggctgcaactcattgggagccaccttttccctttcacggctccttcagctctcataggaaaacattaaattacttagacaatggtcacaactaaccgcagtaagcaggcttgttgaactctacaggcatcttcataaataaccatgttctgcctagccaacaccacacctacctaatgttaaagggctcacccaacccgcttcccagcacccccttccctgaacctcatctctgttatatgggattattgcctacgtgaaaatccctcacttcttttgtcctcgatcaggttagccctccccagccctactccattccattcttgtcttttattctaccaaccccttccactgatttgaccttcgttttcttttttgagacggagttgcactctgttgatcagactggagtgcagtggcgtgatcttggctcattgcaacctctgcttcccaggttccagtgattctcctgcctcagcctcccaagtagctgggattacaggtgcgcaccaccacacccagctaatttttttgtatttagtagagatggggttttgccatattggccaggctggtcttgaactcctggcctcaagtgatctgcccatctcagcctcccaaagtgctaggattacaggcatgagctaccatgcctggcctgaccttcattttcttgtaaacaaaccaccctatatccatgcacctttcctcttatattcctttctccaaattacatttccctggtgatagcgtatcttcaatgaccattaggcatggctgctctttatcccatttgtagagtaagcaaaaaatgttggcatgtcttatactcgcccctccttaccacttactcttcaaggccatctacttttcctctgtacaaatcatgaagtttgcttatgctatcaatgccgttcctcattgttgtcttctgtgatgtttaaaacatcctcttgcctttgatgattttatagcatctggaccagagtcattctttttgctcctctcccctatcattttcctcaagctctttaaccttcttgatgagccatccacatcagtggttcctaattagcgaatctcaattccaatggctccagctacctaatctgcatcactcaccatgtcttggacttaaatattactcaaaatggtttcgctcccaggatttcagagtctgaggacaccctctctgagcacagcctcctgcctctcacttccccagtgccctcactgccgcagatgctggaccccttctgccattctttgccttatcagttcccacatctggggaccctattctcccttaagcaatggaaggtgtgctggacaatgcctattgccgcactaactggatcccctctgccactttgcctcagctggcccctggacccctaagatttccttgttgtgtcttgaattctaatagcatgtcccatgatgactgatataaacctctactttaaaatttcccccttcccaatttcaatctctctccccagtgctcagcagctgaattcacctcccattttatgaatttcttgatatcttcatcatctctatttttcattctctctctctccccctctcttcccgcaccccatctttgaaagtgtgaccctagctgcttgcatccttgatcccatgttattctgattcccctatccctaccttggtctactctgggaacttcctctttgacttatccaaattttggctgcattttcatctactctcaatctgatgttttttgatggtcttatttaccacatcctaaaataaccattttttgaacttgatcatcatttaagtaactgcccctcttcatcctaccctgtaacaccaagtttctcaaaacagaatctgcttcctccatcttacaccttcccttcttgtaaacctgacttgcacccccatgactctaccgaagctcttttttgggaaattgcaatggccttctccctttatgcttcacctcctttaacccctgcaatattgaagtgtttatgacacttccttgaaactctctccttcctcatcctctctgatgctgcccaatcctgcttctctttctacctccctgatcaccctctgcctcctctgttggttgctgtcctcttcccaccctctgaatgtgtctgttttaaggttttacattcaggctgctttctcccctcccccaggcccccccccatgcacctgggtcctagctacttcagagtcctctcttctctggcccaggccctgccgtgaatgtgggacaggtcattcccaggcacatgtcatcttgttggtttgttctcaggtctcctgcaacccacagttgggctatttacaataaaattaatgtcctggaagatacgacattgcactagacactgatgggcaaagtgtagatcctccagagcagagaacttcaccctggagctctccctgcacgagtcccactagctccatgactccatgggagcccggccctgggtgaactgaacaacccctcaccagtagcacacactgctgaaaatcatggtggcaacaacgctgaaggggaggacgtgcagtgcataggccagcatcatctgccacttctggtagaggccgtcctgactctcctggtcgctgacagctcgcagcacgggaactggggatggaaggcaggtttcagaacagtcagtcaccacccagctgaaaaagggagggctagcccaagctgaatgtgaggtctgtcagggctggatggtgaggaccagctaggggggttccctagtcatagaaggaggggacctgccatccacaggacaataaatccccaccccggaaatctacactctaccagaattgcaatacaattgcaaaagatgtcatttatttccttctctctaaagtggggagttgtcaccaattcacgaaaagtacatgcaaaaggggcatgaataagtgatttgaagcactttgtcttctttctgtgcaggattccccccaccccaccccgcccccaccaccagcagcctgcattttagacttgctctcggaaggccaggcaaaccccacagatgcagacacttagcattgcccctcatgtcaagctctagagcaacttcacaatagcgaagtccttccctcttattccctaacagtgttgcctttggggaatccctctaacacctgcttcctgcaacgttaggcaaccaggttttgtctctggaattccactgaatttgaaaattaggtgctggctgtcctaaaatcagctccaaagagaagctaacggtacaaagttggcctggtcgctgagcaccccatgggctgtgcatctgagatggccaagatgagataggaggaatgatcttttgaaaaactcctcaaactctccccaccagtacattgtcacttcatgtttccctggatccttagccctcagagagatccacctggtgagctcattcatattaacgtgttggtaactcaatagttgcctttccccagagagggaacctggagagggctgggtttagctcagagaaaaacccttataatggtagacttttgtaaggttacagctggagaagggaggtatttagggagaaagaggtgcacctccagcacgtgggcacttacacagattcacagcgttcagcatgcctgtgtacggggtggcgcccacaaactggtaaaggagacctacgcggtcctggatagcaccctttagcacattgcttcggacccgcagaacgaagaaaaggaggaacaaacccatgatcagattctgaaggagacgcgtaatcactgccagcttatttctcaccaagtttcttgtcactctcctgaaaacaaacaaccctgttttaattccttttcagaattgttattgggggatggctaaagacctctaacaggcatttctcacatttgtgagcctcttacctcaggagaacacccagtttagagaaaactccaggagaatctttggttttgaaaggaaccattggtaacgttttcaggtgtttcattctttcaatattcttcaaagttttatgacaaattgctgatttcttgtaggcagattctatcatctggactctcttggaggtttctatttcccgttccttgctttgggtatccactgacgtcaggtccactaaaagtttttcccaaaagatgtcacccatgtgtttttaaatgcatgtatgtacatggatatacaattggtacaggagtactggccataatacctcatcccatcaagataaaatttgtggttaatgcccacctataaaatcagaatactttaaagcatcccagcagggccttgaggatcccattgggattgtctgggagaattcagaagctcagctaattatgctctgataaagtagtagcagtgcgccagtttgtttgagagagatccctgacctcattctgatagtcatctctggcaagttcattgacccggccaaattgattccttgaagagtataaaacacaaaaacaaaagcaaaaatcaaatccactagactggtgtcatccaggcagaagtctgagatgagaaagtttaaaaaacattcatgatggggaatgtgaaagaaaaacttactatagaagtcaaaagggtttgaatgttcaggacaagggtaaccgcagtcattgaagaaatcaagcatttccgctggcgtgccacagaaaatcagctctccgaagctcaggatggcaattttgtcaaagagctgaccagacaacagacgtagttagtgtgtgatcacaagggtagcgatgcactttgaatgtctctgggaacactgatgcagggccaaggtcaggtattccttatggtcaccaagtccttatgggaaatgcatttcccataagcagtcagtccttcgatgaccttggccctgcatcagtattcttggagacattcgaaatgcatccctacccttgtgagcctaggctaccactgtgggtcatgctgcctcccatcctgacgcccagcttcatatctgggatagacaagcatgactggacctgggcgtaagtcccagccaagccaagtgagtgacctcgggcgagcaggggtgggtcttagtttgtttttttgttttcattttaaatctcagctcctcctctgtaaaaagcaaataatagctaactaaagggatactgggcggagaaagtgagtttttttggaaggaaatcagtatgatttcgtggaaaaacacagcctttgaagccaacttggctgtgaaaggctaatgctagctttttactattaacaactgtgtgatcttggcttaatttgttgttgttttgttgttattgttgttgttgttgttgtttctgagaccgaatctcactctgtcacccaggctggagtgcagtggcacaatcccagctctctgcaacctcctgggttcaagcgattctcctgcctcagcttcccgaatagctgggattacaggcgcacaccaccacgcccaactatcaattttgaatcattgctaagtttcactcttttcctctgtaaggtgaatacactgaaacacacctcataggagtgttgtgcagatgaaatgagctatgtacagaaagtatttggaacatggtaggtgctgaaagaagtgagttttcatcctttgctcttcccctctcaggagctgttggctccaattctctagcactaacggttttttgtttgtttgtttgagatgaggtcttcctctgtcacccaggctagagtgcaatggcatgatcacgactccctgcagccttgacctactgggctcaagcgatcctctcacctcagccttccaagtagctgggaccacagatatgcaccaccatgcctggctaatttttctttttctttctttctttcttttttttttttttagagatggggagtctcactttattgctcaggatggactcaaactcctggcctcaagtgctcctcctgcctcagcctcccaaagtgctggaattacaagtgtgagccactgtgcctggccactggtacaaatcttgcccctgcccctgtgattcccagctcaacacaccatagacccggcctttacgagttgaacctcttacctgaaaaagctcagaacggggctggtgaatggtgagaaccacaattcggttcctgcgagccagttccaccaggaggacgacaatctgattagcagtcatgcagtccaggcctgtggttggctcatcaaacagcatgacctctgccagcaaagaagggccagacttctaaggtagtgcagagcccaggctctgtgcttaaaactcagagttctgaactgttccttattgagtttgtaccccattcaaacagtgtgcggtgggaagtaaacatgtaaactggctttcagcctgagctcaggagaaaggacctgatgtggaagggcctagttcccagctctggagcacatgtgggctcaaatcctccagggcacagggagtaaggagatcaggcctcttacgggccatctgggctctgctcagggcaccctgtcagggaacaagggctggcaggctggcatcaagttgttttaaaacaagactgagagaaggctggtcaaaaagacaaccccatttcatgtctgtaacactttccaacaccagcagggtctttgcacagaaaagaaaaaaatctgacgaataaaacaaggcctgaagtgtggcaggcatttgggttctttagagggtttaaagtaacttatttcttcctaaaaagtgacaagggggccgggcgcggtggctcacgcctgtaatgccaacactttgggaggtcaaggcaggcagatcacctgaggtcaggagttcgagaccaccctggccaacatggtgaaaccctgtctctactaaaagaacaaaaattagccgggtgtggtggcaggcgcctgtaatcccagctactcaggaggctgaggcaggagaatcgcttcaacctgggaggtggaggttgcagtgagccaagatcgcaccactgcactccagcctgggcaacaagagcgaaactctgtctcaaaaaaaaaaaaaaaaagtgacaagagctgttaaaaacatctctcttatttgccttctagtgaccaagcaccatttgaagaacaggccgtcctggtctaccacagtgcaaagaaaggatccagatgcagtttgtcctctccagctgcatgagtggcgaggtttccccaggtgatggggaaaatgaccaaacctggcagaggactgactactctgttttgatactcccttccccacaacatatacacttttgagtttatcattcaaattcctattttaattcctgccatttcatgaacacctgtggtcatatcaaaactcattggctttccccagcccacacagtggtattgccctggtgagaagaaatgattggcagggcaaggctccatattcaaggaaaaccccaatggaacacttcaacaccaatgcaacgcttccgggtccaggagctgttttgtttggatgatggaatcgcatcaggaaatgaactgtacagcatttccaaaaaaactgggtcctcagtttgaaaaacctgtgatttcagttgtacacaaacccctttccaaatgaggaccgtgaagaaagggcccaaagtatctgcacacacacagaagatgcccagacagcagctagtaacagttctgggtgccacttactaggatcctggagcagctgggctgcgatggagacccggcgccgctcacccgtggaaatgccccccaagctgtagttgccaatcagtcggtctgccacatggctcagactcagctctgccatgacggcctccacctgcaggagacacaaattacaggaaggctgggagtctctgtggctgctatttcaattcatgggctggggaggacatgaaagaggcagcacaccgcccaagaatccaagggccacttccagactcaccacaccctggggaaagcatgtctttgataataatatgatccaattcggcttaaatcgtaatacatgtgtcagatttaaataaataatatgaattttttaaaacgtccccagaggctgggtgcagtggctcatgcctgtaatcccaatactttggaaggctgaggagggagaattgcttgaggccaggagtttgagaccagcttgggcaacaaagagagaccctgtctctacaaaaaaaaaaaaaaaaaaaaagaaagaaaaaaacaataaattagccgggtatgctggcacgtgcctgtagtcccagctactcaggatgcttaggcaggaggatcgcttgatcccaggacgttgagaccacagttagccatgatggcaccactgcactccagcctaggtgacagagcaagaccctgtctctaaaataaaataaaataaaatgggcctggcatggcggcttatgcctgtaatcccagcactttgggaggtcgaggtgggtggatcacttgaggtcaggagttcgagactagcctagccaacacggtgaaaccctgtctgttctaaaaatacagaaatgagctgggagtggtggcaggcactggtaatcccagctactcggaggctaaggcaggagaattgcttgaacccgggaggccaaggttgcagtgaggcaagatggcaccactgcactccaacctgggtgacagagcgagactccgattcaaaaaaaataataataaataaataaacaaataaaataaaataagattccctagaacacaaactgcttacacttgcttcaggaaaattaaccaggaaacaacagatacttcattaaactcctatttgcaggagccatagtcactgcagcccatacagaaaaatcccccaaattcatgattacaatatcgcttactttcataagtgtttgggttttgaaattttattatcataaatgctttatgtgtttacaaaaatccaacctgatttgaactaaacctgtttcccactgtataacccaaataagtgctggggtcccatgtggtacaatctcagtgtgagtccacatcaaagacatataatccagccttcagaagtaattaaaaataattccaatctttacttgaatttctttaaggactttaatggggacccaatttataacccccagccacatttaaaattccctttcttccaattctcttcgctgtacttaaagcctgtaactccctgaaaccgtttttcctcctcattctcaactctcccaaaacaataacgactaaaaaaaattctttactgaatttctaatcaagaagcttggcttttttcctccctcactgtctttccttcctcagcttatctcctctccagagacctgttcacaaatctgtttctgtccccctgtactgattacctctaactgcagaaaccccagggggaaagcagaaagagacagaagatactcatatggtaataagttttgtttccagacacccctaataaggccgtgttatgaaaatggaaacaaaaccattgcattaaaaaacaataagctagattgcagaagaagagggaatgacttgtggaccaacattcaagaggagtcagggagtggggttgacggcatagatgtagctttgacccacccaaagaatggacatatctgaaataggtacaaaggaataatgagaaggtaaaaatgcataaataaactagatatagatatattctggaacaaaagaaagctcttctcttgccatcagggtagaaggatcctagaattaagctttgcttgacacagtgagatttctgtgctgaccagccagggtagattcccgagcctccttctcatctctgtaacatcataaggagtaagcttgcccctcctggcttggaagagatggacagagaagacatttacttaatttgtctcagaggtttcacaccccagcaggaatgctctcccacattttggaaacaaattttggaaatggaattcagagtccctggaaggactattgggatgagcaagtccaaccctccatgctctgtgctttcacgtaatctgatgtattcttcacatcaaacccaggagaaatgcattcttattgtattttttatagaggagaaaacaaagttccataacttgcccaagataatgccattagcaaatggcagggccaggattgagaggactctctgggctctctgaagtggtccaggaagcctgagccttagccaacagccccgcagacatagcctgctcacattggccttgctttatttccaggttcttccaaggacagaagcagatctgccatgctatctcctttattatcatcagcacttccttcccactgaattacttatcaggattttacacgctgtgggctggatttgctcagaaatgactctcaattggagagaactctgctatcgggagttctcctgctcccagggagctgtgccccttgaaggaggcatgtccacctgtcattggttccctgggtgcttgtgggccttcccagtctagagagaaatgaagcagtttccaggtaaggtccccggtgggtttacctgtggctacttccaaactggagacaattaagaaagagattggaacctagaaggagttgacaattcaatcatttcttccttcattaactcagtccagtttggatgaggcacattcaagatgcctccaagcaagctgagaaaaatcagtggcaaaaataactatgtctgttcaaacagggaacttgtagaacagcatggtcccagagaagggtaatgcaagccacagacagaagtgaaattttagtagccaaattttgaaaagtaaaaagaaacaggtgaaattaattttaataacatattatttacagccaaaaataccatttcaacctgtaatcaatactttttgaaatttatttatttatttggttgggagagacagagtctctttttgtccttcaggctggagtgcaatggtgcaatcatggctcgctgcagcctcgacctcctgggttcaagagatcctcctgcctcagcctccttagcagctgggagtgcaggcgcacatcaccacgtccaactaatttttgtattttttatagagactgagtctcgctatgttgcccaggctggtctcaaacttctagactcaagcaatcctcccatcttggccttccaaagtgctgggattacaggtatgagccaccctgcccgacctaaaaattcttaatgggctttttcacgttctgttttcctcagactaagagtctgaaatttgatgtgtattttgcgctcagagcacgtttcagtctggactagtgacatttcaagtctccaaaggcacatgtgactaggggcagcacagggtgcacggtgcaggacgcagggcgcgctctagagtgaaggagtgacgagcaaagggaaggaatgggcaagcgtaggcgaagagaggagggcagcggggggtgcaaaggtactcagtttgccctctgtgagcggggggctgcacccaccttcttctggaaggagccgggattgccgcggcggatggccagcagcgcggtgtagtgcagcgtctcgcgcacggtgaggctgctcagcagggtgtcgctctgcaggagactcgggcgtcagtgtagcctaagcccccggggcgggcgggggggccaggggtgtgggggacgcgcccacctgcaggacgtaggagaagcagtcctggaactgctcccggcgcagcgcccggccgttcacatacacctcccccaggaaggtccccgcgcgccccagcctcccggacatggcgtccagcagcgtggttttcccggagcctgcggggcgacaacagaaggccctagaggaaccactctgtgccggccttggaggagcttcccgagaccctctgtgcaggcatgaccccgcgggccatgagtgctacatgacggaccctgttctaggtgttaaggacacagcaggatacaggccctgccctatggaacgcgcactgtgcgtgcagcagtctcacgcgcaagtgagtctctggattgtcccctgagtgagaggggacatgccatttctctcatctgggtcaagaccgaacgtgctttctctgcttgtttatttgtctttaaaactgttttggattgaaaaacaaaatacttataggtatcagaataagaggaaagccaagactcttggaaacgtttggatcctaggacggatttctttttgtgcccccctggggtggtctggttgtacctggatgtaggtgacattgtctagagccttgctcacaaagcaagcagcatcagcaacccctgagagcttgccagaaatgcagagcctcaagccgcacccaagacctgctgagtcagctctgcttcagtcgagtttgagaagcactggcttggtaagtcctttggtaagaccaagttggccacagcctgcactagagcctggggcatagcctagctggatgtcactaggaagttcccacagaggggttgtggtgaactaactgcctgctggaggtgactgggggatgatgcttcccttggtttgcttttttcttgagtgagactgagtgtcactctgtcacccaggctggagtgcagtggcacaatctcagcacactgcaacctccgcctctcaggttcaagccattctcctgcctcagcctcctgagtagctgggattacaggcatgcaccactacacccggctaattttcgtatttttagtagagatgaggtttcaccatgttggccaggctggtctcgacctcctgacctcaggtgatcctcccgcctcagcctcccaaagtgctgggattacaggcgtgagccactgcttttttctaaggttaaaggttaggtgatgcctttaggacaagaacctgatggcccctcagtcatattggacacaagtttaccataggcccagagttcatggagacagaatagacctcccaggcctttcctatccaaggaggctgagaagttgggactcataacagagaaataggcaggaagttctgaactatctgggaagatagcaagagaaatctactgatgagatggcttgtgcagagccaaagagatcttttgttgaaatattattattattattattattattattattattattgagacgaagtatcgctctgttgcccaggctggagtgcagtggcgcagtctcggctcactgcaacctccacctcccaggttcatgccattatcctgcctcagcttcctgagtagctgggactgcaggcgccggccaccatgcccaactaattttttttgtatttttagtagagatggggtttcactgcattagccaggatggtcacaatctcctgacctcgtgatctgcccgcctcaacctcccaaagtgctgggattacaggcgtgagccaccgggcccagccctttatttatttatttattgagatggagtctcactctattgcccaggctggagtacagtggcaagatctcagctcactgcaaccgctgtctcccaggttcaaacaattatcttgcctcagtctcccgaatagctggaattacaggcgtgtgccaccacacctggctaatttttgtatttttgtagagacggggtttcaccacgttggccaggctggtcttgaactcctgaccacaggtgatccgcccgcctcggcctcccaaggtgctgggattacaggtgtgagcgaccgcacctggcccttgttgaaatattttaaagaaacttgcttgttgctgtgagaggtacaaagatgaatcaactcccttagcagttgtcttcttttctaatgcatcattgacaaaactcagaaatagcccctgcgtgttcaggaggtggacagagtggggaaagagaggaaaacccattataaagaaacaaaatgtgacttcattgggattgtctttcaaaatgtgccctgtaatttcccagtcgtgtggttcttctaaccagagccatcctggctttacattttttggatccaatctgaactctggcagaagctgcaaatatcctgcagcctgggtcccagccccaccacttcatcaaaactggcctccccagggatattaaagccactttattgttgccaaatccagtgtatacttctctgggagggatcccaagacaggactacccaaccaagtcacttccagagttctgatccatagacattctgagagatcatgaatggtgttgttttaagccactaaattttgggatacttttttttttataataatgaatttagttttttaaaaaaatgtgtcaagtatttgttaactcattaatgagggaaccagcaagatgacaaagctcattcaaaagaggatatgagaggctgggcgtggtggctcatgcctgtaatcccagcactttgggaggccaaggcggatggatcataaggttaatgccctaaagggcgataaaactatgacatttgcaactaaataatctgcaaagaagcatctaacccagagtctacgccctcctcaacagcaaataacaattcaaataagttggagttcccctggagttggatggctctgtgcaggcttgctttagactatactctagtgagactttgaacgtatatgtcatcatcttttgcctcgctaatgaagatttgatagataatactgcttgagataagacaccaatgaaattgtcattttatgcaatactatggagtaattcataaaattattttactcctttattcaacaaatatttattaagcacccactacgtgaccgaccctgttctaggtgataaggatacagtagaatacagtccctgcccttgtagaacttgcagcccactgtggattcatttcagtataaagtgtaggcattgtcccaaagccgtaattaggcatctcatcagaaatcagcccactcccccaccccaatcaagagcccctcctgctgtcctgctgtatgtgcatgaaacacaacattggcctttggggtgcacttctgagcattggcctttggggtgcacttctgagatggggggttccatttcttgttgttcttagaagtgggacacacttctgagaagggtgctaaatgccaccttgtttacttctttataaggactgcaacaggtgaaaatttgttaaaggagaagaggcagttttttttctttttaaagaagcacactgtatttatcaaaaggaagctgagaatgaccctggatgttacggtacatgtgtatagctagatgttggttaaaaatggaaataagaactgacaaagtctttgaaaagtgtaacagctttagtcagtgctatagtctcaatgtttatgtctccctaaaattcatatgttgaaatcttcacacccaagattatgatattacgaggtggggcatgcaaggaggtgatattgggagatgattaggttatggagagctcttacaattcagatgaatgcctcagagacccctccccacttctgccatgcaaggttagggtgagaaaatggctgtctaggaggaagtctccctcaccagacactgaatctgttgacccccttgatctcggacttcccagcccctagaactgtgagaaaaaaatttctgctttttataagccacccagtctatggtattttgttgtagcagcctgagtggactgagacagtctgggaattcctcttcttttttttttttaagatggagtctcactgctgcccaggctagagtgcagtggcacaatcttggctcactacaacctccacctcccaggttcaagggattctcctgcctcagcctcccgagtagctgggattacaggcacctgccaccaggcctggctaattttttttttgcatttttagtagagacgggttttgccatgttagccaggctggtctcgaattcctgacctcaagtgatccgcccgcctctgcctcccaaagtgctgggattacaagcatgagccaccgtgcccggcctgggaattcctcttaacaacactactgttggcatctggttgtgcacctgctgtagcaggtgaatagccatggattcaattccctgagtctaaggaggctgaccatgcctacatttggtcatagacttcaatggagtccccatctccattgaagagaataacacaagtagagagtggcagtgaatgtcaacaatttgcaagcaatagctcaatcaagaggcttctgtggagccaatttgtcagaagcttttaaccttaaaatgtagatggtaatccagtgtagcagacactgtggtgtgccacacagaacccctcttcagggccaatgcagccatcccccagctgctgagaacgtcagctgcagaagattcaccacagggaccctcccagggaattgccctcggccacaaggagctgtctcaccaaaggctagactctctggggcaatgactggctgatgcaggggcacaaacaccgactgtaggctcaaatgcagctaccctgggaaagaggaggagaaggatgatgtggagaacgggcagtggatgacctcagtgcaatttgtaatgtttaattccttaaaaaagaaaaagagtctgggaaacatagcaagaacgctgtctctacaaaaaaagataaaaataaaaataaattagccggacatggtggtgtgcacctgtagtcccagctgaggtgggaggatcacttgagctcaggaggttaaggatgcagtgagccaagatcgcaccactgcactccagcctaagtgacagagtgagactctgtctcaaaaaagaaaaaaaaagaaaagaaaaacgaccagataagatctgataaggcccgatgttaatacatgaacttttaaatattattctccagtctttttttttttttttttgagacagggtcttgctctgttgcccaggctagagtgcagtggcactatctcagctcactgaagtcttaatctcctgggctcaagcaatcctcccacctcagcctcccaagtagctgggaccgcagacatgcaccaccatgcctggctaacttttgtatgtttttgtagagatggggtcccactatgttgcttaggttgctctcgaactcctgggctcaagcaatcctctcacctcagcctctcaagctgctgggattacagtcataagccactgtgaccagcctattctctattcttgattgtatgtccaaaatataccatcataaaaaagcaccactggaatcaaagataggggcttaatgggcatttttgtgcttatttaatccttttcctgtctctaggcagtgtacagataggggaaattgtgtttcctgagtacttttatatgccatggaactgtgggggctttttatattttgaaatatgaattcacgtacatgttaggcagaattttatactctttcaaggatctttctaaagatttcacattggtagcagttccattcacagtcagatatcaatagaattcattctaatatcaaacctgtggctttcttgttacaacttaatctgtttcttcaatgtggagtttaactcaagccaaatcctttttagaatcctccttcccaagcttacctgagcttcctaggatgcacatgatctgcccgctctccacgtacaaggagacatctttgaggatctgcctggtccactgctgccggcaagatgtgatgtcccaccagggcctcacgcggtggctttaaaggaaaccccaggaaggcaaaggcagcttggggccctggaaggggccacacccaggtccccagcattgatcctacctgtgccccaccccagtagtctccggacaggctcctaacgtgtttcagtctctgcgccctcctctgtagaacctggcagatagcgactgaggctgtctgccacgtagggagggggcctgtgctggagttgctctgaatgtcctgtccgtttggctgcgaggtggctgtccctgcattctttcaccaggtttcaagactccttgcattcgcagtacccccattcccatccacagagggcaggccgtagacactgggttggcagggcactgctgccactttgtttatgcccaggcccttccctgggcagggggaggggccattcactgtcgctccatgtttcccagcacagcccttctccctctcctctctccacccgatccactaaagagggagcccgaagtgcccagactggcacttaaagagtgaagaaaggcagcagaggggtgagcgccgggccccgcactcctgggggagcagcagcagcaagggctctgccttacctgacgctgtaggaggcatggaggatgcccaggctgtgaggctccggggcggtggcaggagccccctccagggagctctgggagcctctgtttacttggagacccatggaccctccgggggtcaaagatgagaggtcacccatggccaacaggcagcaaagctgggcaaattttctggtggccggaccctccccagagtggcttcagttggggagcccgtggcagactgccctgcctgctccacctgaccccggagtcccttgggacagcaggactgggacttggccacggagaccattatctgatgtacctttagccagcgcgtccttatcttgacagtgggcagaacacacacgtttgtaggtgggcttgccagcaaggaatgctgggagagacgggcccagggcaggaggccgaggtgtccctgctccaggaaacagagtgaagacactggccctggcaggcagcagctgggtctaagagagctgcagcccagggtcacagacctgtgggccccatggccgggaaggcggcagaggagagagggctgccgaaaggggccactccccaggatacctcggtgagtgagcaatgggaagtcggcccaggcctggtgggcgggtaggagaaatcaaacctttctctcttccctcaggagccttctgtcctagcaccacccggacatcaagcagtgtgaggacatggccgcaggactgtttcctgcatgtcaaagggcggaggggaacagattcagggtcccagaggcctctgaggtcacttcctgccctaagaaatgctcttttagggaaatgatgttcttttgtgtgatgtgggacaatttcactttttcttttttcttttcttctctttttttttttttttttttttttttttttttttttttttttgagacggagtctcgctctgttgcccaggctggagtgcagtggcgtgatctcggctcactgcaagctctgcctcctaggttcaagtgattctcctgcctcagcctcccaagtagctgagattacaggcacctgccaccacacctggcaaattttgtattttttagtagagacagtgtttcaccatgttggtcaggctcaaactcctgacctcaggttacccaccctcctcggcctcccaaagtgctgggattacaggcatgagccaccgtgcctggccagtttcgctttttccgaatgagactccatcatagaaatgtgctcacacatgccagggactccactggtgtctcctccatccatgtggctgtcaggttggtctcagtaatgaagtgatgggtgagacagggtgacagacggcttttgtgggaacatcagcatgtgtggctctaacaggcaatcgtaagttctgcgagaaagctggaaggagtagaagcagccaggtggcaggaggtggaggtatgtttccttcctcattttacctgagaagtgtttactcaagaaatagcctttgactgaattcgggatgtggcaggatttgaagcaggaggctaaactggaagacaagcgagaagcagatccccactcccaccacctcaccccatcctacctttccatctttgcctgttgtgggtaggagggaggagagaaagacaagcatgatcgaggattccacacccaatggggaaaacaacctggactggccttgagtttccaggacttgactcggccagacccaaggagcccaccatttctagtcagttctgcaaccaccacatctgaccagctctgctctctgaataccctgtggggcccaccacttcgggaaatgtttaaagcctgaatagaatagaaagtcagcgggactttgggaacacttcctgcctgggagggctgacgattcagccaccacagcttgagaggcaaagaaatgctaggaccacaccagaaatgcacgcaggccctgccatttctgcttcccttctgtccgatcctgtcactccaggtgctgagtgacggtctgcccgtaacacctgtgggtcttggaacaagaggatgagggtcacatttcctatgtctagatatataaaagtcatcagtcaagctataagaacagttaaataaaatagtttctatcctcttatcttgacatatcttcctcacaacctgaaaggccatgtgtaaattgagaaattctaaggcaacttggctagaatgcgctggtacgggggagccacttccagcccgagccacaacctgtcccccttttctggccccctcagctccatcccactccatggggccctcaacaccctggatggtcaccctcctgcctacctgcattgcagccctgccctgcacagacatatacttctctggcctaaaagtcctcaggaggttgggcctgggaagaggtgtacagaccctggggatggacttggggccatttgcacagagaatatctggcatcttgggcacctggagtggcaagtgcccttaacccacaaactcctcatgccatgggcaggagcagcaacagagaaggacaagagaaaccctggcagcaggcagagctgtgtgtgacctaggctgaatgtttcgataaaatttcttcagccaggaacaagtcctgcgtgtcctcttgccaaccctccagccgtgagtgtcagcacatcactccccccggggcataggctcctcatctcagaactagaaacatgtgctctgtgagtttccttcttgcctaggcatctgactcaggaatttgatcagaagttaatacgaggagaaattacaatgtagcccagcatgagcagagctggttacctacaaataaacctgcttttgcttttttgggtgtcacctgtcagaaattcaagtgatgttctgacagtcgtactgattaagatgtcagccgaatagatacttaagtatttgaaaaatacagagagtttgtcaaaacctcaggaagagtctaacaaatccttcctgggagccaaggaaaatattttaaaatggaacagaggtcgtccccaacccaggcacgaattttcttcctccgaaagatgagctgcctgtgcaactcctggaaggcacaatccctcaatggtggttggagtcagggctggcccacacctgccttcccaggccacagtgaaggggcttggggtgagccttggaacaagcaaccaggcacctctccccttcctcttacccagtttctgctctgcctcctctgtctgccagctccctccccttctcaaagcaccacacagtggaacccagttgggctgcaggttacctccacacattgctccagactccaaatgtctgaccttccttcctcagcgcctcctccatgcctaaatccgacctggggatgttttggccagcagaagtaatttctcagctcatttacattgtctaatatccctcctgcagatatttgttttaaaaacaacaacagcaagatgcatgttagcccacatgagtctcttagaaatggataagatttttttttttttgacagagtctcacgctgtggcccaggctggagtgcagaggcacgatctcggctccctgcacctccacctgccggttcaagtgattctcctgcctcaacctcttgagtagggtagctgggactataggggtgtgccaccatgcccggcaatttttttttgtatttttagtagagacagggtttcactgttttggccaagctggtcttgaactcctggcctcaggtgatctgccctcctcagcttcccaaagtgctgggattacaggcatgagccactgcgcacagctggcaatggctaagattttttgatgattcaacaacaacaacaaaaatgggacaatgaagcaatgtgcacagtgacagcggagagggcgagtgaggggcaaggccgaagggctgatctgccaggagtccagcatctgtccgagctgctttcaatctcctcaggagcttggggcacagaccttcttacctcctctccctcaacctccctcctgcttgggggctttggcaactggggttgaggtgggaatggaactctggagttctactcactggcttgctctctcaatttgacaacatattgtgaaatatcgtacacaaatcagcttaaagaactctcatgtacacaccaccaattaccaaaagctttgaagcttgatccccgcactcctactgtgtcccctttctcctttcatctctccccgctccccagagataacccctctcctgaattaggtgtttatctttcccatttttttctgtataattttgggtctttatggtgataattcaaacattaagcaatggaagtcactttcgtctgctgtttttcatactctcccagaactctaagggttccccacagcacgcctgcggcatactgtcaccgaatttctttccctccacctccactgacctggaatgttctttccgagaacttctggcccccatcattgcaggggtactttgacaagaagactgctgtatgttatttgttattttcacgtaaggcataagtcatgttagtttcacctacagcatgtgcgtgcattgtgtacatagtgaaaataaaccctggtcagatgcttgaggtcagcctccctctctgcctggtctgtctcgctccatcgtaatcacctgtctcatctgccaaaatctaagcttttcaacggccttttcattgtcacatcccaaattccaagcctgaagggtgttctgggctccccataagtgtttgttgggtgcatggttgattgaaggaatgtatagtgtgagaatggtagcttgaggaggaaagtctatgggaacttgttaatgaaagtgtacttgttcctgcctgacagaaatgtaagaaaaattgaatgcagtaaaaaatggaggtcagacgaggtggttcacccttgtaatcacagcactttgggatgctgaggtgggtggatcacttgagcccaggagtttgagaccaacatggtgaaaccctgtctctacaaaaaatacaaaaattagctgggtgtggtggggaggctgaggtgggaggattgcttgagcctgagaggttgaggatgcagtgagctgtgatcatgtcactgcactccatcctgggtgatagagcgagacccaatccaaagaaaaagaaatgatgggggacttcctgttgcttctttgtttgggcctcaatggtttaaatgattgaattgtcaaaataggaggaattgagatctgcagatggttaataccattcaaaggtatcagccgacaccatgaaacattgattttttaatgtacattcaaatataccaccacttcgacaataacaacaacatgatgatgatgatgagagggacttcctctcaaagctcccagcagcattttccatcactttgttgcatgaactcttcatcaaaatcagatatgaggagaagtatgccagatgttagtgaggactaagatgttggttagaatttttctcagggtggtatcttcatgaatattgggcattaactctcaacagctgcttccctctcacatgctgcaagtgtcatgtctgtttggcctcaggagatattaagccagctgcagggaagagaaagttaaaggcaaagagtttgcccactccagtcaggtcttctcagagcacagaggtttttttatagaactctctccggtccagagtctgggtctctttaccagaagctgcttggcttcaggctccaccagcctgaggttgaggttctctgggaaggtgccccgggagaagccccaaacctctctctgaagggaagaggagatgggcccttgtcagcactcctattttcccaaagccctgaggttccacctgtgcaatcccatctgttgccaatttgagatttaaccacgtcggctctaagaagttgctctcacctgttggtttccttcttgtcttctcctatgttctcagcagcttctaaaggagcccctcatctctcctgtctcccacagggcctccaggatagattgttctcctctgaaagtgacaacagcctgtacttcacctacagtggccagcccaacaccctggaggtcagagacctcaactaccaggtagaggcacgcctgggttcaaggggagaggagcaggcagggacagccaggaaattccccgggtggaaataaaagggtgggcccaacttgcaggccctctgcccgcaaggacagagtccagtccacattgatgcctcacgtgtcaggtgcaataggtgtcatcaatggcatatatcagagctggaggttgagaggcttgaaaagagaataaaactgttgtataaacataaaacaaaatgcgtgaacctatagaaaaatgtctctgggactctttttaaactatattttgaaataactttagattttggaaaaaattgcaaaaataacacagtgtttccatatacccattgtccagcttcccctaatgttaacatcttgcatacccatagtataattatgaacactaagaaatgaacaatgtacaatgctattaactacagactttattcagatttcattagttatatatatatgtgtgtgtgtgtgtgtgtatatatatatatatatatataattttttttttgtaaaatgtactatccctggagcttataaaacatccagagtgcaaagacaatgactgacctttcagaggcacccaggaaccccctggtcagattcaaggatccatattcccacagctccccagggacccagatgggacatggtggggtctgggatggtgaacttcagaggcctgagtctggcttcctgtgggtgtgagttgggacaagccaatgagcctttctctgctctgccacttaccagctgtgtgaccttgagcaagttgcttaactgccctgagcctcatctgtaaaacaaggattctgagcatatctatgttatagatttgcagtgaggattgaataaggtgatggatgttaagtgattaacacaatgtcttgcacatagtaaacatctgataaattattagtaaattactagtatcaagtgaagacattttgcttcgtgttttatttttatttctgtaccactattgcacatgattttcttttttccttacttttttttttgagatggagtctcattctgtcacccaggctgggatgcagtggtgcaatcttggctgactgcaatctctgcctcccaaattcaagtgattctcctgcctcagcctcccaagtagctgggattacaggcaaccaccaccatgcctggctaatttttgtatttttagtagaggcggggttttaccatgttggccaggctggtctcaaactcctgacctcaggtgatccacctgcctcagccttccaaagtgctgagattacaggcatgagccaccatgcctggcctgtacatgcttttcattcttcttatcttcagacctagaaacagcagctacaggttctcagcatgggtcctgcttccgtgtttggtagaacctgggttggggcctattgtgtgtaggtgaggacatatcctctgtggagaggggccacctggggaacgaagatgctgaacagaagttgctgaagccctctgaaccattcagctctctaaggaaccttctgatatctccccacaggtggacctggcctctcaggtcccttggtttgagcagctggctcagttcaagatgccctggacatctcccagctgccagaattcttgtgagctgggcatccagaacctaagcttcaaagtgagaagtgggcagatgctggccatcatagggagctcaggtaccggaaaggcaaatcgctgggcaatggtttctctcctgggatacagaatggtcctttggacaaatggatgcttcttatggagctctttgctgactagtagaataatacagcagaatggctgagaacacaggttctgggtcagacagacctgggctcaaatcctggctcctccatttgctggcttgagggtaggtgctgttgttaagagtcatgagtgcgcctcttgtccacccgaggctgtggccagagcatctgactttggctaacacctggacggagagatcagcaaacagctccagcatgtaatgttcttttcagactcctccagccatgaggggcattggttcaggttgttcctccacaatcacattctgattatggccagacagcccctgccacactctcacctctcagacagcctctccagtgtcttacttagcacaactttcactcatctgcaaagagccaggttcttggagtgcctcaaattgtcatttccatggccaaatttaaaatgagagaatgtctgagctgaaagggggcttggggaacagaggtcattctcatcatgttccacctttctttctccctaccagtttggaagcattttcagaggaaggtgttcaaactccctactcctcagtgtgtctagagtatcctcctgcacgcgcgcgtgcacacacacacacacacacacacacacacacacactcccctccatttgacagatgaggagactcaaatccaaagaaattgagggattctcgtaaggacacatatttaatgcagagctagaactagaactttggtttcatcattctcggatcaagacatttctccctgggacacccttacatagtgctggagagagcattttatatcttttaattaatcatttccagaggtagagattactcaattttttaaacattctgctccaaacttttacacccgtctggtagataagttctgtttaccgtataaccaaagatcaaatgaaatcttatgtataaatgcactttgtaactgaaacagcatcacagtcatgaagtccctctcactctgtccctgtccctgcaatcctgacctaaataagaaaaaagtagatcccggccaggcacagtggctcatacctgtaatcctagcactttgggaggccgaggcgggcagatcacgaggtcaggagatcgagaccgtcctggctatcacggtgaaaccccgtctctactaaaaatacaaaaaattagctgggtgtcgtggtgggtgcctgtagtcccagctacttgggaggttgaggcaggagaatggcgtgaacctgggaggtggagcttgcagtgagtcgagatcgcgccactgcactccagcctgggcaacagagcacgatcccgtctcttagaaaggaatgaataaattacactgaatagtctcctgttttgttttttttgttgttgttgttttgtttttttgaggcagtctctctctgttgcctaggctggattgcagtggtgtgatctcggctcactgcaacccgctcctcctgggttcaagcgagtctcatgtctcagcctcccaagtagctgggattacaggtgggtgccactatgcctggctcatttttttttgtattttttgtagagatatggttttgccatggtggccaggctgatctccaactcctggcctcaggtgatctgcttgccttggcctctcaaagtgctgggattacaggcatgagtcactgcaccgagcatctcctggttgtttatagattcagtgttgtttggcttcaggtttacttgcctgtgtaaaaaaaacaaaaacaaaaaacaaaacaacaacaaacaactttagacaaataaatagtagagttgtctgagcaaatagtgattaatgaatctggcagcactcaaaaacaggaccagttcagaggctcccccaagcaatttggtcaggcagtatttatagacagaaaaaggaagtgccctacagaaatagctgattggttacagttgggtgttcaccttatttatttgagggtgatgtgatcaggtgttgggtatggacaggagctcatcagtcggtagcctgtgattggctgatgcttggctgccatgattggctgagactcagcaacttgtctcagccagtctctgtcttaagagaatatactgctaagataagttgcagtttgtttacatactaagtttgcttgcagtttgctctgtgggaactcaaagtatgcaggcagcctcaggccaaatttagtttaactgagcagctgaaattattaaaatgatttattagaaaggttcatcaactacacttcctgtgacttttactgccatccccctctccccctgcccaacatacacacaaaagaacgctggccataatttttaaaatacaaagaaaacagccaggctgggcacggtggctcatgcctgtaatcccagcactttgggaggctgaggcaagtggatcacctgaggtcaggagttcgagaccagcctggccaacatggtgaaaccctgtctctactaaaaaaaaaatacaaaaaattagctgggcgtggtggcacgtgcctgtaatcccagctacttgggaggctgatgtgggagaatcgcttgaaccctggaggtggaggttgcagtgagctgagattgcaccattgcactccagcctgggcagcaagagcaaaacactgtctaaaaaaaaaaaaaaaaaaaaaaaaaggaaaagaaaagaaagcagccctaggcattttagtttcttttatactctcagcaatgccaaaagtggtttccaattgatgagtttattgatttggagattccagccattgaataagggtcttgaatgccagtgggtgttttgtcttagttcatggaaggtgtattagtccgttttcacactgctctaaagaactacctgagactgggtaacttataaagaaaagaggtttaattgactcagagttcctcatggctggggaggcctcaggaaacttacaatcatggtggaaggcaaaggggaagcaaggtacatcttacatggtggcaggagagaagaatgaggggaggaactgccaaaaacttttaaaccataagagtgtaaactttttaaactcactcactatcatgagaacagcatagaggaaatctacctttatgatccaatcacctcccaccagatccctccctcgacacgtggggattacaatttcggatgagattcgggtggggacacagagccaaaccatatcagagagtctccccagatgccacaggcatcctccattggaaggctccccaccgctctcacaaagttttgctcagaaaacgtggccttcctgctttctgagtgggaatccgtggtccctgtgaatgttggtgaagtcctctgtgtccctggagcctggctctgaagcttctctcccaggtttctctcctggctattttgttccactcatgttctcagggatcttaaatgaggtacacccagaggtggtgcacaggccccttctaccctgagagcctctgcacagtaaccagaaagatcatgtgaagaagcttcttggtttttggagatcaaaactccatctggggccgggcacggtggctcacgtctgtcatcccagcactttgggaggccgaggcaggcggatcacctgaggtcaggggttcgagaccagcctggccaacatggtgaaaccccgtcgctgctaaaaatacaaaaattagctgggtgtggtggcgggtgtggtggcaggcatggtggcaggtgcctgtaatcccagctactcaggaggctgaggcaggggaatctcttgaacctggatggtagaggctgcagtgctccagcctgggccacagagggagaccccatctccaaaacaaacaagcaaacaagcagaaaacactccatctgcgggagtggaaagagctcattcctagctccacggtaggaagatgttctgagcctgagcccaatccgcattcatagcttgaacagctgtcacagacagaggctcaccgaaagtttttggaaactggatccaatctgatgcttactttctcaaatcaataataattagtacatcattcagaagagggtgctgttaacttgagtgcaatgaatctttttttaacttttattttaggtttggggatgcacaagtaggtttgttatataggtaaactagtgtcacggggttttgttgtacagattatttaatcacccaggtagtaagctttgtacccaagtgttttttcctgctctccctcctcccatcctccaccctcagttaggtgaatccttttttaaaaaagagtattaaaaataccactgatgcactttgggaggcccaggcgggtagatcacctgaggtcaggagttcaagaccagcctcgccaacatggcgaaaccctgtctctactaaaaatacaaaaattagccgggcatggtagcgcctgtaatcccagctactcaggaggctgaggcaggga

SEQ ID NO: 15 - DNA, 48690 bp, Mus musculus
ggtcagagcagaaaggcagagacctggtccttggctctggctgatctgaccacatatgcagatgccttgagagggccacagatcagaaagtaggcaacagcaggggccccaccacaccccacccatcccaccccactcccatcccatcactacagagatttctacagtgggcaggtaccttcagagccagatatgtcattacaggtagatgctggctctaatttcaagtggccagggtgctgggcaccagccacatccagtgctcactgcctatgctaagctttgccccaggagaggctagggcagcccacctaactggagaccaggttactgggggaatctgagaagatgccacaccctgcatgtgccagtcccatcatgcagctgagaatgggctctgccctccctccaacgccccctcagtgacagaaagcgccaggcccagcagttgcagcccgggcagtgctacctcctggagactccaggaccgtgcatggctcggctgtcctctccatcgctttccctcatctgtatgcattgcacaatacaagagaagaggttcgagggagggagggagggaggaagggagggagggagggagggagggaggggctatggaccccataggctccccctgtgcaggctgtagctcaaatgttacatttgctgggtgccctgtgtcccacacaagcagctcctgcaccccatattagtgacagccacctgccttgggtctggtagacaaggactctacccctactccctccaaaggaagacagaaaagaagtctttgtttctgccatggttacttggtttggggcagccctctcaggctcattcatacttccccttgtagccagattggcgaatgtcctctgaccccttatctgaggacactgaccaaagtgtgacacatggaagtcaggatgtcaacctgagcatgaaaggtggcttgtatgggagttcactgagggcatgagttcaaagggcagggaaaggagccaggagcttttcctcctgggacagccaaggatgctggggtgacagtgtgggtggaatggaccagagtcaaggctgagagccaggctcaccaacgggagccctgggcctgttcccacagttgctctagaacacagtaaggcagggatgaggttcctcagctcatctacaaaaacagacctgaccttggcttgatagagaccatggaggttagcacttggctatcctaggaagcttctggggttcctggtcacctagaggaccggctattgcttctgctttcctaggttccagtacactggccacttgttcagcatctggtctactcttcagcactcttgatgggtgtttcatatgcaggtgtcctgaaaagaccactgttccccatgaatgaagtggttcacggtgttcttcatgaaagagtgagtacctgggacaccaccccccccccaaaaaaagctaaggcagtgacctacctatccagcaatctatattaagagactcattggccctgtcctgggccctctacctatgctacctgcctctgaggagcacaaaggcacacacacacgcgcacacacacacacacacacacacacacacacacacacacactcttacagccttcataaagaccacacatggatccaagatctcctggattacgtacctgctcacccatctgcagtcttctaccccttcctgtcctgtccagaagactgcagtactagtgccttgcattcgaccctggcaaactgaccagtttcccgttttgcatgctaccagttggtcctagctcgatctctcatctgggcatgcataacagggacccccctagatctttccagtaaggattttgtgcttgtttttgttttcttttgtttggagggggcgtcagcaaatgtctgtgcaccaggttccaggtccttgcctttaccactcaccgtagaagtccgcagggttgctatagcgaggacaagggtggccaatggatgtgaagtactgcaccatttgctgcgccgcccccaggtagataggggtgccagatgtcatcagaaggaccaggtcaaatagcctgaagatgtcagagcgaggctggtggagggagatgagcaccagcctgttgcccttggccaggcgggacaaggttgtcaccagattgtgggctgtgaagctgtcgaggccagaagtgggttcatccagaatgaggattcctggggatattgcacagggagtccaatgaccacgctgccgctgccggacaggttgtaggctcaggttttcacccctcaggttcccaggcctcacctgggttccacaggagctgcaccccaatgctcactcgtcggcgctcacccccggacaccccacgtacatacgtgttgcccactctggtgttggcgcactgccgcagccgcagctcggcgattacgtcttccacctgaggacaggcggagcgttaagggcatccaggggctgcacaaactctttcacttaatgcaaaggaaggcttctgcagtatattttccagcagcattgtttggcgacccccactctgctccctccgccccccctgccccccccccccgtgtccccaggttctgagcagattcgccctgaagagcacacattgtggactgggaatcagaccagataattggctccccactcacacgaagcaccaggaaaaccttacacaaacaaacacacacacttatcacccacttgacaaggtgggggcggggggcgcgggcggggaagggaacccctggggctaagcgcattggcttgtagggtgggttggtttaactacccagctagactgggtcttctggcaaaccaaggaattctcagacaccagggacaccaaccagccaactggttacccgtttgtcacgctgggcctgggagaaggtcctgggcaggcgcatctgggcaatgaaagccagggtctctctgacggtcaggttgggcagcagttggtcatgctgccgcacatgcgcaacgcacttcctcaccagctgaggcgtactgggttgcccatttatccaaatttgtcctgatttcatcttgccaccgtggcctctgcctgtgatcacgtcgagtagtgaggctctcccgcagcctgcaaatccagagatatccctgagggcagagtttctgccgggcttgcccccaactacttcctccttccctgcccactcgcgaagcgccggaactgctcttcagaagccaccaaattccagggaaaccaacactgttcttagatttgggtgggacagtccagcaggtgcacggtccggctttttttcctaaggccatcttgagtgattggggacacactgataaagaggtttcagataggagacgctgtagtccttactgctacaagcctgctgctgtccctctcccaccactaaccaacggctttctcccaagttggtgctaattacactacaaagtgtagtagctatttctttggctgaaaacacttggccagcgtctcattcatcattgggctcggaagtggctttgtgggaatgactaatttggagcattcatagtctgtctttgaagaactcagaactacaatttagctatttggtggtgacactagcctttaatcccagccagcattcaggaggcagaggtagggggaacctttgagttggaggccagcgtggtctacagagtgagttccaggatggcaagggctacaaagaaaaaccctatctcaaaaaacaaacaaacaaacaaacaaacaaaccaaaccaaccaaccaaccaaaacgaaccaaccaaaaacaaaacaaaacccaaacccaaaaaaaacaaaccaaccaaacaaaaaaaaacttaaaacctattttgagaaaaataattggcttccaaatatctatacccttctctcatttttaaaatcagtgtctttttttcttctgccttgcaaacaaggattatcccgttatccactcctgaacaccaattcatgcctatcgatgcagagaagcgagcattgaatctcctttccaaaagcacgcctgtaatgaatattttttttgttgttttgtgacagggtctcactacccaaccctggctgccctggaactcaccatatagaccaggctggctcacatgcaactgaggttgccctgtcccctgtccctgtctcccaagtactgggattaaaggtgggcaccaccatacctggctcacctataaccagtttaactgtggatgtgaacccgcctcatgcttggagaacaccctcccgtgttccaagatggagacaaaagtctgtttgagtctcccagcaaggtgttggtttcccactctgtagggtttgtggaattaatagcttttttcccccttttgtaaacaaggcaaatgcctatagacagtctgtgacaaattctccttgctatatgtcacatgctgcctgccatgtccacaaacccaaggaccttcatatataatccccttgtttacaatccagggctgcctgctaggcatgagagagagagagacagagagagacctcagccctgtgcctgttcggcctcagacactgactttgcgagtgctggaaactgtgccagccctacaggcaccaggcatccccagtcagagggcagggagatcacatttcctaaacaaaactgtggccaaaagctagaggcagactgcctagcaaagagcgcctggtgcatttgggcaaatgctctctgaagagccatggcacccaagagccttgcaatgtggccaccgtctcctcaccaggaatttcattagcttcgaaatccttgtgtatggccgattctacagaacaagctaaatgcttggagcagatgttttagaataattttttaaattattataatggctactatgcatattcatattctccctgtgtgatagtatttaaaggaatcaacatcacaggacgtatgatgactaaatctctctaaaaaagcttcaaaattttcagtcaagtaatcttgaagccaagcaaagctaagcccgaacctgggcgttagtcagtgtagaccctgctctgcctctcggaacttcactctcttaaaagtcggggtgctgctggccagggggccggatggatacttattcaacagtattcggcatcatggctgaggaatggttcctaggtctccggggtgcccagaaaagacagatccaacaagacaagctatcagacattattagtccaaatatcctttgcctgtttagatcagcatcacggggtcagggccagggactgaatgagtatgcatgttgtttcagttacaaagtacgtttacattttgtagcttatttgctctttggttagacagtaaacaagtctatcagaagagtgtaaaagtttggaacagatgttcaaagtgttgggcaattttcccttctggaaatgattaactaaaaagtataaagttctctaatcttgcataaaggaatcccgggattcataatgagatgtcagtgtaagatctgcgctaggtaaattcctgcccttaggagtctcactcaactcttttggagttagtgttctcacctgtcaagtgtgtgtgtgcatgttctcacaaagaacgttctagaaatatggaggactagataaatgatttaaaaatcttctccctaaaatgcttccagacaggaagggtatgaggtagggtccaatatgggaaaccaaccccgttctccaagcccctctcatctgcaaggttctgtaatttcagatttgacctgtgacagcgactgcctgagacacttcaaggatctacctcttggcaggcggttgaaggttatgctaggactgtgaagggggcagtggcagctcggccctgccgagtcattgtctgaccatgacctgacttgggttgagcaggcacccgtggttgggggaagtctctgaaaagaacgtcacgttctaaagctgcttgtgtatcgtcttagtccagtgtgaactgtaggcacgcacgatagccaaagctgcaggtggactagactctcactcaggggcacaacaacagcaacatctaagagttggtgggtgagggagggggcatttgaacccaggtctatctgactgagaacctgtgctctaagccattttaccatattactttcttagtccagggttctgcatgcaagattcatggctgaaggctgttctgaatcgtaggggagaaaagccattgtcccctgacagcctctgttggtacctgagctccctatgatggccagcatctgtccactcctcactttgaagcttagatttcggatgcccagctcacaggagtcttggctgctatgagacctccagggtatcttgaactgagccagctgctcaaaccaaggcacctgagaggcgatgtccacctgtggggagaggttagcgagcccttgggaaactgaaccattcagagggcttcagcagcgtctactgcattttgtataactcctctcacaggagacaccccgatcgatactgatgcataagagatcttgaggcatcccacaccacagtcctaccaaacatggcagcgagaccccaccatcctgttcaagtctagagctgagagggtgggtggccagaaagcatgtgaaatatcaggaaaaaaaaaagccagcaagtgtttaccagctgcaagccattacaataatcacgttatatcattatccatctactgttcattgcaagcatatggtgtgggtactattgtctgttttactgagcagttcaaagcagttaaggaattctctcaagcttatactgtttacagtgcgtggcagagcagagagaggttacaaagcggctcgttcctttgtttagactcagaggcacaagaaggctggcttgggactctgaagttcaccatcccacttgggcagcatgtggtctgcccctggggaaatggggaatggggaatcattgcattctgacaaaggcattctgggggcccttcctgggtgccttcacattctacatgttttatgggcaatgggacaacatattttataaaaaatagaccataagtaggtacataaatagatagatagatagatagatagatagatgatagacagataggtagatagatgatagatagatagatgatagatagatagatagatagatagatagatgatagatggatgctagataatagatagatggtagatggatggatagatagatgttagatgatatatagatgatagatggatgaatagatgttagataatagatgatagatggatgcatagatagatgttagataatagatgatagatggatgcatagatgttagatagatgacagatagatgataatagatctaagtgaatgaaatctcaacaaactgtcatttacttaagagcatattgttaatttcctagttttgataattactatgtagtttgcaagatgtggacttcaagggaagccaggcaaaaagtgtgtctccacaaacactgtgtgtttgctatgtgtgttttctacaggtatgtacatgcacatttgtgtgtgaatgcaccttgcacatgtgtgttgagagcccagcggtaaatggcactttctactttacttttgagacctggtctcttgctgaacctgtaactcacagattcggccaggctgaatgacatgaaggatcctctagactctaggatcacagacttgtgccacccaggccagattgtcttctgtgggttctggaaatctgagctcaggcactttactgagtgagctgtctccccagcccctttgatatctgtcatctaatacagatatataatacgttcatatatgtcatacattgtatagctacatcatatgtatgtatatataaacacatatattttatgtatatgatatatatataatattacaaacataaaaatatatgtgcataaatgtacacacactatatctatatctagagaaggatttcaaattttaaagttatgagtaccgacatccccacaggccttcacagtgaacactagcatcctcacgaggggttctacccttttccaaacctctagctgcagatagggcttgcgcccaggacagtctgaacttcacccttgggattagagaacctacagagtgggctcacccttccttctcctgaacattttgttagctgcccacccttctcccctgaacccaggcacgtgcccctacctggtaggtgagatctctgacctccagagtgttggactgaccactgtaggtgaagtacagactgttgtcactttccgaggagaacaagctgtcctggaggccctgctgggagacatgtagtcaatgtgtaagggtcacatgcagagagcgccttccccggttctcatttctttgtgttggaaaccatcagattcttctctccgggtcttttgctttgaaagtaaaatttttattttattttgtgtgtatgactgtttgcctgcatgcatgtgcgtgcgccacacacatacctggcaccctcagaggtcaaaagaggtcactgggtcctctggacctggagttatgggtggttgtgaaccatctgtgtgtgatgggaatggggtccaggtattctcaggtgcttttaatgtttgagcatcaccccagctccattctctgatctttactaaaaaataataatagcaatggcttaaactatggtcaccccgctgtgcttcagaacactagaatttatgtctcccatctcattttgatgcccaggatctgactgccaaccatcccctaccctgtaatataattcatctctctgaagtaggaatatattggagatatcttttggggtgtgtgtgtgtgtgtgtgtgtgtgtgtgtgtgtgtgttggggaatcaaatccatagcatcaaatatactaggccaatcatgatactgacagaaccatagcaacacatccggggtccctggggtttcttgttttcaaatcaattatctttaggagagatcttagttacttgcatgggctaggaatttgttcctagacacttgtactgatacaaagtttcttccattggcttcaggagtggaggggctactgagggaggaaagctctcaggttactgcgctaatgtgaagacctgggggggggggggttagacagacagagaggacagagtggaagacagggatgcagttgattagtgcccaggtcgccactctgactcactcaaacccactgaccccgtccacacggagagtctgggtttccaggagcctcacagtcaactcagcttctgaaaggaaaaaaaaaatatatcctgtctggcttgtggatgacttctgttccattttaaaatattttccttggcacccaggaaggattcctgaggttttgacaaattctctctatttttcaaacccttaaatatctattcggctgacacattaatcagcacgactgtcagaacatcatttgaatctgtgacaggtgacaccctaaaaaagtgaaagcgggtttatttgtaggtaactagtgtggctcctgctgggctacaatgtaacgtctccttgtattaacttctggttacattcctgagtcagaagcacagacacatgggaaaatccagagggcacaaaaagggagaaatgtgcagaaaacagtggtgcctggtggggacatatatggtaagtctttggcccaaggcacatacctggccctctgttgacccctgcagacaccatctcatctgcctctgcttagagtccaggctttcctatccctgtctgcagtgcgaggagctgtagaccatgggtcctggcgccctggtactcagtgccagaattccctgtgagatagccctgatctcctccctccttccaggccatcactgagtatgggtagtgccggtctctgtgaagacctgactcgaatatgagtagaaagacggtgtggccgctatgtgagttctttgtagagtgagatgctgggtgggcagaggaggagatggatggccacggcatggagcagaagccagccagctccgcaagaaatgctcagttttctaaatttgcatacagagatgagaggctggaaaccactgggcagtttttagcttgactgacagcttttaagaacggaggcacagggcatatcagtgtcattgtctcccccccaccccaagccctgcagttgtcagtggcgggccatcacagggcacctacaacagtgggacctcacagaaggaacttgtaggtggcaggacctaggcacacttttgaatatagaattctgacagctcattgcctttttagctgtaatctgaagggcaaaagcccccacacccaccactgattttatatcctactcaggaagggagcatcaaagacgtagaaggagttatttccccatagacgtctgcctcatggggattctgacagcagagttgcctgttgctgtggtagtaggattggtcaatctcaggcaatcctgtctcccctagaacaggggactgaggcgtccctgttgaatgtggccatcctgttctggtctttgtctccagaaaagtgggccgggtgtagaagctggggggagggggaggtcgtctttgctctgtcttcccatactgccttctgcttcaaatcctgcccacaactcgagtcaaaggccatttatcaagcaaatgtttctccggttaatgaggaaggaggcctaggagctccacttcctggccacctcgctgctctctgtccactctgcctccctcccagaccataagactgcaagcacacaattctgacgctcccaaacaagcgatcactatcacagccagtgtatttgtaaactgcctgaaaccaatgtgtagccatagaaatattttcttgtaataagagaaaaaaataaatcgtgggctgggggaatggctcagttgtagaacacttggttcaacctcctgttacacacaggggggggggagaagtgggggggcagaggaggaggaaggaagaaggaagagggaagaggagaaagaggaaagtggccctcagagggatttatgacctgacttcccagccgtgagccctgccctttcagtgaggtttctctaagcagagcctcaactctacaaggtagcgagatgcctcaacccctccttggcatttgttcctgacacctgccctttctctctgtctctctgtctattggtctgtctgtccctgcagcttctcagcctcacacagagacctttaggcttccccctggccttctctttcctctggttctcaccaaacaatgccaaggactaacttactacataagtatggcaagcgtagcgatctgttgttacctccccgctgtctcttgactaccactgagattcttggtctgacagtcacatgggtcaacgctctgtgatggaatgtcatttggaaaacatcaatcccggtcattcacaggagcgtgctgtcgtggggaagtgacctcagaggtctcctggctcctgagactgttcccctcagaccatcaacactgaggagacagggccctgccgccccatttccattctacttgaagtccaggtggtacattaggactaatcctgtggtaggaaagaaaagtcagtctgacactgcctcccccctggcagagctcactcaccgaagcatcctgaagtacagtcccattccacagctgggtctcttctttggttttctcagccatgaccagtgctgtttgtgccctttgtgtggcctcccctgctgttgggctctctctgtctttgctccttagagctggggcacctgagccctcctctgtgccagcctttctcccagcattcctctctggcaaacactcctataaacacaccgtgtgttctgcctattgtcgagataaggacactctggctaaaggtacatcagataatggcatcgttggccaaattggtgaactgttatctcacgaggattccagggctgggtaggatcggacagggcactcccattggctcctcagttaaagctgccctggagccggacaggccactagaaaattcacttgcatttgcttcctgctagccatgggtgagctgccctttctgagtccagagggagccagagggcctcacatcaacagagggtctctgagctccctggagcaaggttcggtcacgggcacagaggctcggcacagcttaggtgtcctgcatgtgtcctacagcgtcaggtaaggggacctccacagcaaaaagctaggctctctgattgccttttctgaatgggtgggtgggcctgtgggctttgggttgtctgtccagcagatcagggtgaaagtggacagtctgtaacaacagtgagtcgttcctcctcctcctcctgcgcagggcagagcctggacattaaaacatgccctgcctgaagccgcttgctgcttctcactgatttctgctctccccttccttgactcgcccaccacctgtcctgtgtagatggagaaggctcggagagtgggggtgctgggggcacaaaatggaatgaacactgctgaaggaatgcagggttcacttcaagaagaaagcagtgtgcaggtgtaccatctcccagtcagagacccagtaatcagagcagctaatgggaggcatgctccttgggtggtggccaacttgtcattatacctccaaggacaacagagtggtacataaggctaaaacagagttgtcaacctgtccaggggcaactgggatggggtagggctgggagcaggggtctggcaccttccaggaccctactctgcctttgcccttgtgggatttcctttaaagcaaccgtgtcgggccttggtggaacatcaaatcatgccagcagaagtgggacaggcaaatcctcaaagatgtctccttgtacatcgagagtggccagattatgtgcatcttaggcagctcaggtaagtgcctgggggggccggggctcctgtacttctaaggcaggctctgggaggctttggctctgtctaagcacaatgtttaagaagtaagtttaagttgtagagaggcagccatgcatttggcatttgaatacaatctggtgacttgtctggctgccaatagaacctagtaccaaagtgaaatcttgaggaaaatccctggaaagagtggaaagtcctgcctaacacgtaagtgccttctttgcttgtttgattgactgtgatgctagagagcaaacccagagccttgggcatgctcagtaaaccttctgccccagcaccccagccccaaatgtatttccctcccttcctccttcccttcctttcccttcctcccttctctccctttttttctttcttccttctatatttctttcttttctttccttcctttcttcctttcttcctttcttttcttttgtttctttgtttctttctttctttcttccttactttctttctcactttgcattctgctcactgaccttctcctggccacccctcctgattgtttgattgactgtggtgcagggaggcctaggagagctaagagcccaggtcagttgactctgttggtcttcctgtggagttccttcgaaggcccccaattctactttcaactgatattcccacatctggaaagtttttgtcaaggagttgttaggcaggacttaacttctattcctgaccctacttgtcttttcattatgatggtcatcagacacacagttgagaacagataccactaaaaaagacctcatgttaatatagtctcaccgagcacaccaagcacaccaggctttctttgggcctctctcttcaggagttaagcatcacacacactgcgctgagcccacctgtgtgtattccccgtgtctcactattctttccaggtgagattttaacctttgaatgtgacttccatgtttgttttgtgttcttccactaactgtcattatcctctgaggggtttcctcctctgcccctgcaaaacctatagctgtaaattttcctatctgcagcagctggggaggggtacactggcccagaagaggggctctgggtagcatgccgcagtgttcgcaacactgggttattctgaatgcctctgcttaaggattctggcatattcgactcacagaccgttcttgactgagcagccccttgtaaactgtcagcatttaactgtccccttgccttgtgctctcttagaaacaggcagtgtaaggctgtggggagagtcaggtatgacactgttgggtgtagctgagagtgagtcccaaagctctgtgacaggagcttgtccttcctgtggaaatgagaggcctggtgctctagggaggatgaagggccacggggtgtagccctctgaatgtagctcatgcagtgtccaaagtggttctcaccagagaaagttgctatgaaagaagggctgacacgtgggtccctctggcttctgtctcatcatgccgcagctcggaacctgttgactcacaatgacacctaccgtggtgccatgcagccagaaggccagacacatgaggctagcccatttgaatgttaagtctccaagactgtgggtcaacacacacagaccacacacacaccacagacacacacacacacacagatagacagactgatagacacacacagatagacagatatacacacacacacagatacacaaactgacacacactgagatagacagactaacagacacatacacagatagagacagacagacagacagacacacacacacacacacacatactctctcttctatgatttctctgccttgagcgtctagtctcgggagttttcctatagcaatacaaaacagatttctagcctcagattaaatccatgagcattcatccaagcacagctatatgacaatagatgaagaataaatgaaataataacagcaacagttaatttgctaattagtctaattaggttactgtaagaaaagaatcatggtggaaagaatcactaggtgacttatgagcaagagtgtggattcctcagacttcaagagactgacagccaagaccaaaggcctgacagagctgtctgtggtgagggctgggtactagctgtttgtcaatgtgggcaaaacacttggcataaatggtttaaagaaggagagatgtgttttggctcacgctttctaagagttcagcccatcacagtgagaggcaagcaggacgcttatatcatgatggatgataagctgagagaggagtcaggaagggtgggaacaagatacaccagaggaacacccctgaggagcacccctgaggagcactacagtgatctacttcttccagctagtcaccccctcctaaagttccccaggagcaccccctaggagcacccctgaggagcactacagtgatctacttcttccagctagtcaccccctcctaaagttcccagaatctccacaagtagtaccagcaactggggatctaggaggctgagggtggggggtgaggggggtggggggcattttatattcaagttacagcagctggcttttccagaagtggtattttctagctctaatctcaaataatggaagggttgtgggatttctcccaagtctcttacatttttagttaattaattaaattactttgtgtgtgtatatgtgcaggggcttgtgtttgtgaaggcctgcaatcaacctaggtgtcttttttgtgcttgtattttgtttgtgggtagatgtgtgtgtgtgtgtgtgtgtgtggttttttgttttgtttcctttcctcttctttctttctttctttctttctttctttctttctttctttctttctttctttctctctttctttctctctctctctctttctctctctctttctttctttctttctttctttctttctttctttctttctttctttctttctttccagccctggctggtctggaagttgctatgtagacccaacctgctctcaaactcagagctctgcctgtttctgcctccagatttctgggcttaaagttatgtgccaccactattggcttcccatcttgttttctgagacaaggtctatgagttagttctacctggaacttactgattcgtcgaggctgctgggaagccagcgagccctagagaccctcctgtttctgcctctgtggtgccaggattacaagtgtcactatgctggctttgtttactggggttttaacgctcatcttcacgcttggacaatgaacagttttccaactgaaccatcttcctgaccctcaggctctttcctaagtacactaactccagttgtgagggcaatgtcttatcagcttccaatatacttcgtaattctgcttcagtcaccttgtgtgtgactaaggatctacctcctacgctgccagacttatgtagtaagttagtccttggcgttgtttggtgagaaccagaggaaagagaaggctagggggaagcctaaaggtctctgtgtgaggctgagaagctgcagggacagacagaccaacagacagagagacagagagaaagggcaggtgtcaggaacaaatgccaaggaggggttgaggcatctcgctaccttgtagagttgaggctctgcttagagaaacctcactgaaagggcagggctcacggctgggaaatcaggtcataaatccctctgagggccactttcctctttctcctcttccttcttccttcttccttcctctgctcccctcctctccccccacctctctgtgtgtaacaggaggttgaaccaagtgttctacaactgagccattcccccagcccacgatttatttttctcttattacaagaaaatatttctatgcctacacgttggtttcaggcagtttacaaatacactgactgtgataatgagccttttctgcagtgaggcagttgagctaacacccataaatacaggtggggagacgacaactgctaaagtttctccacatgaactacactcttaatgtcactggaaaacaattgcaaacagcctccacaatatgcgtgggcagaagagccacggagtgagtctcgtgaacagcgaagtgtaataaacagcgtattatcaacatttacaggttacaaaccaccactgaagacatctggaagcccattcctttaaaggaggctcttgttcccctttctgctccacactgcccgaacatgcgtgctaactccgagttctgtcagacatggtttagacacaatggtcgttgctgtagggacttatctttggacccctcatagcaaaagcagtttctacaaaactcttggatgggagatcttctgtctggccctgtgtgagcggctcagtctggcagaattcccttgctctcgaaggtggttcagagcctcctgcctgtgtccttgttagtaagtctggttagctagcaggaatcaccaggaaaagtctgtcctgtctccaggggttctggaacccaggctaacctgtgtatgatgtgaccttggggaaacaaaacaaaacagagatgcatgttcctctgtcacctcaaggttcaggcagttgcttttctagaactctgcaggagcatttggggtagtaactggctagctgtagccaaggctcttggtacaggctgaggttgctttccccaaaggctgctaagccagtgtccctcacactctaatactcatgggaacttgttaaaaatcagagtcacattcaataggtctgtgagtctccgtttcagggtctcagaccacgagtcagaagagtcagaaggctctagcaaggccatctagattcatgcagagctggacaggcttaggggatcacaaaaaggaatttatgtcctaggcaccagatgcttccaacagccctccctgggatctctctctttctctctctcacacacacacgttttttttgtttgtttgttttgttttgttttgtttgtttttctgtttgtttttttgtttggttggttggtttttttttttttttttttttttttgatagggcttctctgtgtagccttggctgtccaagaactcactctgtagaccaggctggcttcacactcacagagatccacctgcctctgcctccctagcgctgggattcagaccctgggccaccacttcccagcaacctgcatttttctcaacccaaaattcccccactatttatttatgcatgtgtgtatgtgcacgggcaaatgcatgccatggtgtatgtggaaagtcagaggacaatttttgataattcaggatctcctttcacctctgggactgaaataaggtcctcaggtttggctgcaagcaccctgccatctgagccctcttttatacattttatctaaatacaaaacttcttcagacctgggttccagttctgtcattaccaagggcaagagaactgctttcctgtcaccaaatccatgtggtgtttggcctctttactaggcgtgtcccagttcattcagaggataaactggaaagatttatttagaccctgggattttgaccaggggccatggtgcagtcagggtcccattgaaacacaaaaggtctggagaagtgcccccattctcaccgtgcagaggctcctccagggccttctcttgtcgccccctaggctcagggaagaccacgctgctggacgccatctccgggaggctgcggcgcactgggaccctggaaggggaggtgtttgtgaatggctgcgagctgcgcagggaccagttccaagactgcttctcctacgtcctgcaggtgggcgtgtccctggccctagcctgcccgggctctggcccctagccccgggatttcgacgaccctgatgtcccctttcctgcagagcgacgtttttctgagcagcctcactgtgcgcgagacgttgcgatacacagcgatgctggccctctgccgcagctccgcggacttctacaacaagaaggtacttgaaagttaaagctgagtgaaggccagttccccaagggacaagaccaggtgcctcaccagctcctcctctggccacccctggtcccctggtcctcctggttttttgtttcgggtttttttttgtttgtttgtttttttaatctttgcttcacgcttgtattcacctctacctctgccatcctaagcggcagctacatgagctgtctgaagatctgaaacgtgaccactccaatccaagtctggttatgcctctggtttagtccttccatcacgtggctttaggggatccaattcaggtggtcggtgctgttacccgcttatctatcttgtctttaacggggcttcatgcatgcaaaggagactaagtttcttccattaaggaagaaactatggagtcatttttcatctaggtttgattgttggccacacccattttgcaagtagctgtaaataaattcaccttgatcttagttagaaacattgcttccttcagtctgaactatgaaggcctgggaaacttgggaaaaaaatagcaccaggcagggctgtcacctgcaacaggaacagctccctaggaagtaggtgggcgtcttaccgagctcttgggaaagtgagcagactgcttatacttaagaatcctggacagctgagggaggcagttggcgggaggtgcccagcccccacagagcgatgcctcagccatctatctctcccactaaggttacccagagagctcaggggtgttacatgggtcctgtctctggtgccttctctggctggcattcagcaggcttgtacaaatacagtatctcactgatattaatattatctcactgatatctaatattagctgggggagggaacttcatctccaccccatggggaaaacccacaccctctgactccatgctttcttgagaaccatacagtctgagaggaggacatgtatactctcctgggaggtggttgtgcagaaacatgttcacgtggcttggtgggtctagccgggcgacagaggaagagacaagccatgtagtccctctgcagctgtctctctgcttgctttagtaatttctttaaatctaaaatgataggagaaagttttttgagaagggagctggagagatggctctgtagataagtggctaagagcactggctgtttcttcagaggaccaagcagggttccattcagagcacccacgagtcaggcaaagctccgttctgggatccttccatctgactctaagaggagactctgtgttttttttccagatcagatcttactggctttctgatagcctcgtttctccttcgcatcgtctgtaggccagggcttcatttacgctggtgactctggctgctcttccctggaactctgctccaaaagctactacatctctttgcctgcagtcatattgcggctctttttcgaagaaatgtgcccgtttctttctttctttctttctctctctctctctttttttttttttcattttgaaagggacacaatctcattaaaggcagctaggaacaaattcttggctatattatttcattcctgcccctgcttcccccagggcttcctgcagactcagggatcgaggaaggagagaggtagagatttcccaaaggtctctgggggctgcagtaaaccgaagcagtggagggagaaagggcagccttcttagcaagccagtgagcactgttttggaatgttatggtgtggagagtcggaataagaagcggactgcagggagccgcagggtaggagaatggagaggattggtggggaattagaagcctggacaagcacagagctgcggattatatgttggggactctttgaagtttcccggagagatttgagtaaagattagaatggcttttaattacttttggaggttggattatattcctttgatgtaaaaccacattgtgattggccacttgagcctccaggacttacttcgttacaaaggggataagggggccacttcaaaccaaattgtttttttttaaagcacagaaaatgtttatgataataaaatttcaaaacccaaatacttaacataatctatgtcataatgatgcctttgggacatttttctgttgcaagaataagcaatttttttttttgtctcccagggacttaaaacttttatttaaatctgaccggtgtattatgtattaaactaaggtggattttactaatggacttttctccccagggtatggtgggtctgaaagtagcccttgtactttagagcagtgttatctctctggggccatcacagcccagaaactgaagtgtcagccatagatacaggtggcagccctggggtattgtgtctcttacaggtagaggcagtcatgacagagctgagcctgagccacgtggcggaccaaatgattggcagctataattttgggggaatttccagtggcgagcggcgccgagtttccatcgcagcccaactccttcaggaccccagtaagtgggacacaaaccggtcaccagatgctaaaggggtccttgtgcgcttgaggctctgtcctcacagttcccaggtaaaaatgatttgtataggattgggattccccagggtttcgaaaattcgagatcccaatgttagaaagtgtcatgtagttcatttcctggtgagggtttgtaattgggagacagtcccttaacttatcacaggtcagctttacagaaacgtgaaagtgatacatgcgcaactgaactgtgaccgttgatcctctctcagactaatgataaatggtagcacatcccctcatgatgctaggtagcagcagtgagcccgtgagaggaaatgactggccctgcagtgcactgttacccagctaagatgctcggtaggttgggtgtattaaatgcaccttcagcttatggttgccatggttaccaggttattcagagttagggctaccaccacaaaaaccattcaccctgaacatctcttaagagtatcctgtttgtgtatctgtggtccactagggaagaggttatgaaggtgaggtagccagtcctctgcctcccccagcctggtttgctcattctcccaacttgaccaaccttaccactcacgtgctccttcaagaggtcattttgcacctggattctttctttactctgcattagaataaacctgcctcttctgacggcgcttggtcaggagacgataaaaaaacccttgtcacttcttgggcagacatgggatatagttaaagcgtctaaggagctcagccaattcctgtccagctactggcacttcagaccttgtttcttccttctgctgtgcaaagaccagacctcattaatattgcaaagtgccctggtatgaatcagggttgggctaggtaaacgttagctacttccttaccctccctaagcctgcctgctagccctggtctctgtcagtgtcccaggcatggagcccaagtagtccaaagtacaaagaggcctgatacggtctctctcctatctccaggtgtgctccagagctgagagctgggtcgtcccaggtcaggttctttctcctgggctcaggttgaaagccagtttccatgtggctacttctcaccacgcagtttggatggggtacggcgtctcaatgaaggactggtcagaaacactgaggtttaagtacagagcatgctgggcagtggttcagatacctgacccttctttgccggcagaggtcatgatgctagatgagccaaccacaggactggactgcatgactgcaaatcaaattgtccttctcttggctgagctggctcgcagggaccgaattgtgattgtcaccatccaccagcctcgctctgagctcttccaagtaagggaatgcactgaacccaatggtaggagcatggtgtcttgaaccgggaatggcagggcagggtaaagagcacacgccagtaatgagagaacacaggctgatttacacagtaccaaaggcatgccaagcatagtctatacactagctcattcaggccaccatcatttagtccacaaagcaatcctggggttaagcatccacatacacacttgaagggagaaaaggggacaagttagaaatgacttgaaatggagccagaatcacacagttggtaaaatgctgccagtggcagcttggagagatggctcagttggtaatgtgcttgctctgagtttggactccccatgactgtaaaagctgggcactgaggtgttggtacccagggcaagggaggcagaggcaggaaggtctctggggcttgctggccattttgtctagctgaatccctaagttcagtaagggacactgtctcaaacaagatggagagtaattaagcaagacacatgatgttgatgcgtgcatgtacacacacacacacacacacacacacacacacacacacacacacggggaggggaggcacctggcagtggcatcatgacttagttagccaccaaagccccatttcatcaccacattatagactttaccccaaagaaatttcatttgatacccatggcatccttttagttagccagtatttgtttgtttgtcaattgataatgatttaatatttcaaaaccaagcaacacacaaaacactactctggttgcttatggccactctctcagtggcccaagtgtgattgattctgggactcagaggcatataacaacacccatatatgggagtaacccaggctttggagcacacactaacaccatctattgtccaagcagcacttcgacaaaattgccatcctgacttacggagagttggtgttctgtggcaccccagaggagatgcttggcttcttcaataactgtggttacccctgtcctgaacattccaatccctttgatttttacagtaagtgtattcttaaaaatgtttactaacatggctgtttggaaatattttttaatttttttttttagtgtgtgtgtatgtgtgtgtgtgtattcactcctgtgcctacatgcacatttgtgctatagtctacatgtagaggttggcggacaaccaaccggagaagttggctctctccttttacgacatggcttctagggatcaaagttaggtcatcaggcttggttgcaatcgcctttacctgctgagccatcttgccagccctaaatcttccttatctttgattttggcatggatgacaccggctcttctaggcttttggtttagtgacttttgcttatgcctttgttttgatattctcttgtttttcaaggagttaatttggcaggtcagttaacctgcctctactgactgagcagagcatacgatggggcttctctcgcagactgtcagagaaaaactagtcgcattttggaatcctcccaggcagttgtcatgggatgctcatggcctttctgggtagctgtagacattctagtataccagacagtcattagtgataagagcttctccattgagatagggtaaagagtggctgctgaatcatgtatgattgcccattgtgtgcttgtgtgtgtgtgtgcatgtgtatttagaaacacatatgttttggggaaaacttttagtggacttgacatcagtggacacccaaagcagagagcgggaaatagaaacgtacaagcgagtacagatgctggaatgtgccttcaaggaatctgacatctatcacaaaattctggagaacattgaaagagcacgatacctgaaaaccttacccacggttcctttcaaaacaaaagatcctcctgggatgttcggcaagcttggtgtcctgctgaggtaagagccttggaaacacagccaagggctgtcttagctcttcacactcatttacaatgatgaaataaaggacctgaaatggtctcgtttggttttcaggcgagtaacaagaaacttaatgaggaataagcaggcagtgattatgcgtctcgttcagaatctgatcatgggcctcttcctcattttctaccttctccgcgtccagaacaacacgctaaagggcgctgtgcaggaccgcgtggggctgctctatcagcttgtgggtgccaccccatacaccggcatgctcaatgctgtgaatctgtgtaagtgcctgtgtgtgtgtgtgtgtgggtgcagctctctcccccaaggctgtctgctccagatgttgccttccaaaagctcaccattagaaaggaatttctctaagctaagcctgcccttccctcagttctccaaggaaaggtgatttactgtaggatccccttgatgtgagctcaccaaatgggcatctctgagggttgaaggacccagaaaacgccaggtgatgtgacacagaatttgaaaagagattttcaacatttcactcttgttagaacaggactttcagttggcacagactcggttatcatgctggatcctattttggaagcgccaacacctaatttttaaacccagaggggacccagaggcagcactgtgctgcctggcgctatggtttgccgcagaataggcattggaggaacttccaaaatgtaacaccaagggcagggaagagggaagaccggtgctttggaaagttggctgcagacggggaggagggtgatggttaagcctctgcctctaccaggcttttccagctcctgggaagcaatgtcctggctgctgtggggaccaggatcctgcaagagaggacaagtgactctgagtcactcactcacaccccctttctgtgcgctttattacttcagagagaagagagcaaagtgtggggtctttgctaccacactgcccccaggtagtatgtaggttttttgaggtgggagcttgtattgtcttttcgtgattctggccaccatcttggctgacgtcgagttcagcctgggtagccttccctccctcagcggtgcagtgacttactgtttctcttctatgccagttcccatgctgagagccgtcagcgaccaggagagtcaggatggcctgtatcataagtggcagatgctgctcgcctacgtgctacacgtcctccccttcagcgtcatcgccacggtcattttcagcagtgtgtgttattggtaaggcggtgtccaggggcattcggatcccctgagccaggttcctcgtggggtcacggaggtgatggcccacgtgtgatgcagctagctccccggagaaccgctccatccttgtctatgcaataacagggcaccccccccctgccccgagggctgcctgggacccaagagcagccagcacgactgtgtcatactctgagggtctgggctacagaagaggtgttcacaagaagctgggacacaggtgcccgggctagctggcctccccagggcatagcagcccctcggcctgaagctttgctgatggagctgcacatcacagtttggtgggtagagagggcttcagggaagacaatggctatgggaagaaggcattgggaaccacatcacttctgcgggttttgctctttatctcttagacctttattgcttagagcttagaatggttccccatctgtctctgccctgtctcttccctatgtggctctgctgtaggaagccacggaggacacaagtggacttgtcctgactccactagtgacaagggagagaggactccgggcaggtctctgagacactgtctctcttcactgcctggtgtcctctgcaggtgctcctagctgcaacctctgcagttcccgtgctatgcaacatgaactgtgtatataagctgcacgcatgcaagtgtaagacaaccaagggcgggcaggcttaggctctcaggaggcacttttactcagaggacagaggtgaggcacatgcactatgagcatgctcagtaccaggacaggttgaaggagggaaggcataacatgaggaggtcattggcccattgacatgttccagaagtctagagcacagtgggttgcagtctggtttacagggcgacagggcatgagctgacaggagcagtgagtatatgagctggtactggttaggatgaagagggacattggcttaatccttataagttccttgtatatttctttcatcaaattgttgtcaccggtgacaatgtgtcttaaactctcattaggctgagagtttaagacaaagagtagttgtcttagaatatggtaaggaaaaccattaaaaatctatttgaggacttgaggtgtagctccatgagaaggctctcctagagtccagagttagattctccagcgctgcaaacttagcacgcaggcaaacagatcatgagtagatgaacactccacccaaagtagttatgcccagttatgtatacgggagtgtcagagctgcatggcactgtgggtgcaagtgaacctagtcatggagggaaacacacacacacacacacacacacacacacacacacacaccacacaaaccacacatacacacacacaccacacaccacacacacacaccacacacacacacacacacacacacaccacacacacacacacacacacacacaccacacattacatacacacactacacatacacacaccacacaaaccacatacacacacacacacaccacacacacacacacacacacactacacaaaccacatacacacacataccacacacacacacaccacacacacacacatgcacacactacacacacacacaccacacaaaccacacacacacaccacacacacacacaccacacaaaccacacacacacacataccacacacacacacactacacatacacacacaccacacaaaccacatacaaacacacacactacacatacacacacaccacacaagccacatacaaacacaccacatacacacacacacacacaccacacacacacaccacacacaccacacacacaccacacaaaccacacacacaccacacacacacacacacacaccacacacacacacacacacacactacacaaaccacatacacacacataccacacacaccacacacacaccacacaaaccacacacacaccacacacacacacacacacaccacacacacacacacacacacactacacaaaccacatacacacacataccacacacacacaccacacacacactacacacacacatacacacacacacacacacacacacacacacacacaccacacaaaccacacatacacacacacacacacaccacacaaaccacacacacacacaccacacacacacacactacacatacacacacaccacacaaaccacatacaaacacaccacacacacacacacacacaccacacacaccacacacacgcacacactacacacacacacaccacacaagccacacacacaccacacacacacacacacacacaccacacacacacaaaccacatacacacacataccacatacacaccacacacacacacatacacacatgcacacatacatacacacagagacagacagacacagacagacacagagagaaagtgaaatacagatagatagatagatagatagatagatagatagatacatagatagatacatagatagatacatagatacatagatatatacataaatagatgataggcagacatgataggtgatagacagatacatagataaataaatagatgatagatagataggcagacagaaattcatataacagaaggtaagttctctttctgagaatggagaagagagtgagattggggcaccgagagagaaagtaacttaaatacaggtttatgcaccatgatgatcttcccctggaccccaagatgtaaagagaaaaccttaggggatcccaaagccagctaaggcaaaatagcgacgtggaagagcggatccagttggcacagcaaggccatggtgacttctgacccctgaagtgggcagggttcctaggacagaggtatagaggggagcaagcacaggagtcagagaggcctgggggcgaggggcagaggccaggcttgaaaacgtcaggctgaatttttgcaagtggaagattctgatcactgtcgagcgagcgagtggctgaggttaggcagtggagaccagctgaccaggagccacttccgtgtcaaggaagttaaaagactgagggaaaacgctggggtggagactgatccttgccctcactataaaactgtcaaaggcagcagactgttttaagaaccacaagacagagaagaaaattaacgtaataaaaaaccatggtgatttgagcaagggaaaggagacccttcaaggctggcggggaggctgcacattgcagatcaaacatgcatttggtttgtttgtttgttttgttttctttcctttgctctacaaacagactgatgggcccccaagtctaatgagagtttaaaacacactatcagggctggggatgtggctcagttgatagagcatttgcctaagttgcacgaagccttgggttcaatagcacagcataaaaattggctgccacgacaatccaaaagttcaactttcttgggtggaatccgtacaaagacacactgtcgccggtgagagtaagttgatgaaagacgaggaaagtgcacagacgtaggttagcttgtttccaaaaataggaaggtcaaatcaaggctcttagaataaatgacactacagagatggagtgggagggtaatgtgtggatggtgagcgactgcatgctggcaatgatcctacagaatagggatggggtcagggcggcacggtgggggagccctgggcgttggggtaggaatggcaggaagaccacagttatttatgaagagaccaggagagttcaacagccctgcacacgcctgcctgggaggctgttgtctaagcaatttaatattttaccgtgagagctcaaggagctgtaacaagcaatgcacactgagttgaaggcaatagaagcaactgtggtaataagtaggtaaaatgtcggctttgttcctatgagggctggcaaaggggactgtggctccccctgctaattccacctcccaccagccagcaaggggtagtcacgggaggcaaatatggtccttgtcttaaatgatagtgtgtggggagaaaactaaagacctcatgtttttctaggactctgggcttgtatcctgaagttgccagatttggatatttctctgctgctcttttggcccctcacttaattggagaatttctaacacttgtgctgcttggtatagtccaaaaccctaatattgtcaacagtatagtggctctgctcagcatctctgggctgcttattggatctggatttatcaggtaagaagaaatgattggagcgatttctgtctggcaggatgtacggacaaggatcacctaacaatgactgtcatcgagcaaagccagggagctcagtgacactgcttagactcagcgcttgtagtctgggatggctctaccacttgccaaccattattgcctcaggctttgaactgttcagtttgctagaaagatgtcttctcggtagaaatcaggacacaaccacgtaagcacgttactgctgtgcctcacgtgtaaccgctaggaaaacaaaagacacaaagcaatctggattctctaggagactctcagcccaatttacagccaaactgtgcactttagctcacatctaaccggtacaagtaacgctcaattcccattttaaacatttttatttttatttcatgtgtgtgctcgagggcctgcatgtatgtatatgcaccatgtatgtgttggtgcctataaaggcccgaagaaggcagaagatcccctgaaactggagttagagatggtcatgagccaccgtgtgggtggtaggaactgaactcaggacctctgcaagagcagctgagtgctctcacacagttaagccatctcttcagaaccctgtacactagtgaaggggatgtggctgacctggctaatcccccgtcctcgcactagccagcaagaaggcaagcatgtgtgctctggaattaaaatcagtcaagtaaggaaagagccaacaggataaagagctattcaagggagaacaaagattagtggacacgtgccaaaggtcaacactgaaattctctggatgatatttaatttctcattgcattttactgtataattttcctatcatataccattttataaccaagagcacacacatgcaatgcacatatgttttacaattagtcacagaaagggtctaaagatgtagagtgttaaatctgtccaggcaacactacatgtgggatccagtagggagccctaagggaatggtgatggctttgtttacttagcttaaagggctggtgcggtgctcagagagaaaaaggctttctgcaagcaggaggacctgagtgtgggctccccacatccacacaaaagtcatggcctgtagccccagcagagacagagggattgctgaaccagcctggcccccaaatcacaaccttcaggttctgtaggagaccctgtctcactggacctgatggagacagacagagaagaatacatgacatcttcttctgggctcctatgtgtgctcatgagcacacaaatacacacatgagaacacacatacacatgagcacacacatacacacacaagcatgcacatacacatgagcacacaaatacacacatgagaacatacacatgagcacacacatacacacatgagcacacacatatacacatgagcacacacatacacacacaagcatgcacatacacatgagcacacaaatacacacatgagaacacacacacgagcacacacatacacacaggagcacacacatatacacatgagcacacacaagcatgcacatacacatgagcacccacatacacacatgagcacacacatacacacatgagcacacacatgtacacatgagcacacacatacacacacaagcatgcacatacacatgagcacacaaatacacacatgagaacacacacacgagcacacacatacacacaggagcacacacatatacacatgagcacacacaagcatgcacatacacatgagcacccacatacacacatgagcacacacatacacacatgagcacacaagcatgcacatacacacacaagcatgcacacatacatgagcacacacatacacacacaagcatgcacatacacacacaagcatgcacatacacacataagcatgcacacactcacatacaaatacaaacacaccatacacacacaaatacaaacacacatatacacacaatacaaacacacataaacagagaaatacacacacacatacatgctcacaaatataaacatacacatacacacacactcacaaatacaaacacacacacaaatataaacactcacacacaaatacatacacacacatacacacacgcacatactcacacacacacaaatataaacactcacacacaaatacatacacatacacacatacacacacacacacacacacacaccattaaggccatcttacactgcatcctttctttaatattgaagactgccggtcttgagagcagcagcatgtaccattcatcaccacagtcttccttagtgagcagcgcaggacctagagccaattaagtttgcaaaagtcactggttagactgaacaaagaagtgaacgactttctttgggctgtacacaggggtcaggtgcaggctgtgtgggtttccttcctgatatcaagtatatgtgcacacggggcacgtgtcttgtgctcagctcggtgcacagggagagatgagggcacactcctgacctcaaagcagcagtacacagcagggcaggccccagagggcagtccctctggggccaccaccctgtccaggtctttgcatctcatagttggtcttttgccatagcttgctcccccttctttgctgcctcagtcacaccctcctcattctgcctgttggtgctgcatccacttccttaaaacaccctgattgttttcatggttcttcagggtcaactcatttcaaggccacttcccaccctcgctcggtctaggggcactgtggggctgacaggcctgtgcttaggccatctgcctccttatgttttccttctcctctgtaatttcttccccatctacccttcccagcccacagttcctcatcttggaaagctgccagtagctccaagtcaagggtctgggggaaccacctgggtataggagagacaacaaacatgaaccgtaagggtgaggtggacatgtggcattggttgttggtgtgctcttgtatactattgtaccattgagggtgtgcagtcgatgtgcccaactgcatggtgagttctttagggataggatacttaaaaatatcccaaagtgccgggcagtggagcaggcctttaacgcctttaaccccagcacttgggaggcagaggcaggtccatctctgcaaagtttgaggccagcctggtctacagagcgagttccaggacagccagggccacacagagaaaccctgtcttgaaaaaactaaaacaacaacaacaacaagaattcctgagcacctaggattagagtctcataaagagaaattatttaatatatatttatgattgttttacttgtgtgaatgtctgtgtatcacatgtgtgtcgatgcctaaggaagtcagaagagtctgttgcaccctctgcaactggagttacaagtggctgtgggccaccatgtaggtgctggatttgaacctaggtcctctacaagagcaaaaactgctccaaactcttgagccatctcacaggtcccataatagatggttactgatagaaaccatacagtgctccaagaggggatcagtattagcgggaagttcctcctgagacagagtggaaaggagcttgcttcacaggataaagaaaggaacaaggggcaggaacacccagtcaatctcaaacccgagagagagcctctgcttgcaggctcagcttttccccttgtattttggtggtggtggtttgttttgttgaaacagggtgtgtgtgtgtgtgtgtgtgtgtgtgtgtgtgtgtgtgtgtagccctggctgtcctgagcttaacactgaagaccaggctgccctcgaactcacagagatccgcctgtctctacatcccaagtgctgaggttataaggtgtgcttcgccacagcccaactccttatactccttatattctggttcttgaatcacccttaggaccttcagatctctgcttagtcagatgatgttgtgtgtgctaggtgtatgatttcttgcatgtttatttaagtaatggagagagagagagagagagagagagagacagagataaagagataaagagagacagagacagaaagaacaagccaacagccattaggtctctactgagatgggctgccaggtagatgccaacaccacgctgactgacatggaggggtgactgggatctaggtgggagtaaagctcaccaagagtgtgaacagtctagttctacatggtgtgagtctcacaaacacacatgttataccacaacgccaaaatgtcagcagttgtttctgggtagtggtatttacttacagttttccatgttatttgacgattttacagtaaggatcacttttaccatagaaatggaagattatatttagattagaaaacataaagacttcttttttttcatttagtaaaactatttcctagaacctattgaattttcttcctctttttctctttttcttaagaaacatacaagaaatgcccattcctttaaaaatcctgggttattttacattccaaaaatactgttgtgagattctcgtggtcaatgagttttacggcctgaacttcacttgtggtaagtgttctattttacaatattgttttgcatgctactctaactaagctgagacccgggctctctgactgggctgggctggctggacaccaagagttagggatggttgactttccagtgctgggattacatgtgtcaccacgcccagcgttttgtgggtgcacaccaaactcaggtcttcttgcttctgtggcttgactaagttatcatcctaagcttctgaaatattgtgttttcataataaaggtttttttaaaaaatattttttattacatattttcctcaattacatttccaatgctatcccaaaagtcccccataccctccccccccacttccctaccccccaatttccatttttttggccctggcgttcccctgtactggggcatatacagtttgcgtgtccaatgggcctctctttccagtgatggccgactaggccatcttttgatacttatgcagctagagtcaagagctccggggtactggttagttcataatgttgttccacctatagggttgcagatcccataataaaggtattttaaacctgaaaacccaccattttctctgatttaaggcattttaaaaagataatttatttcacctgggaatgtttgcctctgtgtgtgtctgtgtgcacgctgtgtgagtgcctagaggctggcggaggctggaagagggaggccgatcccttggaactggagttccagacagtcgtaagcagctgagtgaaatctgggaagcaaacccatgtcctctacacgagtggacagtgctctttcttcagccgtctctacagccacaccccactctctcttgtttttcaaaggaaactattcagaggtcaactttagtctcctgtcagtagtcaatagcttccgggcactttgatattcttataaagtgacaggcccacgtaattgctagtatattctagataggctcatttcttatctgctgagcacaccaaagcaagctaatgtggcctctgtcccccaagatgtgcgtagattacagatgagtaaacccattttttatgacaaaagtcagcctccgatctcatgaccgcgtgggcactgagaacacaagtcccttggccactgtaaatcccagtgcctggcagagttcagtggttaaaaatcttcaactaacaacgcaggtaacttcagggcatttgatggtaggtgaagaccaggaagaggataatgaatctaaaatacaagcaaatggttttccatctccacaaagccagggcccctcccctgccaggctcacgtctgcttcattgcactgttaactctgggttctccgaacactgtgtgtctttcatgaagagggctacttagaggtctgagcactttcttaacatcagggaaacatttgtgagtggataacctgaagcccgggagagctgacactgccttttccttgcaggtggatccaacacctctatgctaaatcacccgatgtgcgccatcacccaaggggtccagttcatcgagaaaacctgcccaggtgctacatccagattcacggcaaacttcctcatcttatatgggtttatcccagctctggtcatcctaggaatagtgatttttaaagtcagggactacctgattagcagatagttaagatgacaggcaggaaagggttaatgggcaggcacgcccactgtggagcacagagaagtactgtctacaaccatcaggattccatctgcgacccttgtgtctgacccttgtgtctatccggagccccaagggcaacgagaactcacagccctctgctattccagcttgtggggcaatgtggtgcttggacattgtgactgaactggtccaataatgtaaataataataattcataaacctacaggacattagcttgactatgtgttttttttctagtcacagaaaaataaacccatttaaaaattatgtttacatttgatcaagaatttgataaaaataaaaaatgcttatgattactgactgagcaatacagggaaaagctctgggttttactgaggaagcctcctacagaagaggataaggaacttccgctgccatttaacctgcccccctccatgcttgtccacatgatggggctgggtcacgtggccacatcagacagctgctgggcagatgttggtgaatacccctgatacgcagcaatgaaacttaaggaagaggatgaatactgaactccacatatcagacaaatgttggctattcttcactcttagcatagcttgccttttacaacgaagcatgtgatagaaacgagctatgtgagtctggggggcagctgctatgcaacgtccacatcgaacagtagtcaagggctggcgagatggctcagcgggtgagagcaatgctcttccaaaggtcctaagttcaaatcccagcaaccacatggtggctcacaaccaccagtaatgggatctgacgctctcttctggtatgtcagaagtcagctacagtgtacttatgtataataataaatctttgggccagatcgagcagggactgagggaatggggccaatgagagcgatgaggctgactggagggagcagggttggccagagcaagcagaggccctaaatattcaattcctaacaactagatgaaggctcacaaccatctgtacagtcacagtgcactcacatacataaaataaataaataaatctttaaaaaaaagaaaactagtcaagtggtgcttccccccccatcctccccccccccccccaggaacccatggtccggagttgtggaggggcgggatgctgataagagcagacacttgtccactgaacatacttccagagatgaaatgatgggtgtgggctgctagaaatgaattctctgctaaatgactgattatttttctcattgatctgcaagtcattcgtgaacaactctgaaatttaattctctcgatgttaccatggtaacgacgagcgaggctctcagagagagcacatgaacttgtcctgttactgcgacctagcttgtaaagaatgataaattatagcactcgaaatgcctcccattacagaatgaaggaagccaccgtggaagcctattgctcggaactgtatttaaggatccgaggcgtcggtacgttaccagtatagtattgtcaatttttataaaaggtcggtgacaccgatgattatagtataatagttacacaatgtcttacagattatgtatgtcacatcagctataggcagcctcagagacgtaatctactcaagcagttcaaacagggtccctcaggagcctccttgggagtcactgatttcaacttgctgaggacaggaggaagtggaaggggctttgctattcacatgcagatgaatttcattctagctcaggaacatctgggaaattgacattgtgagtgacttcacgctattaaatgctagtgatagcaccctagaaacaccctggctttccacgagagacagccagggtctcaagtcacataatggacagtgatagaagaaaatcgacttccagaacaaacacgactattgctgttatagcttgggctgtttgtgccatcaaggtgctggccacaggagggctttctccacagcacagacctgtcataaatctgctgaacattatccccaaatgtcagaaccatatgcaagacaaacagccaacagactcctcctccatcagaatgacccaaaggcgactccctacccacaggcccccacccctcctgctcttagctgacctgctgatttgaagctgtgcctgtagtgtgtgaagagccatgcaggctacaagaatacactttcctgacttatgatggtggctgtttactcagaactggcttcttacgtgcgatgctcatctaggagtcattcttggtataattcttctctcatgaagttttggtcagcttagtgacatgctagcccataagtctagcctgttctttaaaaggtgatatttaaagcgaatgtgacagtctcactgggtgatgaggggagaagtgggggtggaggtggctcattccaggcagctggagtctgggtttaaggatcaggaaagcgcacctgcagctgtttcctgtgcccctctgttgaagggagaccatgacaacagagaactccttcctggtttcctgccagctgcatctgagtacaccttccagaaggacggtgtccaacatgggcacccacctttatatgaaatcgctaccagagccaacaaaatggctcagtggctaaaggcatctgtcaccaagcctgctgccctgagtttgatatccagaatccaaatggtacaaggagtcttgaaagtttttctttgatctccataaacataccatggcatgtgtgttcgtgcacacacacacacacacacacacacacacacacacacacacacacacacaggataaataagtaaataagaaaaactggtaccaaacacccttgattcatattgctaaagaataagagcaaacacttacacataccaaaaaatttatacttagatgttgcaagtaggtgatagaaaaattttttatttgaaaaagaatgacagacatatagtgaatattttccttctaaaagacttcagaacattcagaaagttgtaacagaacaagaaacagattttccctaacaggttatatgctcaactttcttcacatgttgccacagaaggtaagaaaataatcttcctcgattgggaaggaagccatgcccacagcagggaagcgggtcaggagtccagctcgatttgcttccaggtcttagaggagcttctcttgtagtgttctagttcctgaaataaagatctgcatcactttcagacaacacataatttcaggtgagcgctcataggccacacagtgcagcctttccggctgtaaccctcaaggcttcctgagaccggctctgtgactctactaaaagcttgtcttctagaggatggcccccagagactctgggcagactaagcatcactcagagatgaatctagtaaaatttcagacaaaaattatttactatacagaatatgcaagtaacttttcaattagcaaagcaaggtgcttatacttcgaggatttcaaagtagatagatttgaaagtgacattcagctctttcctaaagttagtttgaagttagcaaattatcagtatttgagatgtagatgttcttcaagccagtggtttttgcttttagaaatgctgtcctactagggctggagagatggctgagtggccaagagcacaggctgatcttcctgaggacctgggtgtgagtccagccatcacgtgtgtctcacggatgtttataactgcagtttcgggggatccaatgccctcttctgctctgtgcacaaatatagtgcacagaatacatgcaggtaaacaaccatacacataaaataataataaaaaaatttaaagaagaaacttgtcatactgagttaggtgtgttggtgcatatctggaggccagcgctggggaggcaggctgcagaatcttaggttcaaggtcagcctaggtttcacagtaagatctcaaggactgggatgtagctcatgagtagagtgcttgtctagctatgggtttcttccccatcactgagaagacaaactgcagtgttagctatggtagcaaatgcctttaattccagtacctgggaggcaaaggcagcagaggtcagcctgacctacatggcaaattccagggctacacagcaagacaaaaacgactttttggttttgtttcttcaagatacagtgtcactacatacccctggctgtcctggaacatgctctgtagaccaggctggcctcagactcacagagattcgcctgcctctgcctcacaattgctaggattaaaggcatgtaccaccactggctttcttaaagacagaaactaacagacatggcctttggagatggctcattgggtaagtgagcttgtactgagagcttaagacctgagttcaaatccccacatcaaaaaagatcaacaaaacaaaacaaacaaacaaacaaacaaaacagagcaacagtgaagggctcggggtgtggacagatgcccctgcaaagcatccacacctggaaatccagctgtctgcagaaaggactgactaaaatcagtgtccattacagtcagccttgggcagcctagtgaaaccaatggtagacatatgtgccccataagaggagcaacagtgggaagaagacgggagagttcctctccttttccatctctaacagcagtgggagaaaccggggatgggcagcagcctttggaaagggtcatccccgggcgagcaccctgtgtgctggtgactgtctaagcaactgtacaaagggtgtcacggttctggataaacaaaggtggttgttctgggataggtgagctctgcccactggctggggttactaacgttcacagttgctacaaacaaaatccactgctgtgttcataaaaagtacagattatcttccacggttatgcttaagttgttaattacaactgagtcattacaactgagctgtgcgcacactctagaacgctgagctgtgcgcacactctagaatgctttcatgatactaactccaaagcagtcttcagcttggtttatgtttgagtgatgccaatccagtttgccagttagtttctacttacaccactgaagattgctaactcataaaaagtaggtaactgggtgtggtgacacctacctttaatcccaaccctcaggaggcagagaggagctctagatgtctgaggccatcctggcctacatagtttgtttttggccagccaagactatacagctagaccctgtctcaaaacaaaacaaaatttacgaaagaggcacggcaagctttgtctttaactggaaaagactggttgttcttaccaagaccaagggaagtctattgccttgcagttccttgctggctgtggtatacaatttgcatagaacgttacagagaaaagaatgagtctggtcgcctggccatgccaaagaagggaaaggtgtatttgattgattcaggaaaaacagacacaggagtttcaatattgctatcggatgaacttagtacagccgatgtttgaaagatacggtagagttttctttataccgattctgtgtctgtttacagagccattaaaaagcaaaactaggaagcccctacccaggctcagccctacccacccctgctctcttaagaagccctgaagactctgaagacatggtctatggttttatgatgcacggtgcttctatgatacaatacaataacattataatggatgatagagcatcttcagcaaaggacggtagcaccgctcttctctaaccacgtgacctcagtgtgcttaataaaactgcagcccgaggagcatgctgattgtttcagacttgggatctaaacaaggtaactatggctaaacaagaagaccttagaagtaaaagcaatcatttgcctaaacctccctccctcatctcctttttaaaaagacatggtctcaacgtgtagcctgcagccccctatgcagagtacggctctccggtgctaggattaaagtcatgcatcaacacgatctttttcctgtcctggtggttttgtgtcaacttgaataagctagagccatcagagaggaaggagcttcacttgaggaactgcctccatgagatccagtaaggcattttctcaatggtggagggcccagaccatgtgggtggggccgcctctgggctggagggcctgggttctctaagaaagcaaaccgaggaagccttgtagaacaagtcagaaagcagcaccctccatggcctctgcgccagctcctgcctccaggttcctgtcctgcttgagttccagtcctgactccctttggtgatgaacagcaatgtggaaatgtaagctgcataaacccttttcctcccaacttgctttttggtcatggtggtttgttgcggcaacagaaaccctgactaagacaatagtcctttaacaaagatactgagacgagatgagggactaagctagcactttccacgttctcatttcctaaaaatagttttatttgaacagctaccataaaagaagtactttatcacaaagacttccaatgtggcattgcggtcggtggtggtggggtgccgcccctacactggggggctatttatagaaaggtacctccatggaagctggcagatctgaatggaattcctgagcttgcttctccatcctaagcttcatgccatgctctaacttcaccgcacacatgtgagtggggaccactttctgttccaggcctaacagttgcagtttggggtagggaaggagacgagaggaaggtcaagtccagtgatgttatttgatgatacaggatggcatctcacccccggaagagcaataagcacgtcctgggtgcgaggtgtcagattagtcagtccagacgggcctgagagcctgcaggctgcttttagcagtgacgcgcacacacccagaggcaaatcctgagtatgtttaagtcagaagcggcagagctctgttcttttaaatgaatatgctatcacccagtgtcaactcagacctcaggacctcaatgctactttcaaggggaaaatgctacccagcaaccaataatcatcaaaagatagaggaggcaacatcaagacagaagtctagacagctggtgagactttcacctaagcttatcgctttttattttctctctccatctctatcatctatttatgtatctaacatctatccatcatccatctgtctatctatccatcatgtctgtctgtctgtctatctatctatctatctatctatctatctatctatctatcatctatctacctatctttatatatcaatctttagaatcaaatattaattaaataatcaagcattaggtggtaattactgtcacaacttttacagcaaagtgcaaattgtatgaagattctatatgggccatctgaagtccacacaatttatctaataggacaacacaaataaaactggcaaaatgaagatattataatttttgtaggtgagttaaaaagactatgtcagttaagagagtctggctgttctgttgtgttgtctgaacacaagggttgaagatggatgccccactttcatctaacatgaagtaagaggagatgtaattccaaagtgtaagttcagagttccacatacgtcagcatattgctaacacctgtgcatgtgaccttattaaagtagtcacgatgctatagaaacagataataatggttaatgattgactcttgaaactaattgggaggtgaccgccaataaactctccagccaaggctcatgtacaaggagggttacattaggtcgtttcattaccctacattatgcttcatgcttctctacagataaaagccatttaaatatccacagcatattatcaagttgtctggaatgtgtttaaataaaacactttgtttacttaaatgtaggacctcttgggttaagggtgagtgctaggaaaaatgccctggtcaccagtcccagcggactgttgggggttgggacagtagacggatgtctccaagtaacccctgtgccagtgcgactgtccgagtggcattgttttgcgtacctgcccagatgtggtcatgcttccagctggcacagtgtgctctacaagtgtatcctcttacaaggacagatggtgtgacatcttatgctatcacagtaaaaggagggctgacaaaatctatgtgcactacttgtgtcatggtggacctcaccaacagttacatgcttttgtaagatttgatactgaaatggggctatcctgccgtgtctacttctaagcactttcttcagagatcctagagtctgtcaggtgtgcctatgtagcttggcctgacagggtagagtccttaactggacaaggtaactttcctaggacaaggaaagaataaccatgtctaatgaccgaatgagaaacaaaagcgctcaaagactcttaaaacaggagtgtcttaagtgtctccccaagcaagcgtgggagctaggacccatcttaacatcaagtaaactggaacactggaaaagggtctgtgtaaatatttacatttcctttgggtggtggagtggtgggtgattttcaagtttcttttatatgcatatcagaattttttctatacagatagatataatactgagatgattttgcaagtaagaaattatgaaaatgtatgaatttacagatgaatactatattttggtgaaactgggtttggaaatacctggtccttctgaaccctcatctcatcgacttcgctttctgcatactgcgggtctcgggctgggtcctggaccgccttcagggtgccggtactctgaaattacagtttcccaagtcatttcacgcccacagcccacattgccatagtcactatctgtctacgaggctgagctccatcagcgtggcatcgagagcgctttgctgtttacagcttccgtcagactctcagaaatctacctcaaacacacccgtgctccccacctccagccagggtcaggtgtctccgtcttctaacagccagagaaccctgtatggaagggacaggggccatgtcttactcagctattaatcttcatggtgctttgtctacaacagttttagcaaacatttcatcattttggaacatgagagagagatggagttatcagaacaggcctttgggcatttccggtcacagctgatagcttcccagcaatgaagaacatgtacctttggtgggaagagcttgtcatacacctttttccacagctccataggtgagtgggcctgaagttttccaatgtcactgtcaggaacaggaggagaccctaaaattgaaagtttacctcaattgactacaaagattcaatttttgtaaactattaacaagcagatgctgtttattaaagcactagtcctaggtctctcgctttccatctccacattacagacactattatgattgtgctatcttggtggttgtactggaaacagaggcagcaagacataacggtgagctataactctgactcccactccctacactggtatctgtgccctgttcacagtaattccaggtctcagtgttcacaatagaaatacgcatgtgctcatggtaaaggcttcatacagcagcgccatccattttacgtaaaaccgatcactgcccagaagttcattactatagagaataaactgtcagtatgtatggctatgttccataaccaggaaagagttcaaatattaattagaactgtaagcagaatatacattgaaaacccactaaagtatactgagttcaataatgcagactggtaaagtttctacaccatatacacgtgtataaatgcagagtaccagagaggtgtgtgagggatcctgcatacacacacacaagtgcacacacacacacacatacatgcacacaccacacacacaagtgcacgcacacacatgtacatacatgcacatacacacatacatgcacacatatatgcatgcacacacacatgcatatacatgcacacatgcacacacgtgcacacacacatacatgcacacacacacacacacacacaccatacacacaccacacacacaccacaccacacacatgcacatacatgcacacacacgcacgtgcacacacacacacatgcacacgcacataccacacacgagattcatctccctcttccccctcaaagtgctgggttgtaccgaggacctcactcatttgaggcactctaccactgagctacagtccctgtccctactattttaatgaggataatatatttataacttgaatatttaagttaatttgaaaaaattaaaaaattcagtcactttctggcaatttttgatctataacctgagatttttatcctttctaacatctttattgtcccccaaaatgttcaactattaaccttcaagggttcccttatcattttggttagaaagtattgattccctacttgagtgtatgtgtgtgtgtgtgtgtgtgtgtgtgtgtgtgtgtgtgtgtatccaacactggtgctggaaactaaacttgggtcctctggaagagcagcaagtacttctaatttctgagccacgtctcagttctggctcttacttctccacgcagtgccctgccttctatcacaagtacgtcaatgtgctgggagcttcctcaattctggggatacaaatgaatgcttatgaaataactgttacgaaatgaagccagaaatggtggtgtgctggagaccaaggaggcaggaagagaaaatcaataagcaatttaaaaagattaagcaatattaataagttcaccaacctatctgacataaagaatccagtcctgctgtgataaacagtggcttattttgatccacacatattgatttgctgtatggcaaagaaaaagattgtaatttagttcaccagttaaatatgctgccacgttctagtataaatacaaaggccacattttatctaagtcatggatgagagcattgacccaaatggaccagtaccattggttgtgacagactaacaccatagtcagctcaaaccatgagaaagaacaaagtcagagaagacacatgcaaaaacttccaactccatttaaaatgaacagaagacaatcataagcacaggaaagtggtaaggtggagggagatacagaagccagggaacagggggaactgattggaaaatatttaccaataccttttatcaataccgaatgccaactggttgataacaccgcgtatcttcagtaacagagcttctgacttgctggtaaacttagaaacaaatgagataaattacactctgctctctcatcctctaacagtaaaaaacacagctttaaacaagcacaactggccagagaattacaacttcttttcctcaaaacatgtatatttgagtcgacaaaacagaggctgactaaggcaacctggatcagcttgcctcggtaccgagttcatgagtgcgtgatccaggaaggacccagagagctcaccaatcatctcaccaatttccatcatcagaatttgtttttaatttgtacattagtgtttgcctgaaatgtttgcggtgtgtgttaacacaaacattcttaatgttctaaaagaaaatgtcccccaatctaactgggtcagttagatagggagaagcatatataaaagtaactgtgacagctgcaggcggggacagtcacaccggcactccctgaattgatttttttttagcttctttttttaattgcctgcagagctggggggtaggcaatttctgaatcttctcctgggtagatctaagagagccaaattgcagcaccccaggatggtgaagggggtgcctgccaccaagagttaggctctgactcttgagtaagcaggaagtgtgtgtgtgtttgtgtgtcctccacagatggtcagtcactgtttgccttctaaatactttgctattcaaaggcaaaggagaatggctcagatgtatgaagtgaaatgaaatacttataaagcaaagatggcaactttctggttcccatggcaggtccacaggacaacgctgactctggtgtaagaataggctcacagaggaagtacagtacacaagggctcacaaaggtcagacacattcatttaaaacaaagaatttaataatgatcatgtttatcgtgtgatatgtaaaatagggatttttttaattaaaaaagattgttgtacttagttttactaagaaattatatatttgttacattataatatattgttattgctttaaactatgtaattttgtaatatttt

SEQ ID NO: 16 - DNA, 48690 bp, Mus musculus
aaaatattacaaaattacatagtttaaagcaataacaatatattataatgtaacaaatatataatttcttagtaaaactaagtacaacaatcttttttaattaaaaaaatccctattttacatatcacacgataaacatgatcattattaaattctttgttttaaatgaatgtgtctgacctttgtgagcccttgtgtactgtacttcctctgtgagcctattcttacaccagagtcagcgttgtcctgtggacctgccatgggaaccagaaagttgccatctttgctttataagtatttcatttcacttcatacatctgagccattctcctttgcctttgaatagcaaagtatttagaaggcaaacagtgactgaccatctgtggaggacacacaaacacacacacacttcctgcttactcaagagtcagagcctaactcttggtggcaggcacccccttcaccatcctggggtgctgcaatttggctctcttagatctacccaggagaagattcagaaattgcctaccccccagctctgcaggcaattaaaaaaagaagctaaaaaaaaatcaattcagggagtgccggtgtgactgtccccgcctgcagctgtcacagttacttttatatatgcttctccctatctaactgacccagttagattgggggacattttcttttagaacattaagaatgtttgtgttaacacacaccgcaaacatttcaggcaaacactaatgtacaaattaaaaacaaattctgatgatggaaattggtgagatgattggtgagctctctgggtccttcctggatcacgcactcatgaactcggtaccgaggcaagctgatccaggttgccttagtcagcctctgttttgtcgactcaaatatacatgttttgaggaaaagaagttgtaattctctggccagttgtgcttgtttaaagctgtgttttttactgttagaggatgagagagcagagtgtaatttatctcatttgtttctaagtttaccagcaagtcagaagctctgttactgaagatacgcggtgttatcaaccagttggcattcggtattgataaaaggtattggtaaatattttccaatcagttccccctgttccctggcttctgtatctccctccaccttaccactttcctgtgcttatgattgtcttctgttcattttaaatggagttggaagtttttgcatgtgtcttctctgactttgttctttctcatggtttgagctgactatggtgttagtctgtcacaaccaatggtactggtccatttgggtcaatgctctcatccatgacttagataaaatgtggcctttgtatttatactagaacgtggcagcatatttaactggtgaactaaattacaatctttttctttgccatacagcaaatcaatatgtgtggatcaaaataagccactgtttatcacagcaggactggattctttatgtcagataggttggtgaacttattaatattgcttaatctttttaaattgcttattgattttctcttcctgcctccttggtctccagcacaccaccatttctggcttcatttcgtaacagttatttcataagcattcatttgtatccccagaattgaggaagctcccagcacattgacgtacttgtgatagaaggcagggcactgcgtggagaagtaagagccagaactgagacgtggctcagaaattagaagtacttgctgctcttccagaggacccaagtttagtttccagcaccagtgttggatacacacacacacacacacacacacacacacacacacacacatacactcaagtagggaatcaatactttctaaccaaaatgataagggaacccttgaaggttaatagttgaacattttgggggacaataaagatgttagaaaggataaaaatctcaggttatagatcaaaaattgccagaaagtgactgaattttttaattttttcaaattaacttaaatattcaagttataaatatattatcctcattaaaatagtagggacagggactgtagctcagtggtagagtgcctcaaatgagtgaggtcctcggtacaacccagcactttgagggggaagagggagatgaatctcgtgtgtggtatgtgcgtgtgcatgtgtgtgtgtgtgcacgtgcgtgtgtgtgcatgtatgtgcatgtgtgtggtgtggtgtgtgtgtggtgtgtgtatggtgtgtgtgtgtgtgtgtgtgtgcatgtatgtgtgtgtgcacgtgtgtgcatgtgtgcatgtatatgcatgtgtgtgtgcatgcatatatgtgtgcatgtatgtgtgtatgtgcatgtatgtacatgtgtgtgcgtgcacttgtgtgtgtggtgtgtgcatgtatgtgtgtgtgtgtgtgcacttgtgtgtgtgtatgcaggatccctcacacacctctctggtactctgcatttatacacgtgtatatggtgtagaaactttaccagtctgcattattgaactcagtatactttagtgggttttcaatgtatattctgcttacagttctaattaatatttgaactctttcctggttatggaacatagccatacatactgacagtttattctctatagtaatgaacttctgggcagtgatcggttttacgtaaaatggatggcgctgctgtatgaagcctttaccatgagcacatgcgtatttctattgtgaacactgagacctggaattactgtgaacagggcacagataccagtgtagggagtgggagtcagagttatagctcaccgttatgtcttgctgcctctgtttccagtacaaccaccaagatagcacaatcataatagtgtctgtaatgtggagatggaaagcgagagacctaggactagtgctttaataaacagcatctgcttgttaatagtttacaaaaattgaatctttgtagtcaattgaggtaaactttcaattttagggtctcctcctgttcctgacagtgacattggaaaacttcaggcccactcacctatggagctgtggaaaaaggtgtatgacaagctcttcccaccaaaggtacatgttcttcattgctgggaagctatcagctgtgaccggaaatgcccaaaggcctgttctgataactccatctctctctcatgttccaaaatgatgaaatgtttgctaaaactgttgtagacaaagcaccatgaagattaatagctgagtaagacatggcccctgtcccttccatacagggttctctggctgttagaagacggagacacctgaccctggctggaggtggggagcacgggtgtgtttgaggtagatttctgagagtctgacggaagctgtaaacagcaaagcgctctcgatgccacgctgatggagctcagcctcgtagacagatagtgactatggcaatgtgggctgtgggcgtgaaatgacttgggaaactgtaatttcagagtaccggcaccctgaaggcggtccaggacccagcccgagacccgcagtatgcagaaagcgaagtcgatgagatgagggttcagaaggaccaggtatttccaaacccagtttcaccaaaatatagtattcatctgtaaattcatacattttcataatttcttacttgcaaaatcatctcagtattatatctatctgtatagaaaaaattctgatatgcatataaaagaaacttgaaaatcacccaccactccaccacccaaaggaaatgtaaatatttacacagacccttttccagtgttccagtttacttgatgttaagatgggtcctagctcccacgcttgcttggggagacacttaagacactcctgttttaagagtctttgagcgcttttgtttctcattcggtcattagacatggttattctttccttgtcctaggaaagttaccttgtccagttaaggactctaccctgtcaggccaagctacataggcacacctgacagactctaggatctctgaagaaagtgcttagaagtagacacggcaggatagccccatttcagtatcaaatcttacaaaagcatgtaactgttggtgaggtccaccatgacacaagtagtgcacatagattttgtcagccctccttttactgtgatagcataagatgtcacaccatctgtccttgtaagaggatacacttgtagagcacactgtgccagctggaagcatgaccacatctgggcaggtacgcaaaacaatgccactcggacagtcgcactggcacaggggttacttggagacatccgtctactgtcccaacccccaacagtccgctgggactggtgaccagggcatttttcctagcactcacccttaacccaagaggtcctacatttaagtaaacaaagtgttttatttaaacacattccagacaacttgataatatgctgtggatatttaaatggcttttatctgtagagaagcatgaagcataatgtagggtaatgaaacgacctaatgtaaccctccttgtacatgagccttggctggagagtttattggcggtcacctcccaattagtttcaagagtcaatcattaaccattattatctgtttctatagcatcgtgactactttaataaggtcacatgcacaggtgttagcaatatgctgacgtatgtggaactctgaacttacactttggaattacatctcctcttacttcatgttagatgaaagtggggcatccatcttcaacccttgtgttcagacaacacaacagaacagccagactctcttaactgacatagtctttttaactcacctacaaaaattataatatcttcattttgccagttttatttgtgttgtcctattagataaattgtgtggacttcagatggcccatatagaatcttcatacaatttgcactttgctgtaaaagttgtgacagtaattaccacctaatgcttgattatttaattaatatttgattctaaagattgatatataaagataggtagatagatgatagatagatagatagatagatagatagatagatagatagacagacagacagacatgatggatagatagacagatggatgatggatagatgttagatacataaatagatgatagagatggagagagaaaataaaaagcgataagcttaggtgaaagtctcaccagctgtctagacttctgtcttgatgttgcctcctctatcttttgatgattattggttgctgggtagcattttccccttgaaagtagcattgaggtcctgaggtctgagttgacactgggtgatagcatattcatttaaaagaacagagctctgccgcttctgacttaaacatactcaggatttgcctctgggtgtgtgcgcgtcactgctaaaagcagcctgcaggctctcaggcccgtctggactgactaatctgacacctcgcacccaggacgtgcttattgctcttccgggggtgagatgccatcctgtatcatcaaataacatcactggacttgaccttcctctcgtctccttccctaccccaaactgcaactgttaggcctggaacagaaagtggtccccactcacatgtgtgcggtgaagttagagcatggcatgaagcttaggatggagaagcaagctcaggaattccattcagatctgccagcttccatggaggtacctttctataaatagccccccagtgtaggggcggcaccccaccaccaccgaccgcaatgccacattggaagtctttgtgataaagtacttcttttatggtagctgttcaaataaaactatttttaggaaatgagaacgtggaaagtgctagcttagtccctcatctcgtctcagtatctttgttaaaggactattgtcttagtcagggtttctgttgccgcaacaaaccaccatgaccaaaaagcaagttgggaggaaaagggtttatgcagcttacatttccacattgctgttcatcaccaaagggagtcaggactggaactcaagcaggacaggaacctggaggcaggagctggcgcagaggccatggagggtgctgctttctgacttgttctacaaggcttcctcggtttgctttcttagagaacccaggccctccagcccagaggcggccccacccacatggtctgggccctccaccattgagaaaatgccttactggatctcatggaggcagttcctcaagtgaagctccttcctctctgatggctctagcttattcaagttgacacaaaaccaccaggacaggaaaaagatcgtgttgatgcatgactttaatcctagcaccggagagccgtactctgcatagggggctgcaggctacacgttgagaccatgtctttttaaaaaggagatgagggagggaggtttaggcaaatgattgcttttacttctaaggtcttcttgtttagccatagttaccttgtttagatcccaagtctgaaacaatcagcatgctcctcgggctgcagttttattaagcacactgaggtcacgtggttagagaagagcggtgctaccgtcctttgctgaagatgctctatcatccattataatgttattgtattgtatcatagaagcaccgtgcatcataaaaccatagaccatgtcttcagagtcttcagggcttcttaagagagcaggggtgggtagggctgagcctgggtaggggcttcctagttttgctttttaatggctctgtaaacagacacagaatcggtataaagaaaactctaccgtatctttcaaacatcggctgtactaagttcatccgatagcaatattgaaactcctgtgtctgtttttcctgaatcaatcaaatacacctttcccttctttggcatggccaggcgaccagactcattcttttctctgtaacgttctatgcaaattgtataccacagccagcaaggaactgcaaggcaatagacttcccttggtcttggtaagaacaaccagtcttttccagttaaagacaaagcttgccgtgcctctttcgtaaattttgttttgttttgagacagggtctagctgtatagtcttggctggccaaaaacaaactatgtaggccaggatggcctcagacatctagagctcctctctgcctcctgagggttgggattaaaggtaggtgtcaccacacccagttacctactttttatgagttagcaatcttcagtggtgtaagtagaaactaactggcaaactggattggcatcactcaaacataaaccaagctgaagactgctttggagttagtatcatgaaagcattctagagtgtgcgcacagctcagcgttctagagtgtgcgcacagctcagttgtaatgactcagttgtaattaacaacttaagcataaccgtggaagataatctgtactttttatgaacacagcagtggattttgtttgtagcaactgtgaacgttagtaaccccagccagtgggcagagctcacctatcccagaacaaccacctttgtttatccagaaccgtgacaccctttgtacagttgcttagacagtcaccagcacacagggtgctcgcccggggatgaccctttccaaaggctgctgcccatccccggtttctcccactgctgttagagatggaaaaggagaggaactctcccgtcttcttcccactgttgctcctcttatggggcacatatgtctaccattggtttcactaggctgcccaaggctgactgtaatggacactgattttagtcagtcctttctgcagacagctggatttccaggtgtggatgctttgcaggggcatctgtccacaccccgagcccttcactgttgctctgttttgtttgtttgtttgtttgttttgttttgttgatcttttttgatgtggggatttgaactcaggtcttaagctctcagtacaagctcacttacccaatgagccatctccaaaggccatgtctgttagtttctgtctttaagaaagccagtggtggtacatgcctttaatcctagcaattgtgaggcagaggcaggcgaatctctgtgagtctgaggccagcctggtctacagagcatgttccaggacagccaggggtatgtagtgacactgtatcttgaagaaacaaaaccaaaaagtcgtttttgtcttgctgtgtagccctggaatttgccatgtaggtcaggctgacctctgctgcctttgcctcccaggtactggaattaaaggcatttgctaccatagctaacactgcagtttgtcttctcagtgatggggaagaaacccatagctagacaagcactctactcatgagctacatcccagtccttgagatcttactgtgaaacctaggctgaccttgaacctaagattctgcagcctgcctccccagcgctggcctccagatatgcaccaacacacctaactcagtatgacaagtttcttctttaaatttttttattattattttatgtgtatggttgtttacctgcatgtattctgtgcactatatttgtgcacagagcagaagagggcattggatcccccgaaactgcagttataaacatccgtgagacacacgtgatggctggactcacacccaggtcctcaggaagatcagcctgtgctcttggccactcagccatctctccagccctagtaggacagcatttctaaaagcaaaaaccactggcttgaagaacatctacatctcaaatactgataatttgctaacttcaaactaactttaggaaagagctgaatgtcactttcaaatctatctactttgaaatcctcgaagtataagcaccttgctttgctaattgaaaagttacttgcatattctgtatagtaaataatttttgtctgaaattttactagattcatctctgagtgatgcttagtctgcccagagtctctgggggccatcctctagaagacaagcttttagtagagtcacagagccggtctcaggaagccttgagggttacagccggaaaggctgcactgtgtggcctatgagcgctcacctgaaattatgtgttgtctgaaagtgatgcagatctttatttcaggaactagaacactacaagagaagctcctctaagacctggaagcaaatcgagctggactcctgacccgcttccctgctgtgggcatggcttccttcccaatcgaggaagattattttcttaccttctgtggcaacatgtgaagaaagttgagcatataacctgttagggaaaatctgtttcttgttctgttacaactttctgaatgttctgaagtcttttagaaggaaaatattcactatatgtctgtcattctttttcaaataaaaaatttttctatcacctacttgcaacatctaagtataaattttttggtatgtgtaagtgtttgctcttattctttagcaatatgaatcaagggtgtttggtaccagtttttcttatttacttatttatcctgtgtgtgtgtgtgtgtgtgtgtgtgtgtgtgtgtgtgtgtgtgtgtgtgcacgaacacacatgccatggtatgtttatggagatcaaagaaaaactttcaagactccttgtaccatttggattctggatatcaaactcagggcagcaggcttggtgacagatgcctttagccactgagccattttgttggctctggtagcgatttcatataaaggtgggtgcccatgttggacaccgtccttctggaaggtgtactcagatgcagctggcaggaaaccaggaaggagttctctgttgtcatggtctcccttcaacagaggggcacaggaaacagctgcaggtgcgctttcctgatccttaaacccagactccagctgcctggaatgagccacctccacccccacttctcccctcatcacccagtgagactgtcacattcgctttaaatatcaccttttaaagaacaggctagacttatgggctagcatgtcactaagctgaccaaaacttcatgagagaagaattataccaagaatgactcctagatgagcatcgcacgtaagaagccagttctgagtaaacagccaccatcataagtcaggaaagtgtattcttgtagcctgcatggctcttcacacactacaggcacagcttcaaatcagcaggtcagctaagagcaggaggggtgggggcctgtgggtagggagtcgcctttgggtcattctgatggaggaggagtctgttggctgtttgtcttgcatatggttctgacatttggggataatgttcagcagatttatgacaggtctgtgctgtggagaaagccctcctgtggccagcaccttgatggcacaaacagcccaagctataacagcaatagtcgtgtttgttctggaagtcgattttcttctatcactgtccattatgtgacttgagaccctggctgtctctcgtggaaagccagggtgtttctagggtgctatcactagcatttaatagcgtgaagtcactcacaatgtcaatttcccagatgttcctgagctagaatgaaattcatctgcatgtgaatagcaaagccccttccacttcctcctgtcctcagcaagttgaaatcagtgactcccaaggaggctcctgagggaccctgtttgaactgcttgagtagattacgtctctgaggctgcctatagctgatgtgacatacataatctgtaagacattgtgtaactattatactataatcatcggtgtcaccgaccttttataaaaattgacaatactatactggtaacgtaccgacgcctcggatccttaaatacagttccgagcaataggcttccacggtggcttccttcattctgtaatgggaggcatttcgagtgctataatttatcattctttacaagctaggtcgcagtaacaggacaagttcatgtgctctctctgagagcctcgctcgtcgttaccatggtaacatcgagagaattaaatttcagagttgttcacgaatgacttgcagatcaatgagaaaaataatcagtcatttagcagagaattcatttctagcagcccacacccatcatttcatctctggaagtatgttcagtggacaagtgtctgctcttatcagcatcccgcccctccacaactccggaccatgggttcctggggggggggggggaggatggggggggaagcaccacttgactagttttcttttttttaaagatttatttatttattttatgtatgtgagtgcactgtgactgtacagatggttgtgagccttcatctagttgttaggaattgaatatttagggcctctgcttgctctggccaaccctgctccctccagtcagcctcatcgctctcattggccccattccctcagtccctgctcgatctggcccaaagatttattattatacataagtacactgtagctgacttctgacataccagaagagagcgtcagatcccattactggtggttgtgagccaccatgtggttgctgggatttgaacttaggacctttggaagagcattgctctcacccgctgagccatctcgccagcccttgactactgttcgatgtggacgttgcatagcagctgccccccagactcacatagctcgtttctatcacatgcttcgttgtaaaaggcaagctatgctaagagtgaagaatagccaacatttgtctgatatgtggagttcagtattcatcctcttccttaagtttcattgctgcgtatcaggggtattcaccaacatctgcccagcagctgtctgatgtggccacgtgacccagccccatcatgtggacaagcatggaggggggcaggttaaatggcagcggaagttccttatcctcttctgtaggaggcttcctcagtaaaacccagagcttttccctgtattgctcagtcagtaatcataagcattttttatttttatcaaattcttgatcaaatgtaaacataatttttaaatgggtttatttttctgtgactagaaaaaaaacacatagtcaagctaatgtcctgtaggtttatgaattattattatttacattattggaccagttcagtcacaatgtccaagcaccacattgccccacaagctggaatagcagagggctgtgagttctcgttgcccttggggctccggatagacacaagggtcagacacaagggtcgcagatggaatcctgatggttgtagacagtacttctctgtgctccacagtgggcgtgcctgcccattaaccctttcctgcctgtcatcttaactatctgctaatcaggtagtccctgactttaaaaatcactattcctaggatgaccagagctgggataaacccatataagatgaggaagtttgccgtgaatctggatgtagcacctgggcaggttttctcgatgaactggaccccttgggtgatggcgcacatcgggtgatttagcatagaggtgttggatccacctgcaaggaaaaggcagtgtcagctctcccgggcttcaggttatccactcacaaatgtttccctgatgttaagaaagtgctcagacctctaagtagccctcttcatgaaagacacacagtgttcggagaacccagagttaacagtgcaatgaagcagacgtgagcctggcaggggaggggccctggctttgtggagatggaaaaccatttgcttgtattttagattcattatcctcttcctggtcttcacctaccatcaaatgccctgaagttacctgcgttgttagttgaagatttttaaccactgaactctgccaggcactgggatttacagtggccaagggacttgtgttctcagtgcccacgcggtcatgagatcggaggctgacttttgtcataaaaaatgggtttactcatctgtaatctacgcacatcttgggggacagaggccacattagcttgctttggtgtgctcagcagataagaaatgagcctatctagaatatactagcaattacgtgggcctgtcactttataagaatatcaaagtgcccggaagctattgactactgacaggagactaaagttgacctctgaatagtttcctttgaaaaacaagagagagtggggtgtggctgtagagacggctgaagaaagagcactgtccactcgtgtagaggacatgggtttgcttcccagatttcactcagctgcttacgactgtctggaactccagttccaagggatcggcctccctcttccagcctccgccagcctctaggcactcacacagcgtgcacacagacacacacagaggcaaacattcccaggtgaaataaattatctttttaaaatgccttaaatcagagaaaatggtgggttttcaggtttaaaatacctttattatgggatctgcaaccctataggtggaacaacattatgaactaaccagtaccccggagctcttgactctagctgcataagtatcaaaagatggcctagtcggccatcactggaaagagaggcccattggacacgcaaactgtatatgccccagtacaggggaacgccagggccaaaaaaatggaaattggggggtagggaagtggggggggagggtatgggggacttttgggatagcattggaaatgtaattgaggaaaatatgtaataaaaaatattttttaaaaaaacctttattatgaaaacacaatatttcagaagcttaggatgataacttagtcaagccacagaagcaagaagacctgagtttggtgtgcacccacaaaacgctgggcgtggtgacacatgtaatcccagcactggaaagtcaaccatccctaactcttggtgtccagccagcccagcccagtcagagagcccgggtctcagcttagttagagtagcatgcaaaacaatattgtaaaatagaacacttaccacaagtgaagttcaggccgtaaaactcattgaccacgagaatctcacaacagtatttttggaatgtaaaataacccaggatttttaaaggaatgggcatttcttgtatgtttcttaagaaaaagagaaaaagaggaagaaaattcaataggttctaggaaatagttttactaaatgaaaaaaaagaagtctttatgttttctaatctaaatataatcttccatttctatggtaaaagtgatccttactgtaaaatcgtcaaataacatggaaaactgtaagtaaataccactacccagaaacaactgctgacattttggcgttgtggtataacatgtgtgtttgtgagactcacaccatgtagaactagactgttcacactcttggtgagctttactcccacctagatcccagtcacccctccatgtcagtcagcgtggtgttggcatctacctggcagcccatctcagtagagacctaatggctgttggcttgttctttctgtctctgtctctctttatctctttatctctgtctctctctctctctctctctctctctccattacttaaataaacatgcaagaaatcatacacctagcacacacaacatcatctgactaagcagagatctgaaggtcctaagggtgattcaagaaccagaatataaggagtataaggagttgggctgtggcgaagcacaccttataacctcagcacttgggatgtagagacaggcggatctctgtgagttcgagggcagcctggtcttcagtgttaagctcaggacagccagggctacacacacacacacacacacacacacacacacacacacacaccctgtttcaacaaaacaaaccaccaccaccaaaatacaaggggaaaagctgagcctgcaagcagaggctctctctcgggtttgagattgactgggtgttcctgccccttgttcctttctttatcctgtgaagcaagctcctttccactctgtctcaggaggaacttcccgctaatactgatcccctcttggagcactgtatggtttctatcagtaaccatctattatgggacctgtgagatggctcaagagtttggagcagtttttgctcttgtagaggacctaggttcaaatccagcacctacatggtggcccacagccacttgtaactccagttgcagagggtgcaacagactcttctgacttccttaggcatcgacacacatgtgatacacagacattcacacaagtaaaacaatcataaatatatattaaataatttctctttatgagactctaatcctaggtgctcaggaattcttgttgttgttgttgttttagttttttcaagacagggtttctctgtgtggccctggctgtcctggaactcgctctgtagaccaggctggcctcaaactttgcagagatggacctgcctctgcctcccaagtgctggggttaaaggcgttaaaggcctgctccactgcccggcactttgggatatttttaagtatcctatccctaaagaactcaccatgcagttgggcacatcgactgcacaccctcaatggtacaatagtatacaagagcacaccaacaaccaatgccacatgtccacctcacccttacggttcatgtttgttgtctctcctatacccaggtggttcccccagacccttgacttggagctactggcagctttccaagatgaggaactgtgggctgggaagggtagatggggaagaaattacagaggagaaggaaaacataaggaggcagatggcctaagcacaggcctgtcagccccacagtgcccctagaccgagcgagggtgggaagtggccttgaaatgagttgaccctgaagaaccatgaaaacaatcagggtgttttaaggaagtggatgcagcaccaacaggcagaatgaggagggtgtgactgaggcagcaaagaagggggagcaagctatggcaaaagaccaactatgagatgcaaagacctggacagggtggtggccccagagggactgccctctggggcctgccctgctgtgtactgctgctttgaggtcaggagtgtgccctcatctctccctgtgcaccgagctgagcacaagacacgtgccccgtgtgcacatatacttgatatcaggaaggaaacccacacagcctgcacctgacccctgtgtacagcccaaagaaagtcgttcacttctttgttcagtctaaccagtgacttttgcaaacttaattggctctaggtcctgcgctgctcactaaggaagactgtggtgatgaatggtacatgctgctgctctcaagaccggcagtcttcaatattaaagaaaggatgcagtgtaagatggccttaatggtgtgtgtgtgtgtgtgtgtgtgtatgtgtgtatgtgtatgtatttgtgtgtgagtgtttatatttgtgtgtgtgtgagtatgtgcgtgtgtgtatgtgtgtgtatgtatttgtgtgtgagtgtttatatttgtgtgtgtgtttgtatttgtgagtgtgtgtgtatgtgtatgtttatatttgtgagcatgtatgtgtgtgtgtatttctctgtttatgtgtgtttgtattgtgtgtatatgtgtgtttgtatttgtgtgtgtatggtgtgtttgtatttgtatgtgagtgtgtgcatgcttatgtgtgtatgtgcatgcttgtgtgtgtatgtgcatgcttgtgtgtgtatgtgtgtgctcatgtatgtgtgcatgcttgtgtgtgtatgtgcatgcttgtgtgctcatgtgtgtatgtgtgtgctcatgtgtgtatgtgggtgctcatgtgtatgtgcatgcttgtgtgtgctcatgtgtatatgtgtgtgctcctgtgtgtatgtgtgtgctcgtgtgtgtgttctcatgtgtgtatttgtgtgctcatgtgtatgtgcatgcttgtgtgtgtatgtgtgtgctcatgtgtacatgtgtgtgctcatgtgtgtatgtgtgtgctcatgtgtgtatgtgggtgctcatgtgtatgtgcatgcttgtgtgtgctcatgtgtatatgtgtgtgctcctgtgtgtatgtgtgtgctcgtgtgtgtgttctcatgtgtgtatttgtgtgctcatgtgtatgtgcatgcttgtgtgtgtatgtgtgtgctcatgtgtatatgtgtgtgctcatgtgtgtatgtgtgtgctcatgtgtatgttctcatgtgtgtatttgtgtgctcatgtgtatgtgcatgcttgtgtgtgtatgtgtgtgctcatgtgtatgtgtgttctcatgtgtgtatttgtgtgctcatgagcacacataggagcccagaagaagatgtcatgtattcttctctgtctgtctccatcaggtccagtgagacagggtctcctacagaacctgaaggttgtgatttgggggccaggctggttcagcaatccctctgtctctgctggggctacaggccatgacttttgtgtggatgtggggagcccacactcaggtcctcctgcttgcagaaagcctttttctctctgagcaccgcaccagccctttaagctaagtaaacaaagccatcaccattcccttagggctccctactggatcccacatgtagtgttgcctggacagatttaacactctacatctttagaccctttctgtgactaattgtaaaacatatgtgcattgcatgtgtgtgctcttggttataaaatggtatatgataggaaaattatacagtaaaatgcaatgagaaattaaatatcatccagagaatttcagtgttgacctttggcacgtgtccactaatctttgttctcccttgaatagctctttatcctgttggctctttccttacttgactgattttaattccagagcacacatgcttgccttcttgctggctagtgcgaggacgggggattagccaggtcagccacatccccttcactagtgtacagggttctgaagagatggcttaactgtgtgagagcactcagctgctcttgcagaggtcctgagttcagttcctaccacccacacggtggctcatgaccatctctaactccagtttcaggggatcttctgccttcttcgggcctttataggcaccaacacatacatggtgcatatacatacatgcaggccctcgagcacacacatgaaataaaaataaaaatgtttaaaatgggaattgagcgttacttgtaccggttagatgtgagctaaagtgcacagtttggctgtaaattgggctgagagtctcctagagaatccagattgctttgtgtcttttgttttcctagcggttacacgtgaggcacagcagtaacgtgcttacgtggttgtgtcctgatttctaccgagaagacatctttctagcaaactgaacagttcaaagcctgaggcaataatggttggcaagtggtagagccatcccagactacaagcgctgagtctaagcagtgtcactgagctccctggctttgctcgatgacagtcattgttaggtgatccttgtccgtacatcctgccagacagaaatcgctccaatcatttcttcttacctgataaatccagatccaataagcagcccagagatgctgagcagagccactatactgttgacaatattagggttttggactataccaagcagcacaagtgttagaaattctccaattaagtgaggggccaaaagagcagcagagaaatatccaaatctggcaacttcaggatacaagcccagagtcctagaaaaacatgaggtctttagttttctccccacacactatcatttaagacaaggaccatatttgcctcccgtgactaccccttgctggctggtgggaggtggaattagcagggggagccacagtcccctttgccagccctcataggaacaaagccgacattttacctacttattaccacagttgcttctattgccttcaactcagtgtgcattgcttgttacagctccttgagctctcacggtaaaatattaaattgcttagacaacagcctcccaggcaggcgtgtgcagggctgttgaactctcctggtctcttcataaataactgtggtcttcctgccattcctaccccaacgcccagggctcccccaccgtgccgccctgaccccatccctattctgtaggatcattgccagcatgcagtcgctcaccatccacacattaccctcccactccatctctgtagtgtcatttattctaagagccttgatttgaccttcctatttttggaaacaagctaacctacgtctgtgcactttcctcgtctttcatcaacttactctcaccggcgacagtgtgtctttgtacggattccacccaagaaagttgaacttttggattgtcgtggcagccaatttttatgctgtgctattgaacccaaggcttcgtgcaacttaggcaaatgctctatcaactgagccacatccccagccctgatagtgtgttttaaactctcattagacttgggggcccatcagtctgtttgtagagcaaaggaaagaaaacaaaacaaacaaacaaaccaaatgcatgtttgatctgcaatgtgcagcctccccgccagccttgaagggtctcctttcccttgctcaaatcaccatggttttttattacgttaattttcttctctgtcttgtggttcttaaaacagtctgctgcctttgacagttttatagtgagggcaaggatcagtctccaccccagcgttttccctcagtcttttaacttccttgacacggaagtggctcctggtcagctggtctccactgcctaacctcagccactcgctcgctcgacagtgatcagaatcttccacttgcaaaaattcagcctgacgttttcaagcctggcctctgcccctcgcccccaggcctctctgactcctgtgcttgctcccctctatacctctgtcctaggaaccctgcccacttcaggggtcagaagtcaccatggccttgctgtgccaactggatccgctcttccacgtcgctattttgccttagctggctttgggatcccctaaggttttctctttacatcttggggtccaggggaagatcatcatggtgcataaacctgtatttaagttactttctctctcggtgccccaatctcactctcttctccattctcagaaagagaacttaccttctgttatatgaatttctgtctgcctatctatctatcatctatttatttatctatgtatctgtctatcacctatcatgtctgcctatcatctatttatgtatatatctatgtatctatgtatctatctatgtatctatctatgtatctatctatctatctatctatctatctatctatctgtatttcactttctctctgtgtctgtctgtgtctgtctgtctctgtgtgtatgtatgtgtgcatgtgtgtatgtgtgtgtgtgtggtgtgtatgtggtatgtgtgtgtatgtggtttgtgtgtgtgtggtgtgtgtgtgtgtgtgtgtgtggtgtgtgtgtggcttgtgtggtgtgtgtgtgtgtagtgtgtgcgtgtgtgtggtgtgtgtggtgtgtgtgtgtgtgtgtgtggtgtgtttgtatgtggtttgtgtggtgtgtgtgtatgtgtagtgtgtgtgtgtgtggtgtgtgtgtgtgtggtttgtgtggtgtgtgtgtgtgtgtgtatgtgtggtttgtgtggtgtgtgtgtgtgtgtgtgtgtgtgtgtgtgtgtgtatgtgtgtgtgtagtgtgtgtgtggtgtgtgtgtgtggtatgtgtgtgtatgtggtttgtgtagtgtgtgtgtgtgtgtgtgtgtggtgtgtgtgtgtgtgtgtgtggtgtgtgtgtggtttgtgtggtgtgtgtgtggtgtgtgtggtatgtgtgtgtatgtggtttgtgtagtgtgtgtgtgtgtgtgtgtgtggtgtgtgtgtgtgtgtgtgtggtgtgtgtgtggtttgtgtggtgtgtgtgtggtgtgtgtggtgtgtgtgtgtggtgtgtgtgtgtgtgtgtatgtggtgtgtttgtatgtggcttgtgtggtgtgtgtgtatgtgtagtgtgtgtgtttgtatgtggtttgtgtggtgtgtgtgtatgtgtagtgtgtgtgtgtgtggtatgtgtgtgtgtgtggtttgtgtggtgtgtgtgtgtgtggtgtgtgtgtgtggtttgtgtggtgtgtgtgtgtgtagtgtgtgcatgtgtgtgtgtgtggtgtgtgtgtgtgtggtatgtgtgtgtatgtggtttgtgtagtgtgtgtgtgtgtgtgtgtgtggtgtgtgtgtgtgtgtatgtggtttgtgtggtgtgtgtatgtgtagtgtgtgtatgtaatgtgtggtgtgtgtgtgtgtgtgtgtgtgtgtggtgtgtgtgtgtgtgtgtgtgtgtgtggtgtgtgtgtgtggtgtgtggtgtgtgtgtgtatgtgtggtttgtgtggtgtgtgtgtgtgtgtgtgtgtgtgtgtgtgtgtgtgtgtttccctccatgactaggttcacttgcacccacagtgccatgcagctctgacactcccgtatacataactgggcataactactttgggtggagtgttcatctactcatgatctgtttgcctgcgtgctaagtttgcagcgctggagaatctaactctggactctaggagagccttctcatggagctacacctcaagtcctcaaatagatttttaatggttttccttaccatattctaagacaactactctttgtcttaaactctcagcctaatgagagtttaagacacattgtcaccggtgacaacaatttgatgaaagaaatatacaaggaacttataaggattaagccaatgtccctcttcatcctaaccagtaccagctcatatactcactgctcctgtcagctcatgccctgtcgccctgtaaaccagactgcaacccactgtgctctagacttctggaacatgtcaatgggccaatgacctcctcatgttatgccttccctccttcaacctgtcctggtactgagcatgctcatagtgcatgtgcctcacctctgtcctctgagtaaaagtgcctcctgagagcctaagcctgcccgcccttggttgtcttacacttgcatgcgtgcagcttatatacacagttcatgttgcatagcacgggaactgcagaggttgcagctaggagcacctgcagaggacaccaggcagtgaagagagacagtgtctcagagacctgcccggagtcctctctcccttgtcactagtggagtcaggacaagtccacttgtgtcctccgtggcttcctacagcagagccacatagggaagagacagggcagagacagatggggaaccattctaagctctaagcaataaaggtctaagagataaagagcaaaacccgcagaagtgatgtggttcccaatgccttcttcccatagccattgtcttccctgaagccctctctacccaccaaactgtgatgtgcagctccatcagcaaagcttcaggccgaggggctgctatgccctggggaggccagctagcccgggcacctgtgtcccagcttcttgtgaacacctcttctgtagcccagaccctcagagtatgacacagtcgtgctggctgctcttgggtcccaggcagccctcggggcagggggggggtgccctgttattgcatagacaaggatggagcggttctccggggagctagctgcatcacacgtgggccatcacctccgtgaccccacgaggaacctggctcaggggatccgaatgcccctggacaccgccttaccaataacacacactgctgaaaatgaccgtggcgatgacgctgaaggggaggacgtgtagcacgtaggcgagcagcatctgccacttatgatacaggccatcctgactctcctggtcgctgacggctctcagcatgggaactggcatagaagagaaacagtaagtcactgcaccgctgagggagggaaggctacccaggctgaactcgacgtcagccaagatggtggccagaatcacgaaaagacaatacaagctcccacctcaaaaaacctacatactacctgggggcagtgtggtagcaaagaccccacactttgctctcttctctctgaagtaataaagcgcacagaaagggggtgtgagtgagtgactcagagtcacttgtcctctcttgcaggatcctggtccccacagcagccaggacattgcttcccaggagctggaaaagcctggtagaggcagaggcttaaccatcaccctcctccccgtctgcagccaactttccaaagcaccggtcttccctcttccctgcccttggtgttacattttggaagttcctccaatgcctattctgcggcaaaccatagcgccaggcagcacagtgctgcctctgggtcccctctgggtttaaaaattaggtgttggcgcttccaaaataggatccagcatgataaccgagtctgtgccaactgaaagtcctgttctaacaagagtgaaatgttgaaaatctcttttcaaattctgtgtcacatcacctggcgttttctgggtccttcaaccctcagagatgcccatttggtgagctcacatcaaggggatcctacagtaaatcacctttccttggagaactgagggaagggcaggcttagcttagagaaattcctttctaatggtgagcttttggaaggcaacatctggagcagacagccttgggggagagagctgcacccacacacacacacacacaggcacttacacagattcacagcattgagcatgccggtgtatggggtggcacccacaagctgatagagcagccccacgcggtcctgcacagcgccctttagcgtgttgttctggacgcggagaaggtagaaaatgaggaagaggcccatgatcagattctgaacgagacgcataatcactgcctgcttattcctcattaagtttcttgttactcgcctgaaaaccaaacgagaccatttcaggtcctttatttcatcattgtaaatgagtgtgaagagctaagacagcccttggctgtgtttccaaggctcttacctcagcaggacaccaagcttgccgaacatcccaggaggatcttttgttttgaaaggaaccgtgggtaaggttttcaggtatcgtgctctttcaatgttctccagaattttgtgatagatgtcagattccttgaaggcacattccagcatctgtactcgcttgtacgtttctatttcccgctctctgctttgggtgtccactgatgtcaagtccactaaaagttttccccaaaacatatgtgtttctaaatacacatgcacacacacacacaagcacacaatgggcaatcatacatgattcagcagccactctttaccctatctcaatggagaagctcttatcactaatgactgtctggtatactagaatgtctacagctacccagaaaggccatgagcatcccatgacaactgcctgggaggattccaaaatgcgactagtttttctctgacagtctgcgagagaagccccatcgtatgctctgctcagtcagtagaggcaggttaactgacctgccaaattaactccttgaaaaacaagagaatatcaaaacaaaggcataagcaaaagtcactaaaccaaaagcctagaagagccggtgtcatccatgccaaaatcaaagataaggaagatttagggctggcaagatggctcagcaggtaaaggcgattgcaaccaagcctgatgacctaactttgatccctagaagccatgtcgtaaaaggagagagccaacttctccggttggttgtccgccaacctctacatgtagactatagcacaaatgtgcatgtaggcacaggagtgaatacacacacacacatacacacacactaaaaaaaaaaattaaaaaatatttccaaacagccatgttagtaaacatttttaagaatacacttactgtaaaaatcaaagggattggaatgttcaggacaggggtaaccacagttattgaagaagccaagcatctcctctggggtgccacagaacaccaactctccgtaagtcaggatggcaattttgtcgaagtgctgcttggacaatagatggtgttagtgtgtgctccaaagcctgggttactcccatatatgggtgttgttatatgcctctgagtcccagaatcaatcacacttgggccactgagagagtggccataagcaaccagagtagtgttttgtgtgttgcttggttttgaaatattaaatcattatcaattgacaaacaaacaaatactggctaactaaaaggatgccatgggtatcaaatgaaatttctttggggtaaagtctataatgtggtgatgaaatggggctttggtggctaactaagtcatgatgccactgccaggtgcctcccctccccgtgtgtgtgtgtgtgtgtgtgtgtgtgtgtgtgtgtgtgtgtgtacatgcacgcatcaacatcatgtgtcttgcttaattactctccatcttgtttgagacagtgtcccttactgaacttagggattcagctagacaaaatggccagcaagccccagagaccttcctgcctctgcctcccttgccctgggtaccaacacctcagtgcccagcttttacagtcatggggagtccaaactcagagcaagcacattaccaactgagccatctctccaagctgccactggcagcattttaccaactgtgtgattctggctccatttcaagtcatttctaacttgtccccttttctcccttcaagtgtgtatgtggatgcttaaccccaggattgctttgtggactaaatgatggtggcctgaatgagctagtgtatagactatgcttggcatgcctttggtactgtgtaaatcagcctgtgttctctcattactggcgtgtgctctttaccctgccctgccattcccggttcaagacaccatgctcctaccattgggttcagtgcattcccttacttggaagagctcagagcgaggctggtggatggtgacaatcacaattcggtccctgcgagccagctcagccaagagaaggacaatttgatttgcagtcatgcagtccagtcctgtggttggctcatctagcatcatgacctctgccggcaaagaagggtcaggtatctgaaccactgcccagcatgctctgtacttaaacctcagtgtttctgaccagtccttcattgagacgccgtaccccatccaaactgcgtggtgagaagtagccacatggaaactggctttcaacctgagcccaggagaaagaacctgacctgggacgacccagctctcagctctggagcacacctggagataggagagagaccgtatcaggcctctttgtactttggactacttgggctccatgcctgggacactgacagagaccagggctagcaggcaggcttagggagggtaaggaagtagctaacgtttacctagcccaaccctgattcataccagggcactttgcaatattaatgaggtctggtctttgcacagcagaaggaagaaacaaggtctgaagtgccagtagctggacaggaattggctgagctccttagacgctttaactatatcccatgtctgcccaagaagtgacaagggtttttttatcgtctcctgaccaagcgccgtcagaagaggcaggtttattctaatgcagagtaaagaaagaatccaggtgcaaaatgacctcttgaaggagcacgtgagtggtaaggttggtcaagttgggagaatgagcaaaccaggctgggggaggcagaggactggctacctcaccttcataacctcttccctagtggaccacagatacacaaacaggatactcttaagagatgttcagggtgaatggtttttgtggtggtagccctaactctgaataacctggtaaccatggcaaccataagctgaaggtgcatttaatacacccaacctaccgagcatcttagctgggtaacagtgcactgcagggccagtcatttcctctcacgggctcactgctgctacctagcatcatgaggggatgtgctaccatttatcattagtctgagagaggatcaacggtcacagttcagttgcgcatgtatcactttcacgtttctgtaaagctgacctgtgataagttaagggactgtctcccaattacaaaccctcaccaggaaatgaactacatgacactttctaacattgggatctcgaattttcgaaaccctggggaatcccaatcctatacaaatcatttttacctgggaactgtgaggacagagcctcaagcgcacaaggacccctttagcatctggtgaccggtttgtgtcccacttactggggtcctgaaggagttgggctgcgatggaaactcggcgccgctcgccactggaaattcccccaaaattatagctgccaatcatttggtccgccacgtggctcaggctcagctctgtcatgactgcctctacctgtaagagacacaataccccagggctgccacctgtatctatggctgacacttcagtttctgggctgtgatggccccagagagataacactgctctaaagtacaagggctactttcagacccaccataccctggggagaaaagtccattagtaaaatccaccttagtttaatacataatacaccggtcagatttaaataaaagttttaagtccctgggagacaaaaaaaaaaattgcttattcttgcaacagaaaaatgtcccaaaggcatcattatgacatagattatgttaagtatttgggttttgaaattttattatcataaacattttctgtgctttaaaaaaaaacaatttggtttgaagtggcccccttatcccctttgtaacgaagtaagtcctggaggctcaagtggccaatcacaatgtggttttacatcaaaggaatataatccaacctccaaaagtaattaaaagccattctaatctttactcaaatctctccgggaaacttcaaagagtccccaacatataatccgcagctctgtgcttgtccaggcttctaattccccaccaatcctctccattctcctaccctgcggctccctgcagtccgcttcttattccgactctccacaccataacattccaaaacagtgctcactggcttgctaagaaggctgccctttctccctccactgcttcggtttactgcagcccccagagacctttgggaaatctctacctctctccttcctcgatccctgagtctgcaggaagccctgggggaagcaggggcaggaatgaaataatatagccaagaatttgttcctagctgcctttaatgagattgtgtccctttcaaaatgaaaaaaaaaaaaagagagagagagagaaagaaagaaagaaagaaacgggcacatttcttcgaaaaagagccgcaatatgactgcaggcaaagagatgtagtagcttttggagcagagttccagggaagagcagccagagtcaccagcgtaaatgaagccctggcctacagacgatgcgaaggagaaacgaggctatcagaaagccagtaagatctgatctggaaaaaaaacacagagtctcctcttagagtcagatggaaggatcccagaacggagctttgcctgactcgtgggtgctctgaatggaaccctgcttggtcctctgaagaaacagccagtgctcttagccacttatctacagagccatctctccagctcccttctcaaaaaactttctcctatcattttagatttaaagaaattactaaagcaagcagagagacagctgcagagggactacatggcttgtctcttcctctgtcgcccggctagacccaccaagccacgtgaacatgtttctgcacaaccacctcccaggagagtatacatgtcctcctctcagactgtatggttctcaagaaagcatggagtcagagggtgtgggttttccccatggggtggagatgaagttccctcccccagctaatattagatatcagtgagataatattaatatcagtgagatactgtatttgtacaagcctgctgaatgccagccagagaaggcaccagagacaggacccatgtaacacccctgagctctctgggtaaccttagtgggagagatagatggctgaggcatcgctctgtgggggctgggcacctcccgccaactgcctccctcagctgtccaggattcttaagtataagcagtctgctcactttcccaagagctcggtaagacgcccacctacttcctagggagctgttcctgttgcaggtgacagccctgcctggtgctatttttttcccaagtttcccaggccttcatagttcagactgaaggaagcaatgtttctaactaagatcaaggtgaatttatttacagctacttgcaaaatgggtgtggccaacaatcaaacctagatgaaaaatgactccatagtttcttccttaatggaagaaacttagtctcctttgcatgcatgaagccccgttaaagacaagatagataagcgggtaacagcaccgaccacctgaattggatcccctaaagccacgtgatggaaggactaaaccagaggcataaccagacttggattggagtggtcacgtttcagatcttcagacagctcatgtagctgccgcttaggatggcagaggtagaggtgaatacaagcgtgaagcaaagattaaaaaaacaaacaaacaaaaaaaaacccgaaacaaaaaaccaggaggaccaggggaccaggggtggccagaggaggagctggtgaggcacctggtcttgtcccttggggaactggccttcactcagctttaactttcaagtaccttcttgttgtagaagtccgcggagctgcggcagagggccagcatcgctgtgtatcgcaacgtctcgcgcacagtgaggctgctcagaaaaacgtcgctctgcaggaaaggggacatcagggtcgtcgaaatcccggggctaggggccagagcccgggcaggctagggccagggacacgcccacctgcaggacgtaggagaagcagtcttggaactggtccctgcgcagctcgcagccattcacaaacacctccccttccagggtcccagtgcgccgcagcctcccggagatggcgtccagcagcgtggtcttccctgagcctagggggcgacaagagaaggccctggaggagcctctgcacggtgagaatgggggcacttctccagaccttttgtgtttcaatgggaccctgactgcaccatggcccctggtcaaaatcccagggtctaaataaatctttccagtttatcctctgaatgaactgggacacgcctagtaaagaggccaaacaccacatggatttggtgacaggaaagcagttctcttgcccttggtaatgacagaactggaacccaggtctgaagaagttttgtatttagataaaatgtataaaagagggctcagatggcagggtgcttgcagccaaacctgaggaccttatttcagtcccagaggtgaaaggagatcctgaattatcaaaaattgtcctctgactttccacatacaccatggcatgcatttgcccgtgcacatacacacatgcataaataaatagtgggggaattttgggttgagaaaaatgcaggttgctgggaagtggtggcccagggtctgaatcccagcgctagggaggcagaggcaggtggatctctgtgagtgtgaagccagcctggtctacagagtgagttcttggacagccaaggctacacagagaagccctatcaaaaaaaaaaaaaaaaaaaaaaaaaccaaccaaccaaacaaaaaaacaaacagaaaaacaaacaaaacaaaacaaaacaaacaaacaaaaaaaacgtgtgtgtgtgagagagagaaagagagagatcccagggagggctgttggaagcatctggtgcctaggacataaattcctttttgtgatcccctaagcctgtccagctctgcatgaatctagatggccttgctagagccttctgactcttctgactcgtggtctgagaccctgaaacggagactcacagacctattgaatgtgactctgatttttaacaagttcccatgagtattagagtgtgagggacactggcttagcagcctttggggaaagcaacctcagcctgtaccaagagccttggctacagctagccagttactaccccaaatgctcctgcagagttctagaaaagcaactgcctgaaccttgaggtgacagaggaacatgcatctctgttttgttttgtttccccaaggtcacatcatacacaggttagcctgggttccagaacccctggagacaggacagacttttcctggtgattcctgctagctaaccagacttactaacaaggacacaggcaggaggctctgaaccaccttcgagagcaagggaattctgccagactgagccgctcacacagggccagacagaagatctcccatccaagagttttgtagaaactgcttttgctatgaggggtccaaagataagtccctacagcaacgaccattgtgtctaaaccatgtctgacagaactcggagttagcacgcatgttcgggcagtgtggagcagaaaggggaacaagagcctcctttaaaggaatgggcttccagatgtcttcagtggtggtttgtaacctgtaaatgttgataatacgctgtttattacacttcgctgttcacgagactcactccgtggctcttctgcccacgcatattgtggaggctgtttgcaattgttttccagtgacattaagagtgtagttcatgtggagaaactttagcagttgtcgtctccccacctgtatttatgggtgttagctcaactgcctcactgcagaaaaggctcattatcacagtcagtgtatttgtaaactgcctgaaaccaacgtgtaggcatagaaatattttcttgtaataagagaaaaataaatcgtgggctgggggaatggctcagttgtagaacacttggttcaacctcctgttacacacagagaggtggggggagaggaggggagcagaggaaggaagaaggaagaaggaagaggagaaagaggaaagtggccctcagagggatttatgacctgatttcccagccgtgagccctgccctttcagtgaggtttctctaagcagagcctcaactctacaaggtagcgagatgcctcaacccctccttggcatttgttcctgacacctgccctttctctctgtctctctgtctgttggtctgtctgtccctgcagcttctcagcctcacacagagacctttaggcttccccctagccttctctttcctctggttctcaccaaacaacgccaaggactaacttactacataagtctggcagcgtaggaggtagatccttagtcacacacaaggtgactgaagcagaattacgaagtatattggaagctgataagacattgccctcacaactggagttagtgtacttaggaaagagcctgagggtcaggaagatggttcagttggaaaactgttcattgtccaagcgtgaagatgagcgttaaaaccccagtaaacaaagccagcatagtgacacttgtaatcctggcaccacagaggcagaaacaggagggtctctagggctcgctggcttcccagcagcctcgacgaatcagtaagttccaggtagaactaactcatagaccttgtctcagaaaacaagatgggaagccaatagtggtggcacataactttaagcccagaaatctggaggcagaaacaggcagagctctgagtttgagagcaggttgggtctacatagcaacttccagaccagccagggctggaaagaaagaaagaaagaaagaaagaaagaaagaaagaaagaaagaaagaaagaaagagagagagaaagagagagagagagaaagaaagagagaaagaaagaaagaaagaaagaaagaaagaaagaaagaaagaaagaaagaaagaagaggaaaggaaacaaaacaaaaaaccacacacacacacacacacacacatctacccacaaacaaaatacaagcacaaaaaagacacctaggttgattgcaggccttcacaaacacaagcccctgcacatatacacacacaaagtaatttaattaattaactaaaaatgtaagagacttgggagaaatcccacaacccttccattatttgagattagagctagaaaataccacttctggaaaagccagctgctgtaacttgaatataaaatgccccccacccccctcaccccccaccctcagcctcctagatccccagttgctggtactacttgtggagattctgggaactttaggagggggtgactagctggaagaagtagatcactgtagtgctcctcaggggtgctcctagggggtgctcctggggaactttaggagggggtgactagctggaagaagtagatcactgtagtgctcctcaggggtgctcctcaggggtgttcctctggtgtatcttgttcccacccttcctgactcctctctcagcttatcatccatcatgatataagcgtcctgcttgcctctcactgtgatgggctgaactcttagaaagcgtgagccaaaacacatctctccttctttaaaccatttatgccaagtgttttgcccacattgacaaacagctagtacccagccctcaccacagacagctctgtcaggcctttggtcttggctgtcagtctcttgaagtctgaggaatccacactcttgctcataagtcacctagtgattctttccaccatgattcttttcttacagtaacctaattagactaattagcaaattaactgttgctgttattatttcatttattcttcatctattgtcatatagctgtgcttggatgaatgctcatggatttaatctgaggctagaaatctgttttgtattgctataggaaaactcccgagactagacgctcaaggcagagaaatcatagaagagagagtatgtgtgtgtgtgtgtgtgtgtctgtctgtctgtctgtctctatctgtgtatgtgtctgttagtctgtctatctcagtgtgtgtcagtttgtgtatctgtgtgtgtgtgtatatctgtctatctgtgtgtgtctatcagtctgtctatctgtgtgtgtgtgtgtgtctgtggtgtgtgtgtggtctgtgtgtgttgacccacagtcttggagacttaacattcaaatgggctagcctcatgtgtctggccttctggctgcatggcaccacggtaggtgtcattgtgagtcaacaggttccgagctgcggcatgatgagacagaagccagagggacccacgtgtcagcccttctttcatagcaactttctctggtgagaaccactttggacactgcatgagctacattcagagggctacaccccgtggcccttcatcctccctagagcaccaggcctctcatttccacaggaaggacaagctcctgtcacagagctttgggactcactctcagctacacccaacagtgtcatacctgactctccccacagccttacactgcctgtttctaagagagcacaaggcaaggggacagttaaatgctgacagtttacaaggggctgctcagtcaagaacggtctgtgagtcgaatatgccagaatccttaagcagaggcattcagaataacccagtgttgcgaacactgcggcatgctacccagagcccctcttctgggccagtgtacccctccccagctgctgcagataggaaaatttacagctataggttttgcaggggcagaggaggaaacccctcagaggataatgacagttagtggaagaacacaaaacaaacatggaagtcacattcaaaggttaaaatctcacctggaaagaatagtgagacacggggaatacacacaggtgggctcagcgcagtgtgtgtgatgcttaactcctgaagagagaggcccaaagaaagcctggtgtgcttggtgtgctcggtgagactatattaacatgaggtcttttttagtggtatctgttctcaactgtgtgtctgatgaccatcataatgaaaagacaagtagggtcaggaatagaagttaagtcctgcctaacaactccttgacaaaaactttccagatgtgggaatatcagttgaaagtagaattgggggccttcgaaggaactccacaggaagaccaacagagtcaactgacctgggctcttagctctcctaggcctccctgcaccacagtcaatcaaacaatcaggaggggtggccaggagaaggtcagtgagcagaatgcaaagtgagaaagaaagtaaggaagaaagaaagaaagaaacaaagaaacaaaagaaaagaaaggaagaaaggaagaaaggaaggaaagaaaagaaagaaatatagaaggaagaaagaaaaaaagggagagaagggaggaagggaaaggaagggaaggaggaagggagggaaatacatttggggctggggtgctggggcagaaggtttactgagcatgcccaaggctctgggtttgctctctagcatcacagtcaatcaaacaagcaaagaaggcacttacgtgttaggcaggactttccactctttccagggattttcctcaagatttcactttggtactaggttctattggcagccagacaagtcaccagattgtattcaaatgccaaatgcatggctgcctctctacaacttaaacttacttcttaaacattgtgcttagacagagccaaagcctcccagagcctgccttagaagtacaggagccccggcccccccaggcacttacctgagctgcctaagatgcacataatctggccactctcgatgtacaaggagacatctttgaggatttgcctgtcccacttctgctggcatgatttgatgttccaccaaggcccgacacggttgctttaaaggaaatcccacaagggcaaaggcagagtagggtcctggaaggtgccagacccctgctcccagccctaccccatcccagttgcccctggacaggttgacaactctgttttagccttatgtaccactctgttgtccttggaggtataatgacaagttggccaccacccaaggagcatgcctcccattagctgctctgattactgggtctctgactgggagatggtacacctgcacactgctttcttcttgaagtgaaccctgcattccttcagcagtgttcattccattttgtgcccccagcacccccactctccgagccttctccatctacacaggacaggtggtgggcgagtcaaggaaggggagagcagaaatcagtgagaagcagcaagcggcttcaggcagggcatgttttaatgtccaggctctgccctgcgcaggaggaggaggaggaacgactcactgttgttacagactgtccactttcaccctgatctgctggacagacaacccaaagcccacaggcccacccacccattcagaaaaggcaatcagagagcctagctttttgctgtggaggtccccttacctgacgctgtaggacacatgcaggacacctaagctgtgccgagcctctgtgcccgtgaccgaaccttgctccagggagctcagagaccctctgttgatgtgaggccctctggctccctctggactcagaaagggcagctcacccatggctagcaggaagcaaatgcaagtgaattttctagtggcctgtccggctccagggcagctttaactgaggagccaatgggagtgccctgtccgatcctacccagccctggaatcctcgtgagataacagttcaccaatttggccaacgatgccattatctgatgtacctttagccagagtgtccttatctcgacaataggcagaacacacggtgtgtttataggagtgtttgccagagaggaatgctgggagaaaggctggcacagaggagggctcaggtgccccagctctaaggagcaaagacagagagagcccaacagcaggggaggccacacaaagggcacaaacagcactggtcatggctgagaaaaccaaagaagagacccagctgtggaatgggactgtacttcaggatgcttcggtgagtgagctctgccaggggggaggcagtgtcagactgacttttctttcctaccacaggattagtcctaatgtaccacctggacttcaagtagaatggaaatggggcggcagggccctgtctcctcagtgttgatggtctgaggggaacagtctcaggagccaggagacctctgaggtcacttccccacgacagcacgctcctgtgaatgaccgggattgatgttttccaaatgacattccatcacagagcgttgacccatgtgactgtcagaccaagaatctcagtggtagtcaagagacagcggggaggtaacaacagatcgctacgcttgccatacttatgtagtaagttagtccttggcattgtttggtgagaaccagaggaaagagaaggccagggggaagcctaaaggtctctgtgtgaggctgagaagctgcagggacagacagaccaatagacagagagacagagagaaagggcaggtgtcaggaacaaatgccaaggaggggttgaggcatctcgctaccttgtagagttgaggctctgcttagagaaacctcactgaaagggcagggctcacggctgggaagtcaggtcataaatccctctgagggccactttcctctttctcctcttccctcttccttcttccttcctcctcctctgcccccccacttctcccccccccctgtgtgtaacaggaggttgaaccaagtgttctacaactgagccattcccccagcccacgatttatttttttctcttattacaagaaaatatttctatggctacacattggtttcaggcagtttacaaatacactggctgtgatagtgatcgcttgtttgggagcgtcagaattgtgtgcttgcagtcttatggtctgggagggaggcagagtggacagagagcagcgaggtggccaggaagtggagctcctaggcctccttcctcattaaccggagaaacatttgcttgataaatggcctttgactcgagttgtgggcaggatttgaagcagaaggcagtatgggaagacagagcaaagacgacctccccctccccccagcttctacacccggcccacttttctggagacaaagaccagaacaggatggccacattcaacagggacgcctcagtcccctgttctaggggagacaggattgcctgagattgaccaatcctactaccacagcaacaggcaactctgctgtcagaatccccatgaggcagacgtctatggggaaataactccttctacgtctttgatgctcccttcctgagtaggatataaaatcagtggtgggtgtgggggcttttgcccttcagattacagctaaaaaggcaatgagctgtcagaattctatattcaaaagtgtgcctaggtcctgccacctacaagttccttctgtgaggtcccactgttgtaggtgccctgtgatggcccgccactgacaactgcagggcttggggtgggggggagacaatgacactgatatgccctgtgcctccgttcttaaaagctgtcagtcaagctaaaaactgcccagtggtttccagcctctcatctctgtatgcaaatttagaaaactgagcatttcttgcggagctggctggcttctgctccatgccgtggccatccatctcctcctctgcccacccagcatctcactctacaaagaactcacatagcggccacaccgtctttctactcatattcgagtcaggtcttcacagagaccggcactacccatactcagtgatggcctggaaggagggaggagatcagggctatctcacagggaattctggcactgagtaccagggcgccaggacccatggtctacagctcctcgcactgcagacagggataggaaagcctggactctaagcagaggcagatgagatggtgtctgcaggggtcaacagagggccaggtatgtgccttgggccaaagacttaccatatatgtccccaccaggcaccactgttttctgcacatttctccctttttgtgccctctggattttcccatgtgtctgtgcttctgactcaggaatgtaaccagaagttaatacaaggagacgttacattgtagcccagcaggagccacactagttacctacaaataaacccgctttcacttttttagggtgtcacctgtcacagattcaaatgatgttctgacagtcgtgctgattaatgtgtcagccgaatagatatttaagggtttgaaaaatagagagaatttgtcaaaacctcaggaatccttcctgggtgccaaggaaaatattttaaaatggaacagaagtcatccacaagccagacaggatatattttttttttcctttcagaagctgagttgactgtgaggctcctggaaacccagactctccgtgtggacggggtcagtgggtttgagtgagtcagagtggcgacctgggcactaatcaactgcatccctgtcttccactctgtcctctctgtctgtctaacccccccccccccaggtcttcacattagcgcagtaacctgagagctttcctccctcagtagcccctccactcctgaagccaatggaagaaactttgtatcagtacaagtgtctaggaacaaattcctagcccatgcaagtaactaagatctctcctaaagataattgatttgaaaacaagaaaccccagggaccccggatgtgttgctatggttctgtcagtatcatgattggcctagtatatttgatgctatggatttgattccccaacacacacacacacacacacacacacacacacacacaccccaaaagatatctccaatatattcctacttcagagagatgaattatattacagggtaggggatggttggcagtcagatcctgggcatcaaaatgagatgggagacataaattctagtgttctgaagcacagcggggtgaccatagtttaagccattgctattattattttttagtaaagatcagagaatggagctggggtgatgctcaaacattaaaagcacctgagaatacctggaccccattcccatcacacacagatggttcacaaccacccataactccaggtccagaggacccagtgacctcttttgacctctgagggtgccaggtatgtgtgtggcgcacgcacatgcatgcaggcaaacagtcatacacacaaaataaaataaaaattttactttcaaagcaaaagacccggagagaagaatctgatggtttccaacacaaagaaatgagaaccggggaaggcgctctctgcatgtgacccttacacattgactacatgtctcccagcagggcctccaggacagcttgttctcctcggaaagtgacaacagtctgtacttcacctacagtggtcagtccaacactctggaggtcagagatctcacctaccaggtaggggcacgtgcctgggttcaggggagaagggtgggcagctaacaaaatgttcaggagaaggaagggtgagcccactctgtaggttctctaatcccaagggtgaagttcagactgtcctgggcgcaagccctatctgcagctagaggtttggaaaagggtagaacccctcgtgaggatgctagtgttcactgtgaaggcctgtggggatgtcggtactcataactttaaaatttgaaatccttctctagatatagatatagtgtgtgtacatttatgcacatatatttttatgtttgtaatattatatatatatcatatacataaaatatatgtgtttatatatacatacatatgatgtagctatacaatgtatgacatatatgaacgtattatatatctgtattagatgacagatatcaaaggggctggggagacagctcactcagtaaagtgcctgagctcagatttccagaacccacagaagacaatctggcctgggtggcacaagtctgtgatcctagagtctagaggatccttcatgtcattcagcctggccgaatctgtgagttacaggttcagcaagagaccaggtctcaaaagtaaagtagaaagtgccatttaccgctgggctctcaacacacatgtgcaaggtgcattcacacacaaatgtgcatgtacatacctgtagaaaacacacatagcaaacacacagtgtttgtggagacacactttttgcctggcttcccttgaagtccacatcttgcaaactacatagtaattatcaaaactaggaaattaacaatatgctcttaagtaaatgacagtttgttgagatttcattcacttagatctattatcatctatctgtcatctatctaacatctatgcatccatctatcatctattatctaacatctatctatgcatccatctatcatctattatctaacatctattcatccatctatcatctatatatcatctaacatctatctatccatccatctaccatctatctattatctagcatccatctatcatctatctatctatctatctatctatctatcatctatctatctatcatctatctacctatctgtctatcatctatctatctatctatctatctatctatttatgtacctacttatggtctattttttataaaatatgttgtcccattgcccataaaacatgtagaatgtgaaggcacccaggaagggcccccagaatgcctttgtcagaatgcaatgattccccattccccatttccccaggggcagaccacatgctgcccaagtgggatggtgaacttcagagtcccaagccagccttcttgtgcctctgagtctaaacaaaggaacgagccgctttgtaacctctctctgctctgccacgcactgtaaacagtataagcttgagagaattccttaactgctttgaactgctcagtaaaacagacaatagtacccacaccatatgcttgcaatgaacagtagatggataatgatataacgtgattattgtaatggcttgcagctggtaaacacttgctggcttttttttttcctgatatttcacatgctttctggccacccaccctctcagctctagacttgaacaggatggtggggtctcgctgccatgtttggtaggactgtggtgtgggatgcctcaagatctcttatgcatcagtatcgatcggggtgtctcctgtgagaggagttatacaaaatgcagtagacgctgctgaagccctctgaatggttcagtttcccaagggctcgctaacctctccccacaggtggacatcgcctctcaggtgccttggtttgagcagctggctcagttcaagataccctggaggtctcatagcagccaagactcctgtgagctgggcatccgaaatctaagcttcaaagtgaggagtggacagatgctggccatcatagggagctcaggtaccaacagaggctgtcaggggacaatggcttttctcccctacgattcagaacagccttcagccatgaatcttgcatgcagaaccctggactaagaaagtaatatggtaaaatggcttagagcacaggttctcagtcagatagacctgggttcaaatgccccctccctcacccaccaactcttagatgttgctgttgttgtgcccctgagtgagagtctagtccacctgcagctttggctatcgtgcgtgcctacagttcacactggactaagacgatacacaagcagctttagaacgtgacgttcttttcagagacttcccccaaccacgggtgcctgctcaacccaagtcaggtcatggtcagacaatgactcggcagggccgagctgccactgcccccttcacagtcctagcataaccttcaaccgcctgccaagaggtagatccttgaagtgtctcaggcagtcgctgtcacaggtcaaatctgaaattacagaaccttgcagatgagaggggcttggagaacggggttggtttcccatattggaccctacctcatacccttcctgtctggaagcattttagggagaagatttttaaatcatttatctagtcctccatatttctagaacgttctttgtgagaacatgcacacacacacttgacaggtgagaacactaactccaaaagagttgagtgagactcctaagggcaggaatttacctagcgcagatcttacactgacatctcattatgaatcccgggattcctttatgcaagattagagaactttatactttttagttaatcatttccagaagggaaaattgcccaacactttgaacatctgttccaaacttttacactcttctgatagacttgtttactgtctaaccaaagagcaaataagctacaaaatgtaaacgtactttgtaactgaaacaacatgcatactcattcagtccctggccctgaccccgtgatgctgatctaaacaggcaaaggatatttggactaataatgtctgatagcttgtcttgttggatctgtcttttctgggcaccccggagacctaggaaccattcctcagccatgatgccgaatactgttgaataagtatccatccggccccctggccagcagcaccccgacttttaagagagtgaagttccgagaggcagagcagggtctacactgactaacgcccaggttcgggcttagctttgcttggcttcaagattacttgactgaaaattttgaagcttttttagagagatttagtcatcatacgtcctgtgatgttgattcctttaaatactatcacacagggagaatatgaatatgcatagtagccattataataatttaaaaaattattctaaaacatctgctccaagcatttagcttgttctgtagaatcggccatacacaaggatttcgaagctaatgaaattcctggtgaggagacggtggccacattgcaaggctcttgggtgccatggctcttcagagagcatttgcccaaatgcaccaggcgctctttgctaggcagtctgcctctagcttttggccacagttttgtttaggaaatgtgatctccctgccctctgactggggatgcctggtgcctgtagggctggcacagtttccagcactcgcaaagtcagtgtctgaggccgaacaggcacagggctgaggtctctctctgtctctctctctctcatgcctagcaggcagccctggattgtaaacaaggggattatatatgaaggtccttgggtttgtggacatggcaggcagcatgtgacatatagcaaggagaatttgtcacagactgtctataggcatttgccttgtttacaaaagggggaaaaaagctattaattccacaaaccctacagagtgggaaaccaacaccttgctgggagactcaaacagacttttgtctccatcttggaacacgggagggtgttctccaagcatgaggcgggttcacatccacagttaaactggttataggtgagccaggtatggtggtgcccacctttaatcccagtacttgggagacagggacaggggacagggcaacctcagttgcatgtgagccagcctggtctatatggtgagttccagggcagccagggttgggtagtgagaccctgtcacaaaacaacaaaaaaaatattcattacaggcgtgcttttggaaaggagattcaatgctcgcttctctgcatcgataggcatgaattggtgttcaggagtggataacgggataatccttgtttgcaaggcagaagaaaaaaagacactgattttaaaaatgagagaagggtatagatatttggaagccaattatttttctcaaaataggttttaagtttttttttgtttggttggtttgttttttttgggtttgggttttgttttgtttttggttggttcgttttggttggttggttggtttggtttgtttgtttgtttgtttgtttgttttttgagatagggtttttctttgtagcccttgccatcctggaactcactctgtagaccacgctggcctccaactcaaaggttccccctacctctgcctcctgaatgctggctgggattaaaggctagtgtcaccaccaaatagctaaattgtagttctgagttcttcaaagacagactatgaatgctccaaattagtcattcccacaaagccacttccgagcccaatgatgaatgagacgctggccaagtgttttcagccaaagaaatagctactacactttgtagtgtaattagcaccaacttgggagaaagccgttggttagtggtgggagagggacagcagcaggcttgtagcagtaaggactacagcgtctcctatctgaaacctctttatcagtgtgtccccaatcactcaagatggccttaggaaaaaaagccggaccgtgcacctgctggactgtcccacccaaatctaagaacagtgttggtttccctggaatttggtggcttctgaagagcagttccggcgcttcgcgagtgggcagggaaggaggaagtagttgggggcaagcccggcagaaactctgccctcagggatatctctggatttgcaggctgcgggagagcctcactactcgacgtgatcacaggcagaggccacggtggcaagatgaaatcaggacaaatttggataaatgggcaacccagtacgcctcagctggtgaggaagtgcgttgcgcatgtgcggcagcatgaccaactgctgcccaacctgaccgtcagagagaccctggctttcattgcccagatgcgcctgcccaggaccttctcccaggcccagcgtgacaaacgggtaaccagttggctggttggtgtccctggtgtctgagaattccttggtttgccagaagacccagtctagctgggtagttaaaccaacccaccctacaagccaatgcgcttagccccaggggttcccttccccgcccgcgccccccgcccccaccttgtcaagtgggtgataagtgtgtgtgtttgtttgtgtaaggttttcctggtgcttcgtgtgagtggggagccaattatctggtctgattcccagtccacaatgtgtgctcttcagggcgaatctgctcagaacctggggacacggggggggggggcagggggggcggagggagcagagtgggggtcgccaaacaatgctgctggaaaatatactgcagaagccttcctttgcattaagtgaaagagtttgtgcagcccctggatgcccttaacgctccgcctgtcctcaggtggaagacgtaatcgccgagctgcggctgcggcagtgcgccaacaccagagtgggcaacacgtatgtacgtggggtgtccgggggtgagcgccgacgagtgagcattggggtgcagctcctgtggaacccaggtgaggcctgggaacctgaggggtgaaaacctgagcctacaacctgtccggcagcggcagcgtggtcattggactccctgtgcaatatccccaggaatcctcattctggatgaacccacttctggcctcgacagcttcacagcccacaatctggtgacaaccttgtcccgcctggccaagggcaacaggctggtgctcatctccctccaccagcctcgctctgacatcttcaggctatttgacctggtccttctgatgacatctggcacccctatctacctgggggcggcgcagcaaatggtgcagtacttcacatccattggccacccttgtcctcgctatagcaaccctgcggacttctacggtgagtggtaaaggcaaggacctggaacctggtgcacagacatttgctgacgccccctccaaacaaaagaaaacaaaaacaagcacaaaatccttactggaaagatctaggggggtccctgttatgcatgcccagatgagagatcgagctaggaccaactggtagcatgcaaaacgggaaactggtcagtttgccagggtcgaatgcaaggcactagtactgcagtcttctggacaggacaggaaggggtagaagactgcagatgggtgagcaggtacgtaatccaggagatcttggatccatgtgtggtctttatgaaggctgtaagagtgtgtgtgtgtgtgtgtgtgtgtgtgtgtgtgtgtgtgtgcgcgtgtgtgtgtgcctttgtgctcctcagaggcaggtagcataggtagagggcccaggacagggccaatgagtctcttaatatagattgctggataggtaggtcactgccttagctttttttggggggggggtggtgtcccaggtactcactctttcatgaagaacaccgtgaaccacttcattcatggggaacagtggtcttttcaggacacctgcatatgaaacacccatcaagagtgctgaagagtagaccagatgctgaacaagtggccagtgtactggaacctaggaaagcagaagcaatagccggtcctctaggtgaccaggaaccccagaagcttcctaggatagccaagtgctaacctccatggtctctatcaagccaaggtcaggtctgtttttgtagatgagctgaggaacctcatccctgccttactgtgttctagagcaactgtgggaacaggcccagggctcccgttggtgagcctggctctcagccttgactctggtccattccacccacactgtcaccccagcatccttggctgtcccaggaggaaaagctcctggctcctttccctgccctttgaactcatgccctcagtgaactcccatacaagccacctttcatgctcaggttgacatcctgacttccatgtgtcacactttggtcagtgtcctcagataaggggtcagaggacattcgccaatctggctacaaggggaagtatgaatgagcctgagagggctgccccaaaccaagtaaccatggcagaaacaaagacttcttttctgtcttcctttggagggagtaggggtagagtccttgtctaccagacccaaggcaggtggctgtcactaatatggggtgcaggagctgcttgtgtgggacacagggcacccagcaaatgtaacatttgagctacagcctgcacagggggagcctatggggtccatagcccctccctccctccctccctccctcccttcctccctccctccctccctcgaacctcttctcttgtattgtgcaatgcatacagatgagggaaagcgatggagaggacagccgagccatgcacggtcctggagtctccaggaggtagcactgcccgggctgcaactgctgggcctggcgctttctgtcactgagggggcgttggagggagggcagagcccattctcagctgcatgatgggactggcacatgcagggtgtggcatcttctcagattcccccagtaacctggtctccagttaggtgggctgccctagcctctcctggggcaaagcttagcataggcagtgagcactggatgtggctggtgcccagcaccctggccacttgaaattagagccagcatctacctgtaatgacatatctggctctgaaggtacctgcccactgtagaaatctctgtagtgatgggatgggagtggggtgggatgggtggggtgtggtggggcccctgctgttgcctactttctgatctgtggccctctcaaggcatctgcatatgtggtcagatcagccagagccaaggaccaggtctctgcctttctgctctgacc

SEQ ID NO: 17 - DNA, 63503 bp, Homo sapiens
caaggcctgaagtgtggcaggcatttgggttctttagagggtttaaagtaacttatttcttcctaaaaagtgacaagggggccgggcgcggtggctcacgcctgtaatgccaacactttgggaggtcaaggcaggcagatcacctgaggtcaggagttcgagaccaccctggccaacatggtgaaaccctgtctctactaaaagaacaaaaattagccgggtgtggtggcaggcgcctgtaatcccagctactcaggaggctgaggcaggagaatcgcttcaacctgggaggtggaggttgcagtgagccaagatcgcaccactgcactccagcctgggcaacaagagcgaaactctgtctcaaaaaaaaaaaaaaaaagtgacaagagctgttaaaaacatctctcttatttgccttctagtgaccaagcaccatttgaagaacaggccgtcctggtctaccacagtgcaaagaaaggatccagatgcagtttgtcctctccagctgcatgagtggcgaggtttccccaggtgatggggaaaatgaccaaacctggcagaggactgactactctgttttgatactcccttccccacaacatatacacttttgagtttatcattcaaattcctattttaattcctgccatttcatgaacacctgtggtcatatcaaaactcattggctttccccagcccacacagtggtattgccctggtgagaagaaatgattggcagggcaaggctccatattcaaggaaaaccccaatggaacacttcaacaccaatgcaacgcttccgggtccaggagctgttttgtttggatgatggaatcgcatcaggaaatgaactgtacagcatttccaaaaaaactgggtcctcagtttgaaaaacctgtgatttcagttgtacacaaacccctttccaaatgaggaccgtgaagaaagggcccaaagtatctgcacacacacagaagatgcccagacagcagctagtaacagttctgggtgccacttactaggatcctggagcagctgggctgcgatggagacccggcgccgctcacccgtggaaatgccccccaagctgtagttgccaatcagtcggtctgccacatggctcagactcagctctgccatgacggcctccacctgcaggagacacaaattacaggaaggctgggagtctctgtggctgctatttcaattcatgggctggggaggacatgaaagaggcagcacaccgcccaagaatccaagggccacttccagactcaccacaccctggggaaagcatgtctttgataataatatgatccaattcggcttaaatcgtaatacatgtgtcagatttaaataaataatatgaattttttaaaacgtccccagaggctgggtgcagtggctcatgcctgtaatcccaatactttggaaggctgaggagggagaattgcttgaggccaggagtttgagaccagcttgggcaacaaagagagaccctgtctctacaaaaaaaaaaaaaaaaaaaaagaaagaaaaaaacaataaattagccgggtatgctggcacgtgcctgtagtcccagctactcaggatgcttaggcaggaggatcgcttgatcccaggacgttgagaccacagttagccatgatggcaccactgcactccagcctaggtgacagagcaagaccctgtctctaaaataaaataaaataaaatgggcctggcatggcggcttatgcctgtaatcccagcactttgggaggtcgaggtgggtggatcacttgaggtcaggagttcgagactagcctagccaacacggtgaaaccctgtctgttctaaaaatacagaaatgagctgggagtggtggcaggcactggtaatcccagctactcggaggctaaggcaggagaattgcttgaacccgggaggccaaggttgcagtgaggcaagatggcaccactgcactccaacctgggtgacagagcgagactccgattcaaaaaaaataataataaataaataaacaaataaaataaaataagattccctagaacacaaactgcttacacttgcttcaggaaaattaaccaggaaacaacagatacttcattaaactcctatttgcaggagccatagtcactgcagcccatacagaaaaatcccccaaattcatgattacaatatcgcttactttcataagtgtttgggttttgaaattttattatcataaatgctttatgtgtttacaaaaatccaacctgatttgaactaaacctgtttcccactgtataacccaaataagtgctggggtcccatgtggtacaatctcagtgtgagtccacatcaaagacatataatccagccttcagaagtaattaaaaataattccaatctttacttgaatttctttaaggactttaatggggacccaatttataacccccagccacatttaaaattccctttcttccaattctcttcgctgtacttaaagcctgtaactccctgaaaccgtttttcctcctcattctcaactctcccaaaacaataacgactaaaaaaaattctttactgaatttctaatcaagaagcttggcttttttcctccctcactgtctttccttcctcagcttatctcctctccagagacctgttcacaaatctgtttctgtccccctgtactgattacctctaactgcagaaaccccagggggaaagcagaaagagacagaagatactcatatggtaataagttttgtttccagacacccctaataaggccgtgttatgaaaatggaaacaaaaccattgcattaaaaaacaataagctagattgcagaagaagagggaatgacttgtggaccaacattcaagaggagtcagggagtggggttgacggcatagatgtagctttgacccacccaaagaatggacatatctgaaataggtacaaaggaataatgagaaggtaaaaatgcataaataaactagatatagatatattctggaacaaaagaaagctcttctcttgccatcagggtagaaggatcctagaattaagctttgcttgacacagtgagatttctgtgctgaccagccagggtagattcccgagcctccttctcatctctgtaacatcataaggagtaagcttgcccctcctggcttggaagagatggacagagaagacatttacttaatttgtctcagaggtttcacaccccagcaggaatgctctcccacattttggaaacaaattttggaaatggaattcagagtccctggaaggactattgggatgagcaagtccaaccctccatgctctgtgctttcacgtaatctgatgtattcttcacatcaaacccaggagaaatgcattcttattgtattttttatagaggagaaaacaaagttccataacttgcccaagataatgccattagcaaatggcagggccaggattgagaggactctctgggctctctgaagtggtccaggaagcctgagccttagccaacagccccgcagacatagcctgctcacattggccttgctttatttccaggttcttccaaggacagaagcagatctgccatgctatctcctttattatcatcagcacttccttcccactgaattacttatcaggattttacacgctgtgggctggatttgctcagaaatgactctcaattggagagaactctgctatcgggagttctcctgctcccagggagctgtgccccttgaaggaggcatgtccacctgtcattggttccctgggtgcttgtgggccttcccagtctagagagaaatgaagcagtttccaggtaaggtccccggtgggtttacctgtggctacttccaaactggagacaattaagaaagagattggaacctagaaggagttgacaattcaatcatttcttccttcattaactcagtccagtttggatgaggcacattcaagatgcctccaagcaagctgagaaaaatcagtggcaaaaataactatgtctgttcaaacagggaacttgtagaacagcatggtcccagagaagggtaatgcaagccacagacagaagtgaaattttagtagccaaattttgaaaagtaaaaagaaacaggtgaaattaattttaataacatattatttacagccaaaaataccatttcaacctgtaatcaatactttttgaaatttatttatttatttggttgggagagacagagtctctttttgtccttcaggctggagtgcaatggtgcaatcatggctcgctgcagcctcgacctcctgggttcaagagatcctcctgcctcagcctccttagcagctgggagtgcaggcgcacatcaccacgtccaactaatttttgtattttttatagagactgagtctcgctatgttgcccaggctggtctcaaacttctagactcaagcaatcctcccatcttggccttccaaagtgctgggattacaggtatgagccaccctgcccgacctaaaaattcttaatgggctttttcacgttctgttttcctcagactaagagtctgaaatttgatgtgtattttgcgctcagagcacgtttcagtctggactagtgacatttcaagtctccaaaggcacatgtgactaggggcagcacagggtgcacggtgcaggacgcagggcgcgctctagagtgaaggagtgacgagcaaagggaaggaatgggcaagcgtaggcgaagagaggagggcagcggggggtgcaaaggtactcagtttgccctctgtgagcggggggctgcacccaccttcttctggaaggagccgggattgccgcggcggatggccagcagcgcggtgtagtgcagcgtctcgcgcacggtgaggctgctcagcagggtgtcgctctgcaggagactcgggcgtcagtgtagcctaagcccccggggcgggcgggggggccaggggtgtgggggacgcgcccacctgcaggacgtaggagaagcagtcctggaactgctcccggcgcagcgcccggccgttcacatacacctcccccaggaaggtccccgcgcgccccagcctcccggacatggcgtccagcagcgtggttttcccggagcctgcggggcgacaacagaaggccctagaggaaccactctgtgccggccttggaggagcttcccgagaccctctgtgcaggcatgaccccgcgggccatgagtgctacatgacggaccctgttctaggtgttaaggacacagcaggatacaggccctgccctatggaacgcgcactgtgcgtgcagcagtctcacgcgcaagtgagtctctggattgtcccctgagtgagaggggacatgccatttctctcatctgggtcaagaccgaacgtgctttctctgcttgtttatttgtctttaaaactgttttggattgaaaaacaaaatacttataggtatcagaataagaggaaagccaagactcttggaaacgtttggatcctaggacggatttctttttgtgcccccctggggtggtctggttgtacctggatgtaggtgacattgtctagagccttgctcacaaagcaagcagcatcagcaacccctgagagcttgccagaaatgcagagcctcaagccgcacccaagacctgctgagtcagctctgcttcagtcgagtttgagaagcactggcttggtaagtcctttggtaagaccaagttggccacagcctgcactagagcctggggcatagcctagctggatgtcactaggaagttcccacagaggggttgtggtgaactaactgcctgctggaggtgactgggggatgatgcttcccttggtttgcttttttcttgagtgagactgagtgtcactctgtcacccaggctggagtgcagtggcacaatctcagcacactgcaacctccgcctctcaggttcaagccattctcctgcctcagcctcctgagtagctgggattacaggcatgcaccactacacccggctaattttcgtatttttagtagagatgaggtttcaccatgttggccaggctggtctcgacctcctgacctcaggtgatcctcccgcctcagcctcccaaagtgctgggattacaggcgtgagccactgcttttttctaaggttaaaggttaggtgatgcctttaggacaagaacctgatggcccctcagtcatattggacacaagtttaccataggcccagagttcatggagacagaatagacctcccaggcctttcctatccaaggaggctgagaagttgggactcataacagagaaataggcaggaagttctgaactatctgggaagatagcaagagaaatctactgatgagatggcttgtgcagagccaaagagatcttttgttgaaatattattattattattattattattattattattattgagacgaagtatcgctctgttgcccaggctggagtgcagtggcgcagtctcggctcactgcaacctccacctcccaggttcatgccattatcctgcctcagcttcctgagtagctgggactgcaggcgccggccaccatgcccaactaattttttttgtatttttagtagagatggggtttcactgcattagccaggatggtcacaatctcctgacctcgtgatctgcccgcctcaacctcccaaagtgctgggattacaggcgtgagccaccgggcccagccctttatttatttatttattgagatggagtctcactctattgcccaggctggagtacagtggcaagatctcagctcactgcaaccgctgtctcccaggttcaaacaattatcttgcctcagtctcccgaatagctggaattacaggcgtgtgccaccacacctggctaatttttgtatttttgtagagacggggtttcaccacgttggccaggctggtcttgaactcctgaccacaggtgatccgcccgcctcggcctcccaaggtgctgggattacaggtgtgagcgaccgcacctggcccttgttgaaatattttaaagaaacttgcttgttgctgtgagaggtacaaagatgaatcaactcccttagcagttgtcttcttttctaatgcatcattgacaaaactcagaaatagcccctgcgtgttcaggaggtggacagagtggggaaagagaggaaaacccattataaagaaacaaaatgtgacttcattgggattgtctttcaaaatgtgccctgtaatttcccagtcgtgtggttcttctaaccagagccatcctggctttacattttttggatccaatctgaactctggcagaagctgcaaatatcctgcagcctgggtcccagccccaccacttcatcaaaactggcctccccagggatattaaagccactttattgttgccaaatccagtgtatacttctctgggagggatcccaagacaggactacccaaccaagtcacttccagagttctgatccatagacattctgagagatcatgaatggtgttgttttaagccactaaattttgggatacttttttttttataataatgaatttagttttttaaaaaaatgtgtcaagtatttgttaactcattaatgagggaaccagcaagatgacaaagctcattcaaaagaggatatgagaggctgggcgtggtggctcatgcctgtaatcccagcactttgggaggccaaggcggatggatcataaggttaatgccctaaagggcgataaaactatgacatttgcaactaaataatctgcaaagaagcatctaacccagagtctacgccctcctcaacagcaaataacaattcaaataagttggagttcccctggagttggatggctctgtgcaggcttgctttagactatactctagtgagactttgaacgtatatgtcatcatcttttgcctcgctaatgaagatttgatagataatactgcttgagataagacaccaatgaaattgtcattttatgcaatactatggagtaattcataaaattattttactcctttattcaacaaatatttattaagcacccactacgtgaccgaccctgttctaggtgataaggatacagtagaatacagtccctgcccttgtagaacttgcagcccactgtggattcatttcagtataaagtgtaggcattgtcccaaagccgtaattaggcatctcatcagaaatcagcccactcccccaccccaatcaagagcccctcctgctgtcctgctgtatgtgcatgaaacacaacattggcctttggggtgcacttctgagcattggcctttggggtgcacttctgagatggggggttccatttcttgttgttcttagaagtgggacacacttctgagaagggtgctaaatgccaccttgtttacttctttataaggactgcaacaggtgaaaatttgttaaaggagaagaggcagttttttttctttttaaagaagcacactgtatttatcaaaaggaagctgagaatgaccctggatgttacggtacatgtgtatagctagatgttggttaaaaatggaaataagaactgacaaagtctttgaaaagtgtaacagctttagtcagtgctatagtctcaatgtttatgtctccctaaaattcatatgttgaaatcttcacacccaagattatgatattacgaggtggggcatgcaaggaggtgatattgggagatgattaggttatggagagctcttacaattcagatgaatgcctcagagacccctccccacttctgccatgcaaggttagggtgagaaaatggctgtctaggaggaagtctccctcaccagacactgaatctgttgacccccttgatctcggacttcccagcccctagaactgtgagaaaaaaatttctgctttttataagccacccagtctatggtattttgttgtagcagcctgagtggactgagacagtctgggaattcctcttcttttttttttttaagatggagtctcactgctgcccaggctagagtgcagtggcacaatcttggctcactacaacctccacctcccaggttcaagggattctcctgcctcagcctcccgagtagctgggattacaggcacctgccaccaggcctggctaattttttttttgcatttttagtagagacgggttttgccatgttagccaggctggtctcgaattcctgacctcaagtgatccgcccgcctctgcctcccaaagtgctgggattacaagcatgagccaccgtgcccggcctgggaattcctcttaacaacactactgttggcatctggttgtgcacctgctgtagcaggtgaatagccatggattcaattccctgagtctaaggaggctgaccatgcctacatttggtcatagacttcaatggagtccccatctccattgaagagaataacacaagtagagagtggcagtgaatgtcaacaatttgcaagcaatagctcaatcaagaggcttctgtggagccaatttgtcagaagcttttaaccttaaaatgtagatggtaatccagtgtagcagacactgtggtgtgccacacagaacccctcttcagggccaatgcagccatcccccagctgctgagaacgtcagctgcagaagattcaccacagggaccctcccagggaattgccctcggccacaaggagctgtctcaccaaaggctagactctctggggcaatgactggctgatgcaggggcacaaacaccgactgtaggctcaaatgcagctaccctgggaaagaggaggagaaggatgatgtggagaacgggcagtggatgacctcagtgcaatttgtaatgtttaattccttaaaaaagaaaaagagtctgggaaacatagcaagaacgctgtctctacaaaaaaagataaaaataaaaataaattagccggacatggtggtgtgcacctgtagtcccagctgaggtgggaggatcacttgagctcaggaggttaaggatgcagtgagccaagatcgcaccactgcactccagcctaagtgacagagtgagactctgtctcaaaaaagaaaaaaaaagaaaagaaaaacgaccagataagatctgataaggcccgatgttaatacatgaacttttaaatattattctccagtctttttttttttttttttgagacagggtcttgctctgttgcccaggctagagtgcagtggcactatctcagctcactgaagtcttaatctcctgggctcaagcaatcctcccacctcagcctcccaagtagctgggaccgcagacatgcaccaccatgcctggctaacttttgtatgtttttgtagagatggggtcccactatgttgcttaggttgctctcgaactcctgggctcaagcaatcctctcacctcagcctctcaagctgctgggattacagtcataagccactgtgaccagcctattctctattcttgattgtatgtccaaaatataccatcataaaaaagcaccactggaatcaaagataggggcttaatgggcatttttgtgcttatttaatccttttcctgtctctaggcagtgtacagataggggaaattgtgtttcctgagtacttttatatgccatggaactgtgggggctttttatattttgaaatatgaattcacgtacatgttaggcagaattttatactctttcaaggatctttctaaagatttcacattggtagcagttccattcacagtcagatatcaatagaattcattctaatatcaaacctgtggctttcttgttacaacttaatctgtttcttcaatgtggagtttaactcaagccaaatcctttttagaatcctccttcccaagcttacctgagcttcctaggatgcacatgatctgcccgctctccacgtacaaggagacatctttgaggatctgcctggtccactgctgccggcaagatgtgatgtcccaccagggcctcacgcggtggctttaaaggaaaccccaggaaggcaaaggcagcttggggccctggaaggggccacacccaggtccccagcattgatcctacctgtgccccaccccagtagtctccggacaggctcctaacgtgtttcagtctctgcgccctcctctgtagaacctggcagatagcgactgaggctgtctgccacgtagggagggggcctgtgctggagttgctctgaatgtcctgtccgtttggctgcgaggtggctgtccctgcattctttcaccaggtttcaagactccttgcattcgcagtacccccattcccatccacagagggcaggccgtagacactgggttggcagggcactgctgccactttgtttatgcccaggcccttccctgggcagggggaggggccattcactgtcgctccatgtttcccagcacagcccttctccctctcctctctccacccgatccactaaagagggagcccgaagtgcccagactggcacttaaagagtgaagaaaggcagcagaggggtgagcgccgggccccgcactcctgggggagcagcagcagcaagggctctgccttacctgacgctgtaggaggcatggaggatgcccaggctgtgaggctccggggcggtggcaggagccccctccagggagctctgggagcctctgtttacttggagacccatggaccctccgggggtcaaagatgagaggtcacccatggccaacaggcagcaaagctgggcaaattttctggtggccggaccctccccagagtggcttcagttggggagcccgtggcagactgccctgcctgctccacctgaccccggagtcccttgggacagcaggactgggacttggccacggagaccattatctgatgtacctttagccagcgcgtccttatcttgacagtgggcagaacacacacgtttgtaggtgggcttgccagcaaggaatgctgggagagacgggcccagggcaggaggccgaggtgtccctgctccaggaaacagagtgaagacactggccctggcaggcagcagctgggtctaagagagctgcagcccagggtcacagacctgtgggccccatggccgggaaggcggcagaggagagagggctgccgaaaggggccactccccaggatacctcggtgagtgagcaatgggaagtcggcccaggcctggtgggcgggtaggagaaatcaaacctttctctcttccctcaggagccttctgtcctagcaccacccggacatcaagcagtgtgaggacatggccgcaggactgtttcctgcatgtcaaagggcggaggggaacagattcagggtcccagaggcctctgaggtcacttcctgccctaagaaatgctcttttagggaaatgatgttcttttgtgtgatgtgggacaatttcactttttcttttttcttttcttctctttttttttttttttttttttttttttttttttttttttttgagacggagtctcgctctgttgcccaggctggagtgcagtggcgtgatctcggctcactgcaagctctgcctcctaggttcaagtgattctcctgcctcagcctcccaagtagctgagattacaggcacctgccaccacacctggcaaattttgtattttttagtagagacagtgtttcaccatgttggtcaggctcaaactcctgacctcaggttacccaccctcctcggcctcccaaagtgctgggattacaggcatgagccaccgtgcctggccagtttcgctttttccgaatgagactccatcatagaaatgtgctcacacatgccagggactccactggtgtctcctccatccatgtggctgtcaggttggtctcagtaatgaagtgatgggtgagacagggtgacagacggcttttgtgggaacatcagcatgtgtggctctaacaggcaatcgtaagttctgcgagaaagctggaaggagtagaagcagccaggtggcaggaggtggaggtatgtttccttcctcattttacctgagaagtgtttactcaagaaatagcctttgactgaattcgggatgtggcaggatttgaagcaggaggctaaactggaagacaagcgagaagcagatccccactcccaccacctcaccccatcctacctttccatctttgcctgttgtgggtaggagggaggagagaaagacaagcatgatcgaggattccacacccaatggggaaaacaacctggactggccttgagtttccaggacttgactcggccagacccaaggagcccaccatttctagtcagttctgcaaccaccacatctgaccagctctgctctctgaataccctgtggggcccaccacttcgggaaatgtttaaagcctgaatagaatagaaagtcagcgggactttgggaacacttcctgcctgggagggctgacgattcagccaccacagcttgagaggcaaagaaatgctaggaccacaccagaaatgcacgcaggccctgccatttctgcttcccttctgtccgatcctgtcactccaggtgctgagtgacggtctgcccgtaacacctgtgggtcttggaacaagaggatgagggtcacatttcctatgtctagatatataaaagtcatcagtcaagctataagaacagttaaataaaatagtttctatcctcttatcttgacatatcttcctcacaacctgaaaggccatgtgtaaattgagaaattctaaggcaacttggctagaatgcgctggtacgggggagccacttccagcccgagccacaacctgtcccccttttctggccccctcagctccatcccactccatggggccctcaacaccctggatggtcaccctcctgcctacctgcattgcagccctgccctgcacagacatatacttctctggcctaaaagtcctcaggaggttgggcctgggaagaggtgtacagaccctggggatggacttggggccatttgcacagagaatatctggcatcttgggcacctggagtggcaagtgcccttaacccacaaactcctcatgccatgggcaggagcagcaacagagaaggacaagagaaaccctggcagcaggcagagctgtgtgtgacctaggctgaatgtttcgataaaatttcttcagccaggaacaagtcctgcgtgtcctcttgccaaccctccagccgtgagtgtcagcacatcactccccccggggcataggctcctcatctcagaactagaaacatgtgctctgtgagtttccttcttgcctaggcatctgactcaggaatttgatcagaagttaatacgaggagaaattacaatgtagcccagcatgagcagagctggttacctacaaataaacctgcttttgcttttttgggtgtcacctgtcagaaattcaagtgatgttctgacagtcgtactgattaagatgtcagccgaatagatacttaagtatttgaaaaatacagagagtttgtcaaaacctcaggaagagtctaacaaatccttcctgggagccaaggaaaatattttaaaatggaacagaggtcgtccccaacccaggcacgaattttcttcctccgaaagatgagctgcctgtgcaactcctggaaggcacaatccctcaatggtggttggagtcagggctggcccacacctgccttcccaggccacagtgaaggggcttggggtgagccttggaacaagcaaccaggcacctctccccttcctcttacccagtttctgctctgcctcctctgtctgccagctccctccccttctcaaagcaccacacagtggaacccagttgggctgcaggttacctccacacattgctccagactccaaatgtctgaccttccttcctcagcgcctcctccatgcctaaatccgacctggggatgttttggccagcagaagtaatttctcagctcatttacattgtctaatatccctcctgcagatatttgttttaaaaacaacaacagcaagatgcatgttagcccacatgagtctcttagaaatggataagatttttttttttttgacagagtctcacgctgtggcccaggctggagtgcagaggcacgatctcggctccctgcacctccacctgccggttcaagtgattctcctgcctcaacctcttgagtagggtagctgggactataggggtgtgccaccatgcccggcaatttttttttgtatttttagtagagacagggtttcactgttttggccaagctggtcttgaactcctggcctcaggtgatctgccctcctcagcttcccaaagtgctgggattacaggcatgagccactgcgcacagctggcaatggctaagattttttgatgattcaacaacaacaacaaaaatgggacaatgaagcaatgtgcacagtgacagcggagagggcgagtgaggggcaaggccgaagggctgatctgccaggagtccagcatctgtccgagctgctttcaatctcctcaggagcttggggcacagaccttcttacctcctctccctcaacctccctcctgcttgggggctttggcaactggggttgaggtgggaatggaactctggagttctactcactggcttgctctctcaatttgacaacatattgtgaaatatcgtacacaaatcagcttaaagaactctcatgtacacaccaccaattaccaaaagctttgaagcttgatccccgcactcctactgtgtcccctttctcctttcatctctccccgctccccagagataacccctctcctgaattaggtgtttatctttcccatttttttctgtataattttgggtctttatggtgataattcaaacattaagcaatggaagtcactttcgtctgctgtttttcatactctcccagaactctaagggttccccacagcacgcctgcggcatactgtcaccgaatttctttccctccacctccactgacctggaatgttctttccgagaacttctggcccccatcattgcaggggtactttgacaagaagactgctgtatgttatttgttattttcacgtaaggcataagtcatgttagtttcacctacagcatgtgcgtgcattgtgtacatagtgaaaataaaccctggtcagatgcttgaggtcagcctccctctctgcctggtctgtctcgctccatcgtaatcacctgtctcatctgccaaaatctaagcttttcaacggccttttcattgtcacatcccaaattccaagcctgaagggtgttctgggctccccataagtgtttgttgggtgcatggttgattgaaggaatgtatagtgtgagaatggtagcttgaggaggaaagtctatgggaacttgttaatgaaagtgtacttgttcctgcctgacagaaatgtaagaaaaattgaatgcagtaaaaaatggaggtcagacgaggtggttcacccttgtaatcacagcactttgggatgctgaggtgggtggatcacttgagcccaggagtttgagaccaacatggtgaaaccctgtctctacaaaaaatacaaaaattagctgggtgtggtggggaggctgaggtgggaggattgcttgagcctgagaggttgaggatgcagtgagctgtgatcatgtcactgcactccatcctgggtgatagagcgagacccaatccaaagaaaaagaaatgatgggggacttcctgttgcttctttgtttgggcctcaatggtttaaatgattgaattgtcaaaataggaggaattgagatctgcagatggttaataccattcaaaggtatcagccgacaccatgaaacattgattttttaatgtacattcaaatataccaccacttcgacaataacaacaacatgatgatgatgatgagagggacttcctctcaaagctcccagcagcattttccatcactttgttgcatgaactcttcatcaaaatcagatatgaggagaagtatgccagatgttagtgaggactaagatgttggttagaatttttctcagggtggtatcttcatgaatattgggcattaactctcaacagctgcttccctctcacatgctgcaagtgtcatgtctgtttggcctcaggagatattaagccagctgcagggaagagaaagttaaaggcaaagagtttgcccactccagtcaggtcttctcagagcacagaggtttttttatagaactctctccggtccagagtctgggtctctttaccagaagctgcttggcttcaggctccaccagcctgaggttgaggttctctgggaaggtgccccgggagaagccccaaacctctctctgaagggaagaggagatgggcccttgtcagcactcctattttcccaaagccctgaggttccacctgtgcaatcccatctgttgccaatttgagatttaaccacgtcggctctaagaagttgctctcacctgttggtttccttcttgtcttctcctatgttctcagcagcttctaaaggagcccctcatctctcctgtctcccacagggcctccaggatagattgttctcctctgaaagtgacaacagcctgtacttcacctacagtggccagcccaacaccctggaggtcagagacctcaactaccaggtagaggcacgcctgggttcaaggggagaggagcaggcagggacagccaggaaattccccgggtggaaataaaagggtgggcccaacttgcaggccctctgcccgcaaggacagagtccagtccacattgatgcctcacgtgtcaggtgcaataggtgtcatcaatggcatatatcagagctggaggttgagaggcttgaaaagagaataaaactgttgtataaacataaaacaaaatgcgtgaacctatagaaaaatgtctctgggactctttttaaactatattttgaaataactttagattttggaaaaaattgcaaaaataacacagtgtttccatatacccattgtccagcttcccctaatgttaacatcttgcatacccatagtataattatgaacactaagaaatgaacaatgtacaatgctattaactacagactttattcagatttcattagttatatatatatgtgtgtgtgtgtgtgtgtatatatatatatatatatataattttttttttgtaaaatgtactatccctggagcttataaaacatccagagtgcaaagacaatgactgacctttcagaggcacccaggaaccccctggtcagattcaaggatccatattcccacagctccccagggacccagatgggacatggtggggtctgggatggtgaacttcagaggcctgagtctggcttcctgtgggtgtgagttgggacaagccaatgagcctttctctgctctgccacttaccagctgtgtgaccttgagcaagttgcttaactgccctgagcctcatctgtaaaacaaggattctgagcatatctatgttatagatttgcagtgaggattgaataaggtgatggatgttaagtgattaacacaatgtcttgcacatagtaaacatctgataaattattagtaaattactagtatcaagtgaagacattttgcttcgtgttttatttttatttctgtaccactattgcacatgattttcttttttccttacttttttttttgagatggagtctcattctgtcacccaggctgggatgcagtggtgcaatcttggctgactgcaatctctgcctcccaaattcaagtgattctcctgcctcagcctcccaagtagctgggattacaggcaaccaccaccatgcctggctaatttttgtatttttagtagaggcggggttttaccatgttggccaggctggtctcaaactcctgacctcaggtgatccacctgcctcagccttccaaagtgctgagattacaggcatgagccaccatgcctggcctgtacatgcttttcattcttcttatcttcagacctagaaacagcagctacaggttctcagcatgggtcctgcttccgtgtttggtagaacctgggttggggcctattgtgtgtaggtgaggacatatcctctgtggagaggggccacctggggaacgaagatgctgaacagaagttgctgaagccctctgaaccattcagctctctaaggaaccttctgatatctccccacaggtggacctggcctctcaggtcccttggtttgagcagctggctcagttcaagatgccctggacatctcccagctgccagaattcttgtgagctgggcatccagaacctaagcttcaaagtgagaagtgggcagatgctggccatcatagggagctcaggtaccggaaaggcaaatcgctgggcaatggtttctctcctgggatacagaatggtcctttggacaaatggatgcttcttatggagctctttgctgactagtagaataatacagcagaatggctgagaacacaggttctgggtcagacagacctgggctcaaatcctggctcctccatttgctggcttgagggtaggtgctgttgttaagagtcatgagtgcgcctcttgtccacccgaggctgtggccagagcatctgactttggctaacacctggacggagagatcagcaaacagctccagcatgtaatgttcttttcagactcctccagccatgaggggcattggttcaggttgttcctccacaatcacattctgattatggccagacagcccctgccacactctcacctctcagacagcctctccagtgtcttacttagcacaactttcactcatctgcaaagagccaggttcttggagtgcctcaaattgtcatttccatggccaaatttaaaatgagagaatgtctgagctgaaagggggcttggggaacagaggtcattctcatcatgttccacctttctttctccctaccagtttggaagcattttcagaggaaggtgttcaaactccctactcctcagtgtgtctagagtatcctcctgcacgcgcgcgtgcacacacacacacacacacacacacacacacacactcccctccatttgacagatgaggagactcaaatccaaagaaattgagggattctcgtaaggacacatatttaatgcagagctagaactagaactttggtttcatcattctcggatcaagacatttctccctgggacacccttacatagtgctggagagagcattttatatcttttaattaatcatttccagaggtagagattactcaattttttaaacattctgctccaaacttttacacccgtctggtagataagttctgtttaccgtataaccaaagatcaaatgaaatcttatgtataaatgcactttgtaactgaaacagcatcacagtcatgaagtccctctcactctgtccctgtccctgcaatcctgacctaaataagaaaaaagtagatcccggccaggcacagtggctcatacctgtaatcctagcactttgggaggccgaggcgggcagatcacgaggtcaggagatcgagaccgtcctggctatcacggtgaaaccccgtctctactaaaaatacaaaaaattagctgggtgtcgtggtgggtgcctgtagtcccagctacttgggaggttgaggcaggagaatggcgtgaacctgggaggtggagcttgcagtgagtcgagatcgcgccactgcactccagcctgggcaacagagcacgatcccgtctcttagaaaggaatgaataaattacactgaatagtctcctgttttgttttttttgttgttgttgttttgtttttttgaggcagtctctctctgttgcctaggctggattgcagtggtgtgatctcggctcactgcaacccgctcctcctgggttcaagcgagtctcatgtctcagcctcccaagtagctgggattacaggtgggtgccactatgcctggctcatttttttttgtattttttgtagagatatggttttgccatggtggccaggctgatctccaactcctggcctcaggtgatctgcttgccttggcctctcaaagtgctgggattacaggcatgagtcactgcaccgagcatctcctggttgtttatagattcagtgttgtttggcttcaggtttacttgcctgtgtaaaaaaaacaaaaacaaaaaacaaaacaacaacaaacaactttagacaaataaatagtagagttgtctgagcaaatagtgattaatgaatctggcagcactcaaaaacaggaccagttcagaggctcccccaagcaatttggtcaggcagtatttatagacagaaaaaggaagtgccctacagaaatagctgattggttacagttgggtgttcaccttatttatttgagggtgatgtgatcaggtgttgggtatggacaggagctcatcagtcggtagcctgtgattggctgatgcttggctgccatgattggctgagactcagcaacttgtctcagccagtctctgtcttaagagaatatactgctaagataagttgcagtttgtttacatactaagtttgcttgcagtttgctctgtgggaactcaaagtatgcaggcagcctcaggccaaatttagtttaactgagcagctgaaattattaaaatgatttattagaaaggttcatcaactacacttcctgtgacttttactgccatccccctctccccctgcccaacatacacacaaaagaacgctggccataatttttaaaatacaaagaaaacagccaggctgggcacggtggctcatgcctgtaatcccagcactttgggaggctgaggcaagtggatcacctgaggtcaggagttcgagaccagcctggccaacatggtgaaaccctgtctctactaaaaaaaaaatacaaaaaattagctgggcgtggtggcacgtgcctgtaatcccagctacttgggaggctgatgtgggagaatcgcttgaaccctggaggtggaggttgcagtgagctgagattgcaccattgcactccagcctgggcagcaagagcaaaacactgtctaaaaaaaaaaaaaaaaaaaaaaaaaggaaaagaaaagaaagcagccctaggcattttagtttcttttatactctcagcaatgccaaaagtggtttccaattgatgagtttattgatttggagattccagccattgaataagggtcttgaatgccagtgggtgttttgtcttagttcatggaaggtgtattagtccgttttcacactgctctaaagaactacctgagactgggtaacttataaagaaaagaggtttaattgactcagagttcctcatggctggggaggcctcaggaaacttacaatcatggtggaaggcaaaggggaagcaaggtacatcttacatggtggcaggagagaagaatgaggggaggaactgccaaaaacttttaaaccataagagtgtaaactttttaaactcactcactatcatgagaacagcatagaggaaatctacctttatgatccaatcacctcccaccagatccctccctcgacacgtggggattacaatttcggatgagattcgggtggggacacagagccaaaccatatcagagagtctccccagatgccacaggcatcctccattggaaggctccccaccgctctcacaaagttttgctcagaaaacgtggccttcctgctttctgagtgggaatccgtggtccctgtgaatgttggtgaagtcctctgtgtccctggagcctggctctgaagcttctctcccaggtttctctcctggctattttgttccactcatgttctcagggatcttaaatgaggtacacccagaggtggtgcacaggccccttctaccctgagagcctctgcacagtaaccagaaagatcatgtgaagaagcttcttggtttttggagatcaaaactccatctggggccgggcacggtggctcacgtctgtcatcccagcactttgggaggccgaggcaggcggatcacctgaggtcaggggttcgagaccagcctggccaacatggtgaaaccccgtcgctgctaaaaatacaaaaattagctgggtgtggtggcgggtgtggtggcaggcatggtggcaggtgcctgtaatcccagctactcaggaggctgaggcaggggaatctcttgaacctggatggtagaggctgcagtgctccagcctgggccacagagggagaccccatctccaaaacaaacaagcaaacaagcagaaaacactccatctgcgggagtggaaagagctcattcctagctccacggtaggaagatgttctgagcctgagcccaatccgcattcatagcttgaacagctgtcacagacagaggctcaccgaaagtttttggaaactggatccaatctgatgcttactttctcaaatcaataataattagtacatcattcagaagagggtgctgttaacttgagtgcaatgaatctttttttaacttttattttaggtttggggatgcacaagtaggtttgttatataggtaaactagtgtcacggggttttgttgtacagattatttaatcacccaggtagtaagctttgtacccaagtgttttttcctgctctccctcctcccatcctccaccctcagttaggtgaatccttttttaaaaaagagtattaaaaataccactgatgcactttgggaggcccaggcgggtagatcacctgaggtcaggagttcaagaccagcctcgccaacatggcgaaaccctgtctctactaaaaatacaaaaattagccgggcatggtagcgcctgtaatcccagctactcaggaggctgaggcagggagaattgcttgaactcgggaggcagagattgcagtgagctgagatcacaccattgcactccagcctgggcagcagagtgggactctgtctcaaaaaaaaaaaaaaaaagaaaaagtaaaagtaccactgatgaaaagaagagagatgggtgtagatacagtcagaacatatatgtacactgtgctgtagttttaaattgtttccacttctattatttctctatttttttctccattatttctcaaaatagatttggttttgcatgtttaaaagacgctctataaatgctccaaattagtcctcacaaagccagcttctgagccaaccgacattgaataatgagacattgctggcatgtttgccagccaaaaatagttatgttaacaccagcctgccttggggagaaagggccttggtgggtggcaggaggggacaaatgctccaggcaccagctggccctgtggcatctaggactctagctttctcctgtcaggccaccactggctggcctggcctgaacccccagcgccatcatgccttgcagccccacaggggtgctcacgttggctgcagacagaaggcttggagctccatgtcctgggcccaccccatctaggtccagggactatgccacctctctaggggctggtcacatctgcacggacagagtagtccggggtcctggagagtgtatggggagcagtggctgacagcctggcccccacagaagctccgctctcagggatatccctggtggctttgcaggttgtgggagagcctccttgctagatgtgatcactggccgaggtcacggcggcaagatcaagtcaggccagatctggatcaatgggcagcccagctcgcctcagctggtgaggaagtgtgtggcccacgtgcgccagcacaaccagctgctccccaacttgactgtgcgagagaccttggccttcattgcccagatgcggctgcccagaaccttctcccaggcccagcgtgacaaaagggtaactaactggccccagtggtgacccccaggtccaagaagctacagtgtccatgccccgctcctcccctgctgccttgcctcaggacccagccgcaggtcgagtttgaacaactcagcttgccttccgccagccctgggctgcagcccaccctccaccctcctttcaaaccccacagcccgccagaagctagctcagcccattggttcccttcactgcacttgtcaagatgtgggatgagtgtatttgtttgtgtgttttctgggcctccatgtgggtagagagccatggtccccaatacactgccacgttcctaacacagggcaccatgcccagcacgtcgaggcccctcgggacctgtggaaagaatcaggggaaccaatgttgcagcttggaactcaagtgctggagctgtctcccttcactttcaaacccagccggaggagcgggcgcctttatccttggggtcacaatgtgtccagccctgaaggaggcccctgaggtggcctcaaagctccttctggcccacaggtggaggacgtgatcgcggagctgcggcttaggcagtgcgctgacacccgcgtgggcaacatgtacgtgcgggggttgtcggggggtgagcgcaggagagtcagcattggggtgcagctcctgtggaacccaggtgagggcctggggggcagatgggggcagagggacctgtgcggtcccctcaggcttggcttggtctggccagagccccaccgactcaccaggctcctctctgtgttggaaaggaatccttattctcgacgaacccacctctgggctcgacagcttcacagcccacaacctggtgaagaccttgtccaggctggccaaaggcaaccggctggtgctcatctccctccaccagcctcgctctgacatcttcaggctgtttgatctggtcctcctgatgacgtctggcacccccatctacttaggggcggcccagcacatggtccagtatttcacagccatcggctacccctgtcctcgctacagcaatcctgctgacttctatggtgagtccccaaggccagcagccagggccctggcacacagggcctccccgatgcttaaaccctgcccaagcttgctggaaagattcaggggagaaactcccagaggtttcaggagaggaggagcaatgatggggaagaacatggggtggtttgccaggtatcaaatgctagaaatgagggcctggaaatagaagcttctgacaaagagctacccttctgtgcatgatagattagaaacttgcaaactccaaagatgggagggcatggaattcaagagggtggggatcaataaatatcagagtctttattcagactcagtagggaaacaacctttaaggtcaagaagtcaccagatcttaaaacatgccctggtgttcccacagtggcagggagcctgaaggtgcagggtggcagaggggggcccagggtggtggccttggccagggaatctctagatgtgaaaattgctctggcagccccaggcttgccctttgcttgggtcctgaacactcagcatattacactcagggagcatgagccgcttccttcattctgcaggggacagttgccttcccaggtacctggcctgaaatcctgagtgctgaggaagggcatggctgctggacaggcgtcatggttgtaccaggtcccagggagacagctgtcatggcttatgctataggtcgcctgagcccccagcttccacccaggatggcaaactgtagcaaggaccccaccagtaaacaggacaacagcgatcatctccttgaaggcaaacatggggcccaaacatgccaggctcaaagggtctcctgtttgactctcaagccccggccaggccaaggccatctccatctttacagatgagaagcctggagcttgcagagctaaacacctgttccagcacagttgtaaggcacagaactgggactggtgcccagccctggctgtgactcctcgtccagcagcccacaccctcctcctagtgtcccaagttctccaccatccttcccccaggaggacaggccgccccttgccctctgtactcacattctgcatgaactcacagaaaggtcacctccctccctgtgctcaggtggcagcctggcttcctgacggtgtgtcatcctcaggccagccatccccagaataggggccaaaaggcacctgccgacctggccatcggggaataatttaaagtaaccccagagaggggttaccagaagtcaagtgtccacagcaaacctgaaaactcttttttacattttatattgttactggaaggggctctggcctgcaagccctggggcaggaacctctcaccaacctgggatgcaagagctacacggggcctgggttacccaaaaatctgatgttttgagctacagtgctgcacactagggggccacatcatggtttataagaccccacctagacattatcttgtcttgagatgtgttatgaaaatgggaggaagggccgggtgcagtggctcatgcctgtaatcccagcactttcagaggctgaggcaggcagatcacatgaggtcaggagtttgagaccagcctggccaacatggtgaaactctgtctctaataaaaatatatgaattagctgggtgcgtgacgcttgcctatagtaccagctacttgggaggctgaggcacgagaattgcttgaacctgagaggcggaggttgcagtgagctgagattgtgccactgcaccccagtctgggcgatagagtgagactccatctcaaaaaaaaaaaaaaaaaaaggatatgggaggagggaaggggaagagagaggagtggggaacctctagccaagccaaggttctggggaaggaatgaagggagggtgggcaggcatgcatggtcctagactgagctgggtatagggagatcctggctgtggctgggctcagtttgccttttctggcattgccagggccttggaggtagaaggcagaggcactgcaagaggacagctgtggtgtggggttgcctggtgctccctacaggttagcatccctgggatttaggaggcaggggctgatcagattgggtctacagccaagtgtgctgtctccctcctggggcagagcagccgaccaaggggtcagtgagaaatctacctgaagttggccggtccctagaaccctccagccagacattctcctgctttcggcagggtgcctgggaggccaagttattaattttcagtgagaattctcaccatctggatagaactctcacaatctggatagaattctcattctctggatagaactctcaatatctatctggatataattgtcgccctctgaatagaactctcactatctcaatacaattctcaccatctagatagaactctcactatctgcatagaattctcactctctgtatataactctcactatctatcgagatagaatactcactctctggatagaactctcactatctggatagaattctcactctctggatagatctcttactgtctatctggatagaattctcactctggggacagaactctcactatctatctggatggaattctctccctctgcataggactgtcactctctggatagaattctcaccatctggatagaactcccactatctggaaagaattctcagtctttagttagaactctcgctatctttgtggatacagttctcaccctccagagagaactctcactatctatctagatagaattatcactctctggatagaaatctcactatctgtctggatagaattctcaccatcaggatagaactctcactgtctggataaaattctcaccatcgggatagaactctcactatctagatagaattctcactctctggatagaactctcaccatctaaatataattctcactctcaggatagaactctcactatctatctggatgggattctccctctatggatagaactctcagtgtatatctggatagaattctcactcactgtatagaactctcactatctgtctggatagaattctcaccatgtgtattgatctctcactctcgggatagaattataactctctggatagaactctcactatctatctggatagaattcttaccatctggatagaactctcactatctgaatagaattctcactctctggatagaactctcactttctagcttgctagaattctcaccctctggatacagttctaactatctgtatagaattctcacactctgggtagaactcccactatgtatctggatagagttctcactttctggatagaactctcactatctatctgaatagaattctcaccctatgggtagaactctgactatctgtctggatagaattctctccatcctgacagaactctcaatatctggatggaattctcactctctggatagaactctcactctctttgtggatagaactctcactccctgtctggatagaactctcacaccctgtctggatagaactctcactccctgtctggatagaactctcactctctagatagaactgttaataactggatagaattttcaccatctggatagaactctcactatctggatagaactctcaccatgtgtataaaactctcactgtgtgggaagagaactctcactttctggatagaaatctcactttctatctggatagaactctccccatgtagatagaactctccctatctggatacaattttcccatctgaatagaactctctatccggatagaattctcactctctgggtagaactctctatctatctggatataattctcactttctggatagaactctcactatctatctggatggaattctcaccatctggaagaagtttcactatctggatagaattctcactctagataaaactctcactatctatctggatagaattctcaccctctggatagaacgctcactatctatctggatagaattctcactctctggataaaactctcactatctgtctggtagaattctcaccatctggatagaattctcactatctggatagaattcttactttctggatagaactctcagtgtctttctggatagaattctcaccctctggatagaactcgcactatctacctggatagaagtctcactctctggatataactctcactaactgtctggatagaattctcactatctgcatagaattctatctgtctggttagaattttcactctctagatagaactctcactatctatctggatagaattctcactctctggatagaactctcactatctatctggacagaattctcactctctggataaaactcttaactatctgtctggatagaattctcaccatctggacagaactctcactatcggtctggataaaattctcaccatctgtgtagaattctcactatctgcatagaattcttactctctggatagaactctctcgtattcctcgatagaactctgaccatctggatagaactctcactatctatctggatagaattctcattctctggatagaactctcactatctggatagaatcctcactctatatagaactctcactatctctctggatagaattctcactctggaaagaaccctcactatctatatggaaagaattctcaacatctggatagaatcctcactatctggatagaattctcactctctcgatagaactcttgctatctgtctggatagaattctcaccacctagatagaactctcaataaatggtagaattcttactctctggacaaaactctcactatctttcaggatagaactcttactacctggagagaactctcactatctggatagaattctcaacatctgaggatagatttccaactatctatctggatataattcccactctgtcgttagaactctcactacctgtctagatacaattttcaccatccatgaacaactctcacaatctgtatggaattcgctatctctggatagaagtcttactatcaatctggatataattctcactctctggatagaactctcactatctgggtagattgctcaccatctggatagaattctcactatctatctatagaattctcactctctagatagaactctcaatatatatctggatagaattcttaccatctggatagaactctcactatctggagagaattctcactctctgtgtggaactctcactatttatctggatagaattctcaacatctagatagaactctcactatttgtctggatagagttctcaccatatggacagaactctcactatctggttagaattctcactctctggatagaactctcactatctgtctggatagaaatctcaccatctgaattgaactctcactaactggatagaattcttattctctggataaaactctcactatctttcttgatagaactcttactaactgggaggaactctcactatctggatagaattctcaacatctggatagaattctcactatctatctggatagaattctctgtctctggatagaactctcactatatatctggacagaactctcacaatctggatagaattgtcattctctgaatagtactctcactatctatctcgatagaattctcaccatctggatagaactctatctgtctggatagactactcaccatttggatagaactctatttttctgtatagaactctcactatctatctggatggaattcccactctctggatagaactttcactacctgtctggatagatttctcacactctggttagaactctcactatctggatagaattctcaccgtctgggtagaactctcactatctggatagaattctcactctggatagaactctgactatctatttcaatagaattctcaccctctggatagaactctcactatctatctggatagaattctcacactccggatagaactctcaatatctatctagatagaactctcactatctggatagaattctcaccctctggatacaactctcactgtctatctggatagaattcttagtctctggatagaagtctcactctctgtctggctataattctcaaaatctgggtggaactctcactatctatctggatagaattctcaccatctggatagaactctcactatctgtctggatagaactgtcactctcagaactttctggatagaattctcactgtctggatagaattctcaccaaatgtctggatagaattctcactctgtggatagaactctgactgtctatctggatagaattctctccctctggatacaactctcactatctggatagaattctcacactctggatacaactctcactctctgtctggatataattctcaccctctggatagaattctcactatctggatagaattctcgccatctgcatgcacgggattctaactatctgtctagatagaattttcaccatctggatagcgctcttactatctggatagaattctcactctgcatagaactctcactatctatctggatagagctcttactatctggatagaattctcactctgcatagaactctcactatctatctggatagaattctcactctctggatagatctctcactatttgtctggaaagaattctcactctgtggatagaactgtcgctatcaatctggatagaattctcaccctctggatagaactctcactatctagaaggatttctcaccatccagatagaactctcactatctggatagaattctcactatctggatagaactctcactatctatcttgatagaattctcaccctctggatagcactctcactatatatctggatagaattctcgcttgctggataaaactctcactatccgtctggatagaattctcaccatctagttagaactttcactatctggatagaattctcactctctggatagaactctcactatctatctggatagaattctcattctctggatagatctctcattatctgtctggagagaatactcattctctggatagaactctcactatcaatgtggatagaattctcaccctctggacagaactctgagtatctggatagaattatcatcctctggatagaactctcactatctatctggatagaattctcaccctctggacagaactctgagtatctggatagaattatcatcctctggatagaactctcactatctgtctggataaaattctcactctctggatagaactctcactatctgtctggatagaattctcaccatctggataaaactctcactctctggtagaattctcatgatctggatagaactctcactatctggatagaattcttacactctggatagaactctcactatcttcctggacggaactctcaccctctggatagaactctcactatttggatagaattctcactatctggataaaagtctcactctctgtttggtacagttctcacgatctggatagaactctcactatctggatagaattcttacactctggatagaactctcactatctttctggatggaactctcaccctctagatagaactctcactatctatctggttagaattctcactctctcgattgaagtctcactatctggatagaattctcaccatctgcagagaactctcactgtctatctcgataaaactctcactacctatctggatagaactctcgctatctggatagaattgtcaccatctgggtagaactctgacaatctctctggatagaattctcaccctctggatggaactctcactatctggatagaattcttactctctggatagaactctcactatctgctgtatagaattctcaccctctggatagaactgtcactatctgtctgtatagaattctcaccctctggatagaactctaacaatctggatagaattctcactctctgcatagaactctcactgtctatctggatagaattctcactctctggatagaactctcactatatatctggatataattctcactctctggatagaactctcactatccggatagaattctcaccatctggttagaattatcactatctatcgggatagaattctcactctctggatagaaccctcactatctatatggaaataactctcaccatctgggtagaattctccctatctagatagaattctcactgtctacatagagctctcgctatctgtctggatagaattctcaccatctagatagaactctcactgactggatagaattcttactctctggataaacatctcactatctttcttgatagaactcttactacttggaaagaatgctcactatctgtatagaattctaaccatctgggtagaattctcactatctatctggatagaagtctcactatctatttggatagaattctcattctctggatagatctctcactatctgtctggatcgtattcccattctgtggatagaactctcactatcaatgcggatagaattctcaccatctggatagaactctcactatctatctggatagaattctcactctctggataaaactctatctgtctggatagaattctcagcatctggataaaactctccctgtctgtctggtagaattctcaccatctggatagaactctcattatctggatagaattcttactctctggatagaactctcactatctttctggatagaactatcaccctctggatagaactctcacaatctggatagaattctcactccccagatagtggacactatgtctcactatccggatagtggacataattctcactatccggatagaaatttcaccatctgcatagaactctcactaccgggatagaattctcactctctgggtagaactctcactatctatctggatagaattctcaccatctgcattgaaatctcactatctatctggatagaattatcactctctggatagaactctcactatctacctcgatataattctcactctctggatagaactagcactatgtgaatagaattcttactctctggatagaactctcgctatctgtctggatagaattctcaccatctagatagaactctcactaactggatagaattcttactctcttggtaaaaatctcactatctttctggatagaactcttactacctggaaagaactctcagtatctggctagatttctcaccatctgggtagaattctcactatctatcttgatagaattctcactctttggatagaactctcactatctgtctggatagaattctcagcatctggatagaactctcactatctgggtagtattctcactctcttggtagaactctcactatctatctggatagaattctcacaatctggatagaagtcttactgtgtatctggatagaattttcactctctggatagaactctcactatctatatggagagaattatcaccaactgtatagaactctcactatctgaatagaattctcactctctggatagaattctcgctatctgtctggatagaattctcaccatctagatagaactctcactaactggatagaattcttactctgaataaaactctcactatgtttctggatagaactcttactacctggaaacaactctcactatatggatagtattctcactatctggatagaattctcactatctaactggatagaatagaattctcactctctggatagaactctcactatctatctggatagaattctcaccatctggatagaactctcacgatctgggtagaattctaagtctcttggtagaactctcactatctctctgtgtagaattctgataatctggttagcactcttactaactgtctggatagaattctcactctctggatagaactctcactctctgtctaggtagaattttcaccatctggaaacaactcttacaatctggataggattctcactctctggatagaactcttactatcaatctggatagaattctcactgtctgtatagaactctcactatctggatagatttctcaccatctggatagaattctcactctgtgggtagaactcttactatctatcttgatagggttctcaccatatggatagaactctcactatctatctggatagaattctcactctctggatataactctcactatctggatagaattttcactctctggatataactctcactacctatctggatataattctcactctctggatagcactcactatctggatagaattctcaccatcgggatagaattctcactatatacctagatagaattctcacaatctggatagaactctcactatctatctggatagaattctcactatctggatagaactctcactatctgcatagaattctcactctctagatagaactctcgctattcatctagagagaattcccatctgaatagtactctcactaactggatagaattcctactctctggataaaactctcactatctttccggatagaactcttagtatctggaaagaactgtcactatctggatagaattctcaccctctggatagaactctcactatctatctggatagaattctatgtctctggatagaattctcactatctgtcaggataaaattctcaccatctggatagaactctcactgtctatcttgatagaattctcaccatctggatagaactctcactatctgtctggatagaatactcaccatttggatagaactctcactatctgtctggatagaactcttactatctatctggatggaattctcactctgtggataggactctcactacctgtctggatagaattctcactctctggatagaactctcactatctgtctaggtagaattctcactctctggatagaactctatttgtctaggtagaattttcaccgtccggaaacatctctcacaatctggataggattctcactctgtaggtagaactcttactgtcaatctggatataattctcactctctgggtagaactctcactatctggatagatttgtcaccatctgcatagaattctcactatctgtctggatagaattctcactctctgggtagaactctcactatctatctggatagaattcccaccatctggatagaattcttactgtgtggataaaatactcactctctggatagaactctcactctctctatatatagaattcccacgatctggatagaactttcactatctggatagaattctcactctgtgggtagaactctcactatctattttcatagaattctcaccatatggatagaattctcactatctgtctggatagaattttcactctctggatggaaccctcactacctatctggatataattctcactctctggatagcactcactatctggatagaattctcaccatctgaatagaactgtcagtatctgaatagaattctcactctctggatagaactctatctatctagatagaattctcaccctctggatagatctctcaccatctgtctgggtagaattctctccatctgtatagaactctaactatctggatagaattctcaccatctgcatggaactctcactatctgtctaggtagaattctcactatgtggatagagctctcactatctggatggaattctcaatctctgcatagaactctcactatctatctggatagaattcccaccctctaggtagaactctcactatctggatagaattctcaccgtctgcatggaactgtcactatctggatagaattctcactctctgtataaaactctcactatctatctagatagaatactcactatctggatagaactctcactgtctatctggacggaattctcactctctggatacaactctcactatctggatagaattgtaactctctgcatataactctcactatctatctagatagaattctcactctgtggatagaactctgactatgtatctggatagaattctcaccctctggatacaactctcactatctggatagaattctcactctctggatagaactcccactatctgtctggatagaattctcaccctctggatagaacgctcactgtctggatagaattctcagcatctgcatggaactctcactatctgtctatgtagaattctcaacatctggatagagctctcactatctagatagaattctcaccatctgcatggaactctcactatctgtctaggtacaattctcatcatctgcttagagctctcactatctggatagaattctcagtctctgcatagaactgtcactatctatctggatagaattctcaccctctggatagaactcttactatctggatagaattctcacatctgcatggaactctcactatctgtctggatagaattcttaccatctggatagagctctcagtatctggatagaattctcagtctctgcatagcactctcactatctgtctggatagaattctcactctatggatagaactctgactatctatctggatagaattctcaccctctagatagaactctcactatctggatagaattctcaccctctagatagaactctcactatctggatagaattctccctactgatagaactctcactctctctctggatagaattctcactgtctggatagaactctcaatatctatgtggatagaactctcactgtctatctggatagaattcttaatctctggatagaagtctcactatcagtctggatagaattctcaccatctggatagaactttcactatctgtctagatagatctctcactatctatctggatagaattctcactctctggatagaattctcactatctgtctcgatagaatgctcactctgtggatagaactctgactatctatctggatagaattctcaccctcttaggctacagtaaccaaaacatcatggtactggtaccaaaacagaaatatagatcaatagaacagaacagagccctcagaaataacgccgcatatctacaactatctgatctttgacaaacctgagaaaaacaagcaatggggaaaggattccctatttaataaatggtgctgggaaaactggctagccatatgtagaaagctgaaactggatcccttccttacaccttatacaaaaatcaattcaagatggattaaagagttaaacattagacctaaaaccataaaagccctagaagaaaacctaggcattaccattcaggacataggcacgggcaaggacttcatgtctaaaacaccaaaagcaatggcaacaaaagccaaaattgacaaatgggatctaattaaactaaagagcttctgcacagcaaaagaaactaccatcagagtgaacaggcaacccacaaaataggaaaaaattttcgcaacctactcatctgacaaagggctaatatccagaatctacaatgaagtcaaacaaatttacaagaaaaaaacaaacaaccccatcaaaaagtgggcgaaggacatgaatagacacttctcaaaagaagacatttatgcagccaaaaaacacatgaaaaaatgctcaccaccactggccatcagagaaatgcaaatcaaaaccacaatgagataccatctcacaccagttagaatggcaatcattaagaagtcaggaaacaacaggtgctggagaggatgtggagaaataggaacacttttacactgttggtgggattgtaaactagttcaaccattgtggaagtcaatgtggtgattcctcagggatctagaactagaaatactatttgacccagccatcccattactgggtatatacccaaaggactataaatcatgctgctataaagacacatgcacacgtatgtttattgcggcattattcacaatagcaaagacttggaaccaacccaaatgtccaacaatgatagactggattaagaaaatgtggcacatatacaccatggaatactatgcagccataaaaaatggtgagttcatgtcctttataggaacatggatgaaattggaaatcatcattctcagtaaactatcgcaagaacaaaaaaccaaacaccgcatgttctcactcataggtgggaattgaacaatgagaagacatggaaacaggaaggggaacgtcacactctggggactgttgtggggtggggggaggggggagggatagcactgggagatatacctaatgctagatgacgagttagcgggtgcagcgcaccagcatgtcacacgtatgcatatgtaactaacctgcacattgtgcacatgtaccctaaaacttaaagtataattaaaaaaaaaaaagaattctcaccctctggagagaactctcactatctggataaaattctcactctagatagaactctcactctctatctggatagaattctcaccatctggatagaactctcactatctagatagaattctcaccctctggatagaactgtcactatctggatagaattgtcaccatctgcatggaactctcactatctgtccagatagaattctcaccatctggatagagctctcactgtctggatagaattctcaatctctgcatagaactctcactgtctggatagaattctcagtctctgtatagaactctcactatctgtctggatagaattctcactctgtggatagaactctccgtatcaatctggatagaattctcaccctctggatagaactgtcactatctggaaggaattctcaccatctggatagaactgtcactatctggatagaattctcactctctagatagaattctcactatctttctcaatagaattctcaccctctggatagaactctcactatctctctggatagaattctgactcgctggataaaactctcactatccgtttggatagaattctcaccatctggatagaactctcactatctggatagaatgctcactctctggatagaactctcactatcaatctggatagaattctcactctctggatagagctctcactatctatctcgatataattttcattctctggatagatctctcactgtctgcctggatcgaattctcattctatggatagaactctcagtatcaatgtggatagaattctcaccctctggatggaactgtcactatctatctcaatagaattctcaccctctggatagacctctcactagctatctggatagaattctcactctctggataaaactctcactgtctgtctggatagaattctcaccatctggataaaactctcactatctgtctggtagaattctcactatctggatagaactctcagtatctgtatagaattcttactctctggatagaactctcactatctttctcgatagaactgtcaccctctggatagaattcgcactatctatctggatagaattctgtctctggatagaagtctcattatctgtctggatagaattctcaccatctgcatagaatattcactatctgtctggatagaattctgaccagctggagagaactctcactatctggatagaataatcatcgtctggatagaactctgactctctgtctggatagcactctcactacctttctggatagaattctcactctctggatactactctcgctatctggatagaattctcagcatctggatataattcccactatcgatcaggatagaattctcactctgtggatagaactctgacaatgtatctggatagaattgtcaccctctggatagaactctcactatctgggtagaattctcactctagatagaactctcacaatctttcagatagaattctcctcctctggatagagctctcacagtctggatagaattctcactctgtggatagaactgtcactatctggatagaatactcaccatctcgatagaactctcactgtctatctggatagacttctcggtctctggatagaagtctcaatgcctgtctagatagaattttcaccatccggatacaactctcactatctggatagaattctcattctctggattgatctctcactatctatctggatataattctcactctctggatagatctctcactatctgtctggatagaattctcactgtgggtagaattctcactatcattctggacataattcttaccctctgggttgaactctcactatctggatagaattctcaccatgtgggtggaactctcactatctatctggatagtattctcgctctctggaaagaactctcactatctttctggatagaattcttaccctctggatagaactctcactatctggatagaattctcaacatctggatagaactcttactgtctatctgaatagatttctcactctctggatagaactctcactatctatctggatagaattctcactctttggatgaaactctcagtatctgtctggatagaattctcaccatctggataaaactctcactatctgtctggatagaattctcaccatctggatagaactctcagtatctggatagaattcttactctctggatagaactctcactatctttttggttagaactgtcaccctgtggatagaaatttctctatctatctggatagaattctccctctctggatagaagtctcattatctgtctggatagaattctcaccatctggatagaagtgtcactatctgtctggatagaattcttaccatctggagagaactctcactatctggatagaattctcaccatctggctagaaccctcactatctgtctggatggaactctcactatctatgtagacagaattctcactctctggatagaactctcgctatctggattgaattttcaccatctggatggaattctcactgtcgatcacgttggaattctcactctgtggatagaactgtgacaatctatctggatagaattctcaccctctggatagaactctcagtatctggatagaattcttactcttgatagaactctatttgtctgcatagacttctcaccatctggatagaactctcagtctctggatagaattctcactgtctggatggaactctcactacctgtctcgatagaattctcaccctctggatagaactctcacaatctggatagaattctcactgtctggatataatcctcactctctggatagaactagcactatctgggtagaattctcacaatctggatagaattctcactatctggatagaattctaactctggatagaactctcactatctatatggaaagaattcactctctggatagaattctcactgtgtatgttgatggaattctcaggctgtggatataactctcactatctatctggatagaatttttactatctggatagaattctcactatctgggtagtattctcactctctggatagaactctcactctctatctggatagaattctcaccctttggatagaactctcactatctgtctgggtagaattcgctccgtcgtaatagaactctcactatctggatggaattctcactctctggatagaactctcactatctgtgtggatagaattctcaccatctgcatagaactctcactatatgggtagaattctgactctctggatcgaactctcactatctgtctggaaagaatcctcactctttggatagaactctcattttctgtctggatagaattttcaccatctggatagaatctcactatctagatagaattctcattctctggatagaactctcactgtctatctggatagaactctcactctctgtctcattagatctctcactgtctgtctggatagaactctaactctctggatagaactcttaataactcgatagaactttcaccatctggatagaactctcaccatctgaataaaactctcactgtgtgggaatagaactctcactctctggatagaactctcactatctatctggatagaattcttactctagatagaactctcactatctgtctggatagaattctcaccatctggatcaaactctcactatctggatagaattctcaccctctggatagaactgtcactatctatctggatagaactctccccatctggattgaactctcactatctggatagaattctcaccctctggatagaactctcactttctggatagaattctcaccctctggatagaactctcactatctggatagaattctcactctctggatagaactctcactctctggatagaactctcactatctggatagaatgctcactctctggatagaactctcactatctggatagaattctcaccctctggatagaactgtcactgtctatctggatagaactctccccatctggattgaactctcgctatctggatagaattctcactctctggatggaacgctcactatctgggagcctaactactcagcctcccccgaccagcccaacttctccccatggaggggcactgagtcctcattaaagcttcctggacagctggagttggagccagagcatgactgtcatgtggcccttggctctgaaggctcttgctctgtcctaagatgtcctcaaaatgagcctgggtagtgggacttgggcggggcctctactctttcccattttttgatccactgctcttaccctgaggcttctgcagatgtggtcaggcctggcagggtgaaggaccagcccttggggtccctctgcctctctctgctctgccccttgcttcatggctgagggtggggagaatgtcccagagccccacgaggggtgatcagcattgtgagctgggcgtgcaccaagctcttcacctgtgagcaggtgccagggaacaggccacctgtgactccacatcccctgcttgcagtggacctgaccagcattgacaggcgcagcagagagcaggaattggccaccagggagaaggctcagtcactcgcagccctgtttctagaaaaagtgcgtgacttagatgactttctatggaaagcagagacgaaggatcttgacgaggacacctgtgtggaaaggtaaggtggcaggcgactctgagaggagagctccctgcagaaggtggctgcccccatgacctggccacatcttctgcctcccagcagcgtgaccccactagacaccaactgcctcccgagtcctacgaagatgcctggggcggtgcagcagtttacgacgctgatccggtaattatctgtcattttattactgaacccgcccccctgcccaagtctttgtatatcacattaagccctttctattaaagtgaatttaaaggagaaagtgagaggtagagtcatttgaaaaaaacagcatccagcagggcgttggtggcttatgcctgtaatcccagcactctgggaggctgtggtgcgtggatcacttaagttcaggagttcgagaccagcctgggcaacaaggtgaaagcccatctctacaaaaaattataaaaagtagccagttatggtggcgtgggcctacctggtaggctgaggtgggaggattgcttgattcctggaggtggaggctgcagtgagccgtgattgcaccttcactccagcctaggcagcagagcaagaccccatctcaaaaaaaggaaacagcattgttgggaccagcactaaccttcagtgcgacacagaacacccctattgcttttattctttaagcaaaattaagatatcctcaccggctggaagatcgtagaaatagcatagggtcattgagaaaaatggagacaataggagagaatctctggttaaaagggaagtcgtggtcataccagccctcaaagaaagccagacggcactgtgtggcgtgtgtctttcctgatgtttccatgcatacacacatttgtaaacgtagcgggatcatactctgcatgctggtctgtagctggtttcttttcacttagggcagcacctctacctcccgtctgattgggtcttcctcggcattccagttagtctagccataatcacccacccattaagtccatcttgatggccagattatcttcaggcttttgctactacaagcaatgaggcagcagacatcattgagcgtacatttttttttttttttttaacacagagtctctctctgtcacccaggctggagtgcactagggcaatcttggctcactgcaacctccgcctcccaggttcaagtgattctcctgcctcagcctcccaagtagctgggattacaggtgtgtgccaccactcctgactaattttttgtgtgtttttagtagagatggagtttctccacgttggccaggctggtctcgatcgcctggcctcaagcgatccacctgcctcagcctcccaaaatgctgggattacaagcgtgagccaccacgcccagcctgtccgtacatctttatggaagtaattgattttttcctcaggatcatttctttgagtaacattgccaagctgatacattcatgataaaagtaacaatcatttattgagtacctactgtgggacagatgctgtcatcagttttctgatttaatcctcagagccactctatgaggcaggtattaccatccccattttgcataggagaaaaatgaggcttatggagactgtgacattcccagggtcacggggctggtgtatgctgttgcctcagcatctcttccttttggtttttaagtcgtcagatttccaacgacttccgagacctgcccaccctcctcatccatggggcggaggcctgtctgatgtcaatgaccatcggcttcctctattttggccatgggagcatccagctctccttcatggatacagccgccctcttgttcatgatcggtgctctcatccctttcaacgtcattctggatgtcatctccaaatgtgagtgtggcccactggcatgggcaggcaggacctcagccacctccaagctgtgttcctctgagctcctggggagcgggtttgatttcattgtgattgtgatatataagacaataatgtttttaaagtttgcatgttaatattagcatacaaatgaaagtaaattaccgagtcttagctgttcctatcctagcaggatttatatttgacagcagaacacgagctacagacttgcaaaacctgaagagcctcatcaaacatctaaattaggatggctttactgtgcctatttaaaaaaaaaaattagagacttgggcaatatgataactactttgaattgtattaagagagtctccaaaacagaagcactgtagatttattctacttcttcattctcttttcctttcccttactttttaggttactcagagagggcaatgctttactatgaactggaagacgggctgtacaccactggtccatatttctttgccaaggtgactgggcagggttgagagcaagtgccccccacccaccagggtgggggtaagtgtggagaaaacgttgctacaaggaaggcttttctgaaccatggggccgtgggtcatgtgaagtcaccgatgccaccagatgccacattttctaggggagtttcagagacttgaacttttattttaaacatttaccaaaacaccaggactgtggaccaggaatgatagttttctggccagaaggaatctaaaaaaaagaagtcctcattgtattttaccttttcagagcctcactgtggccccccagcaggccaggcaggtgtttccaggaagcagaggttcagagaggctacgtggctctccaaggccacacagctacttgatctggtcagggggagtagggacttgaaaccaggtcttaggacagcaggtgcccattgctgccctgggggaaacaggctgaactgccctagagggagcatttggtatctgcaagggggaggccagcactgagctcatgctcctgggtcccagcacaccctcctgccacagcctcatcatcaccaggagggaaggttgctatctgggggcactgctacttttaaacgtttataataatggcagtgaaggtgctggcttcatatccttgcaagggctgttctttgcagatcctcggggagcttccggagcactgtgcctacatcatcatctacgggatgcccacctactggctggccaacctgaggccaggcctccagcccttcctgctgcacttcctgctggtgtggctggtggtcttctgttgcaggattatggccctggccgccgcggccctgctccccaccttccacatggcctccttcttcagcaatgccctctacaactccttctacctcgccgggggcttcatgataaacttgagcagcctgtggacaggtaaggcctgcccccggggcctgggccagctttgttaggactcatgtgactggatgaagcctgctttcatctggagatggacacttatcacttagatccaactcgaggctggcccttctggaagcagaggcctttgcccactgccctggaggccaaaggaatgattccattagagattccagatgcacctcctcctatcccacagctgatatccagaagtcgcccttgactgtctccctccctctccacatccacctgtgagccaggtcgattctgcctcctgtttctctgaaatgtctgcttggctgtgtctccatccctggccaccattgtttgagcctgggccactgccatagcctggtctctgtaacctgggcccctccacatccctctcgactcagccacgcagagtgagctttccaaggtgcaaacccatgcccccctttgttcaaatcttcccagggttgctcaatccctgcggcctccccagctttctgaagcccccagcacaccccaccctctcacctctgagcctgcccagctattgtctctgggaatgtcatgcccgccttccatggggcatctcttctgccagggctttcctgatgcacccaggcagggctcattgcctccttcccctccccataccatgccacctccataggatcagggcacaggctccattgtctctggtgtggggccgctgagtctcctcagcccacacagtccatgaagctgagcacgtgcagggatgcctcatcacatccctctcgagaattgctatggatcaaatgtgtgggtgaccccgtggcctctcagctccctcggccccagtccatgtccccagcaacccctctgcccttttgcctcttggtctctggtctctctcccctccttgctcatcagagaacttgggccagagccaccatggccctgtctcagagagtgggatgtgcccttgtgcaggtaagagagactgtgtgactgtggggagaccatgggaatatggggagactgaatacgggggagactgtgtcgatataaaggagatcatgggaatacggggagaccatgagaataggaggagaccgtgggaatatggggagacggtgagaatatgggaagactgcaagaatatagggagaccatgggaatatggggagactatgggaatatggggagatcacatgaatatgcaggagactgtgagaatatggggagaccgtgagaatatggggagactgtgggaatatgaggaaagtgtgaatatgggggagaccatgtcaatataaaggagccgtgggaatatggggagactgtgggaatatgggagagagagtgtcaatataaaggagactgtgggaatagggggagaccgtgggaatatgaagagactgtgtgaatatgggggagaccatgtcaatataaaggagatcgtcggaatatggggagattgtgcgaatatggggagaccatgggaatatggggagactgtgggaatatggggagatcatgtgaatatgcaggagaccgtgtcaatataaaggagacagtggggatatggggagaccatgagaatatagggagaccatgggaatatgaagaaactgtgtgaatatgggggagactgggagtatggggagactctagtaatatggggagactgggaatatgaggaaactgtgaatatgggggagactgtgggaatatggggagaccgtgggaatatgaggagactgtgtgaatatggggaagaccatgtcaatataaagaagaccatgggaatatggggagaccatgggaatatgaggaaactggatatgggggaggccgtgtcaatataaaggagaccgtgggaatatggggagactgtgggaatatgagcagactgtgtgaatatgggggagaccacatcaatataaaggagatcgtgggaatatggggagatcgtgcgaatatggggagcccatgggaatatggggagactgaatatatgggagactgtgggaatatggggagatcatgcaaatatgggcagaccatgggaatatggggagactctgtgaatatgggggagaccatgcgaatatggggaaaccatgagaatatgagggacacctgtgagtaacgcggctgtctgtctccagtgcccgcgtggatttccaaagtgtccttcctgcggtggtgttttgaagggctgatgaagattcagttcagcagaagaacttataaaatgcctctcgggaacctcaccatcgcggtctcaggagataaagtaagcggggaaggcctcgggttctaaattattggacgtccggctttccatcctcctcatgagcccactgcatgtctgtgtctccagatcctcagtgtcatggagctggactcgtaccctctctacgccatctacctcatcgtcattggcctcagcggtggcttcatggtcctgtactacgtgtccttaaggttcatcaaacagaaaccaagtcaagactggtgattcacgccagacgtctgcccgctggtgggggacctgagcagacccttcaactgcactccctcctcaggagccccttcctggggacagtgaggacaatgaccctacagatgctcagctacatccggcccagggtgctgcagtggcacagaccagccacaggatggcagtagaataaagacagtcgaaagggatttctgctcactggcaggagactgcgatgactgggagaaaacctgcactcggtggcacctacaacgttgctaatttatttccttttgatatgcatttatataggcaactcgatataggatgggagcaaactaggaatgaattgggtagctagactgtgcaggaattgttggaacctggagggaacaataacagtagctagcagatttggcttcatcttccaggggccccacactccgtggtgagccaccatcaatacagaaagtgacctaagatgtaccagcaagatgccatcccttctttttgtgtggggtcatgggctccaaaagccaacgtgaacaattaaaaatgtattgagcatctactctgtagcaggtcctgtgaaaacactttaggtggacaatcccttgaggtaagtggtatcccattttataggtgtgaaaactgaagcaaaaattcattttcctaagggcacatggatactttgtggtggagtcatatggggatcagaaaagcctttgaggcctttggagttagagggcagaaggcaaggcctgagccgctgtaagccttaggagtttaggaaggctccagaagacaaatggggtctgtagaggctgttaactcagccaggcttcttagagttgcatttcactaactgatatggtttggctctgcgtcctcacccaaatctcaccttgaattgtaataatccccaagtgtcaagggcgggaccagatggagataattgaatcataggggtggtttctctgatgctgttctcctgagagtgagtgagttctgatgagatccgacggttttataaggggcttccctcttcgctcggctctcattctctctcccgctaccctgtgaagaggagccttccaccacgactgcaagtttcctgaggctgccccagccgtgctgaactgtgagtcagttaaacctcttttctttataaattacccagtcttgggtatttcttcatagcagtgtgagagcagatgaatacactggccctgcctgggtttcagaaccagccttgaacctttcacagtggccagaggatggggaggcagaggcccaggttgcacacttcttgcctgagtgttggggactatctgacccaaaacaggtgcacagagggcaggagaggatgttcccaaaggaaaattagagtttagaatcaaaagaaggggaaggtgcgtgtttgggaggtaaatagcaaatactcttcataggttcactagagtcttgctactccaagtacgatccctgggccagcagaatgggcacagctggagctgattggataggtcccatgagcctcaggccccacccaggctcaatgagtcagagtctgcgtcttaagaagaccccctggtgatctgtgcacattcaagcatgctgccgttttccaaagcacttgcaacactcaggatgcttgcacggtcatgttgccaccatccaacctgcagaccccattcttgagattgactgggagttcctatcatgtcctccatagcaaggggatctagaccagaatcaagccttggatctagttctcaagtctcttttgtctctttcagtttaggaacagtttgtcaactttccttcacttttgtgaccttgatacttgagtttgaaggctgtctctcaatttgtgttctgcccagtgcatcctatcagaaggcatgtgatttcaacttctcccataccaacaacgttcactttgatcacttgattaaaggggtgtctgctaggcttctccacagccaagttactattttccctccctttataattaataagcattttgtaagtgggtactttgaaactatgtaaattgtaaactttccatttatgcattttaaaattttgattgatgtaaacttgtgaattcccattgtatccttacaaccctttattattgtgattaattctgatgctcagcttgtccctgatttggccagtgggaaccccgtcgagctggcttctgcatccttttgatatgtcctcatcatcctttgagggctgaaacaaccaagagtttcaggctcattttttgttttgtttttttttttttgagacagaatctcattctgtggcccaggctggagtgcaatggcgcgatctcggctcactgcaacctctgcctcccaggttcaagcgattgccttgcctcagcctcccaagtagttgggattaacagtgcccaccaccacacctggctaatttttgtatttttagtaaagacagtgtttcaccatattggccagactggttgtgaactctaggcctcaagtgatctgcctgcttcggcctcccaaagtgttgggattacaggtgtgacccaccgcacctggtgtcacaggttcatcttgtattttcccatctcagccctggaatccgatgtttctccagagaatctgggttcctcttagtggaaaatggtatttagaagccaaggttttggtgataagtatgctctttgcttgtggaacatctctgctcccaggctctctcagtgaacagagttagggagtgtgtgtgtgtgtgcgcgcgcgcgcgcgcatgtgcatacatatacacctaagtacacatgagtttactctgataacatccatttccaatccagcatcacagagttgatcctaggttcttccctcttctctaattgtgagaaacctggcttccattacccttaggttatttactcatttgattaaccgcctgcaggtaagtaatctcccatctacactgccacgccttctcctgtatggacgtcctgcctaccctgctcaggctctaactcccaagtccagctttccctgagtctgcagctgtcttcctcacactcccgtggcccaccacaacttccccccacctccttgtcactgtggtcccctaatggcgttaggcctgaatgaagaagggggaaggatgaagaggacattggtagcttgccttaactccccaggtaattctaatgtgcagtgattgacagccactaagatacatcacctgactttgtgagttcaccattcggtctgcaatgggttttggtaactcagtggctctgtatgccgtgctgaaggggaaaagggcaaagtgcaaaggcaggagggatggagaaaatatagcagctgccatttatttgtgtttttcctacagcggtggttctccaccctggttgcccatgctggagctttaacaaaagccaatgtggacccattgcccagagactctgatcccatgggtctgttttgtttaaaatgctcttcaaggcattgtgaggccaggaaaacaaagaaccaaggctctcccgggtgcggtggctcacgcctgtaatcccagcactttgggaggccgcggagggcagatcacgaggtcaggagatcgagaccattctggccaacatggcaaaaccctgcctctactaaaaatacaaaaattagctgggcatggtagtgcgtgcctgtagttccagctacttgggaggttgaggcaggagaatcgcttgaatccgggaggcagaggttgcagtgagccgagattgagccaccgcactccagcctggtgacagagcgatactctgtctcaaaaaaaaaaaaaaaaaacccaaggctctcgaggcatgcatgctgttcagcgagccctgccctgcattgcgaaagggtagagatttgtttatttgtcagtattgaaagcatggcttgcaaagttttcctgttaagagtcagatagtaaatatttgggacttcgtgggccttataggctctgctgcaattacttaactctgctgttacagtgtgagagcagctgtagactatagtaacgtacagccggtgtggctgtcttctaagaaagtattatttacaaaaacaggcaggttgctagatttgacctgagggtgtagtttgcagagccttggtaaaggttttcaaatttgcattttaagccctccaatttcaagttatgctattggtggggaattttaattaaacagaaaataatcaccaatattggctcaaatatttcctgatttaaaaaaaaatctgctcttgttcctataaatagtatataagatgtaatcttgccctgggttaaaccagtctacagaggtagatctcgcatttgcttttgttttcttctacttcaactcttgtcatgatcccaaattaaacaactagcaacagaaatgttcaaatctgtcaaatccaagtgttaacagacctgggaccaggggttcctcatagtggcttagcacagcatacagaccactttcctttggcccaaccggccttggggtctggagcaccaaacaggccctgaggaagcgtgcaaggaactggaatgcggggaaagtgatgaaatattttgttggttggcctttgcttgtttgcaaaatatatccaatgctcacacctgagagacaacagacatccttatttgtgaatagtctgcactagataattcagatttcaagtcatctgtcattcgtacttgataatgatttgttcttcatttaaagtggcctgggtacagagcaacatcccctgtctttatcacatgagctctgcctgaggcagcttcagcaggtaggcaggcaggcagatggagcacagcccattctctgctggtgcactaggaacagcagcacgtgtggtgttagcagctaataattaaaacaacgtttaagcagtgggttgagatttttaaacacaaaccaactcaaaaacacttctctgctttctatgtaatagtgctcacatcatttgtatgattgtctcgtctctttaaaattggaaatattcttgtttccccaaactgctaataagctctactgacccatgctaaaaataaagctctttcggctgggcgcagtggctcatgactgtaatctcagcactttggaaggctgaggtgggtggatcacttgaggttaggagttcaacatcagcctgggcaacatagtgaaacaccatctctatcccaaataccaaattagccaggcacagtggcaagtgcctgtagtcccagctactcaggaggctgaggcagcagaatcactggaacctgggaggcggaagttgcagtgagccaaaatcgcgctactgcactccagcctgggcaacagagcaagactcgatctccaaacaaacaaacaaaacaaaacaaaacaacaagaaaaacagaacgtggtggctcatgcctgtaatcccagcactttgggaggccaaggtgggtgaatcaccttaggtcaggagttcaagaccagcctggccaacatggtggaacccccatatctactaaaaataacaaaattagccgagtgtggtggcacatgtctataatcccagctacttgggaggctgaggcaggagaatcacttgaacccaggagatggaggttgcagtgagccaagatcacaccgctgcactccaggctgggcaacaagagcgaaactccatctcaaaaaaaagagagaaaagaaaagctttatttgtgttgattccattattccactattgcacagaagccctgcactgtgcttggaatcagcttgatcttgagtttgtctggttttcacaggcctcctcttcctgacagtaaacttgaaaatatttttatgtgggcacttgggttttgaaggactccttgggcctcaatccccggtgtcctaactctgagctacagagctgactagaaatcctgtaagaagaccaccatgtggaggaaaccctccaaagcacacaaatcatccatctcagaaggaacacgacttggaaaggggaaggacatggtggtgtgcccattgattgactcattcagtgatgcctaccgggtgcctatcatgccaagctctgctaattggcaggtctgcagagtgctggaagaactcacctcctcagggagaaaacagacaaaaacaagtaaataatgggaatgtcacagcaagggcacatccaggcctgggttgaagacgctactttatggtggctcacacctgtaatcccagcactttgggaggctgaggcgggcggatcacctgaggtcgggagttcaagaccaacctgaccaacatgacaaaaacacgcctctactaaaaatacaaaaattagccgggtgcagtggtgggcgcctataatcccagctagtctcgaggctgagacatgagaatagcttgaacccgggaggcggaggttgcagagcctagatagcgccattgaactgtagcctgggcaacagagcacgactccgtctcaaaaaataaataaataaataaataaataaataaaaaacaacacgctactttagagaactctctgaggatagatctcaacagccaaccattgtccaaacaactgtgcaagggcaggaagactgaagctggttgaacacttttgctttacctggacctgattttttttttcctccatgcagaaaagaaaaagataagtgcctatttttgatttgctaatgcagcttttctttatttgtactaaggctgcataatgtaggctttgtaaagtccacgggcctgaaagcacgatacatttctaatggaaacactcccatgcatgattgtacaacaggaaagcgataaattaccgtgattttgtactccctgcagctattagttcggccctccttcaggaatgttgctttcggttatagaaattctacaaatattggttcatcagaaagacaaatattaaatgaaaattatgctcaaggacatgagaaaaagtgtgcagagtacacacattgcagacttgagaaagaaattgtcctcagaacaatttgcaatacaaagcttgcttaataatttactggaactggtaaactcagcgattatgccaggcactggatcttcaattaagtgtaagaaaataggcttacagtgtaagatgtctggaaactgggagcacttctattaatgtgaatgtgagggtttttttttttaattagaatattcttacagtttcaattccaatttgacttttaactgactttaaaccgattgcttccatttcctattcataggaagtaaatgattttagtcagagtcctagccatgcaacttatcaagttgattctgggcaaattcactgctgtgaccctaggtttctcacggtgaattctcattgcaaaagggctgcctgacccatagcagtaggtgcagtgtttagaacgcacagaactgactacagacggcttgatttactgtgacaggattatgctaggtctggggacacataatgagaccaagaactggtccctgtggagttcagaatctgtgtggaagatagtgtgatacctgctctgctcaagcagccgtggaagccctggaaagggaacaatatgctgggtgaggggcccaagaggcagaggtgacactgacggtatctcagcattctcgaaaaagggtgcaggtgctgaaggcagcctgtccgtgaggtgggtgggccccagccatctagggggatgtaaaatgctctgatacagatagaacctccttcattttaggtgtcaatttaccacacacccaagctctaccttctaatttttgccaactttattccacagaagtctcaaattatctgcttgtccttaaaacagataagcactgacttttgtcagttgtctacatacaacctataggccatttaacaaggaaattctagccataacagaggtccctgcctaagttttaatttataattctaagactgaagtcttttgaaatggcttaaagcacttgtgcaaacatttgacaagataaaaatgaaggtgccagttgggtgcagggcctcgtgcctgtaatcccaacattttgggaggccaaggtgggcaaactgcttgagcccaggagttcaagaccagcctgggcaaccggacaaaactctgtttcttcaaaatacaaaaaattagctggccgtggtggcatgcacctgtagtctcagttacttgggagtctgaggtgggaggatcacctgagactgggaggtcaagactgcaatgagccgtgatcacgccactgctctacaggccgggcaacagagtgagactgtttgtttaaaaaagaaaaaaaaaaagcagcagcagcccacagatatttacagtatactttattcaaagcatttcagttaaaattattttgggttcaaatacatgaacatataattatatataaaatactatagttctcaatagtttacagtgacatcttttttagaattagctgcttataatttgagtgtaaatgtattacagaaagctgctaaattgtttatatttctacttatttcaatttagctattagatatttagaacactcataagcccacctacagtatagttattatactttaaatatttatattcaataggggaatcaatacaatacaaaagatatttgaacagctagtcctttgtaacacccccccgctgctgccgagagggctagataagggggtcttacctatttcctctgtaccacactcacattttaccagagtccatatacagggccagtgtggagtcacttcatgcaaatgagatggtactttcagtttccccaaaaagatgactgcgaaatccagattacaccccaacgttatgcctcaccttggagacctattctaatgaatgtcaattagtgaatgttgactaacttgtggttagcatgactgcaaaaaaatgaggcctgcttcagtgcaatcactaaagacaggagtgaggctcttggccaggcgtggtggctcacacctgtaatcccagcactttgggaggctgaagcgagcgcagggggaggatcacttggggccaggagttcgagaccaacctggccaacatggtgaaactccgtctttaccatacaaaaattagctgaacatggtggtgcaagcctgtaatctcagctacgtgggaggctgaggcacaagaatcacttgaacccaggaggcggaggttgcagtgagctgagattgcgccactgcactctggcttaagcaacagagcaagactatctcaaaaaaaaaaaaaaaaaaaaagatgcttttggcaaacctgtaacatgtgcaggtcctgcatctgggcagtgctcaagggaaagccgcactatgtccactgggccaagactcaacgttggccatgccccctgcttccttaaatctaacgccacaaaaagagttgaagtaaaagcctggccaataccatgatgacatctacttcctggcttcccgccatcaaccctccctcacaccatctgcgggcaggtagcagatgcaggagagagagttccacaagacagaaggtcaacagcacaagttgcaagaggcccgcctacgtccccaaggcaaggtctcccctgatgtgaacagtgtgacccaagttggcactgaaactggaacagtagggagtcaccaaattcaaatgaacaaggaataccccaaaatggggagagttctcaaaacattttcaacatttcggtaattaattacctcatctccagttaggtcaatattccatattattaagacaccttttataatggcaaactctcctgactacctatcttagaatttttttgaagtcactacttacagtgtagatattaacaggcatgagattcaatatagggatcacttttatttcaaacaattaaatacaaaccaatattttaccccttcatagatgaaatcacatcttttcaggatatgagtataaagtaacaagcctagggcagagcttgtactgacaaagtcctgaaactacaatgagaggaaacacattgctctacttcgggataagtcatgaccgagactcaatttcagagacgctctatgaacagaggtgcttgaagccacagtggcagaagggaaagatggggaagtgtgccgaagagcctccaggcatgacagacagtcccctgaccaagcacaagtaacaggccctttgggtctctgcttctcactggaaaatgatgaagcctagatctgatgactcctagtgccaacatttaacaaagttcgaaagttatgcaggacttcacacatgtacggaatggctgtatcacagaatattatgcgttagaaagttcacggtcactatacctagctctaaaatttttcagagaaacagcagactaataagtgaatcttaaataaaggaataacattttaatgaaataaatgaaacagagcagggaaaccaaagagccaattaggggaagaatcctgaaaaagtatggcttcacacagcagcagcattgaagaaaacactatcgatttttcccagagaaaaaaactccaaaaatgtccaataaccaagtgcacagagttatggtcaataagactttgaacatgcatcacacatacataagtacataaagaaaattttcatttatttttccctcagatatacttcaaaataacatgtagacacagaatcacaaatatatacaaaacaaagtatcgcctggttatttcaagaagagttttccctcaattttcttagctgctgtgcataaaattcaaagctttcctgttaaggagaaaaaaagagggaagttagagataccagcaagaggtgatggtacataacttaaaaaatcataaaacactaccaactggtagctaagactgccaggcccatggaagatgctgcccctcaagcttcagtactccttccttgtttcatgaaatcacaagttcaagggcctcgggttcagagttaaagctagcagcaggaggtagggtgcgtgtgtgtatacgtgtgtatgtgcaagcatgtgtgtgtgcacatatggaggtatgggtatggaaggctgaggtgtttgaaataaacacggtgtattgactcagttcaatgacataacaaaaaggaattgtgcatatgtgatttctcttattaaagaaaacatgccgggcacagtggctcacgcctgtaatcccggcactttgggaggccgaggtgggcggatcacgaggtcagcagttcaagaccagcgtggccaacatggtgaaaccccatctgtactaaaaatacgaaaatgtgccaggcatggtggcaggcccctgtaatcccagctacttgggaggctgaggcaggagaatcgcttggacctgggaggcggaggttgcagtgagccgagaccgtgccattgcactccagcctgggcaacacagcgagactccatctcaaaaaaaaaaaaaaaaaaaaaaaaaggcaaaatttcctagacgaagaaataaaaaccaacttatgtaaatgaacaagtaattaccactgacataatatgcttggctgttgaactacaggccattaaatcctatttcaagttgaaatgagagaactgccccaaggacatttggtaaatccatgcctatagctgaaggtctgagacagaccttgtattttaaactgtggccccagagagctatgttctccgactgccgcagccaaggcatgctgctcagtccctcaagccatcccctgagggctcttcacagagatctaatcctcatgtaattaagtcttcaacttattttcttacacattgttatgaagtgcacataaatctgcagaggtattttttccccttaattaagaaatactcacagggggttcaatgaaagggacaggctctccagcatacttcagcaaagatgcgtaacgctttagaaacagatcatccaattttgtattctttgcagtcaaatgttcatacagtgctttagcagatgtgacatctttctctgagactgacataaagaaaaaaatatattaatcagagataaagacaacctatcttactcttttcaccaaaacagccactcagggacggctggatccctttatcccacggcaaatgaacacttaactactttcagtaagaagccacattcagaatctaccatctccctcacttctctacatccctcattcggcatcactcactttgaaggagaagaaaatgacaaatatggctacatttaaaggactttagaataatattgataccattcacttaggttattacattatttaagacctatgatagttcaagtgaccacaaactgaagtcctcagttataaaataatacacaccattcaatcccctttggcttaaaaccactgtgaaatcaagataatccaggaactgttgtggagagggacatgtcaattatgtagaaatctacatcaacatcaagatcatcagctcaacatcaaaaaagcttttcatttttctattgtaaaataaacaaatatggaaagtatagttagctacaatgatacacacacacaaaaaacctataggccgggcgcagtggctcacgcctgtaatcccagc

SEQ ID NO: 18 - DNA, 63503 bp, Homo sapiens
gctgggattacaggcgtgagccactgcgcccggcctataggttttttgtgtgtgtgtatcattgtagctaactatactttccatatttgtttattttacaatagaaaaatgaaaagcttttttgatgttgagctgatgatcttgatgttgatgtagatttctacataattgacatgtccctctccacaacagttcctggattatcttgatttcacagtggttttaagccaaaggggattgaatggtgtgtattattttataactgaggacttcagtttgtggtcacttgaactatcataggtcttaaataatgtaataacctaagtgaatggtatcaatattattctaaagtcctttaaatgtagccatatttgtcattttcttctccttcaaagtgagtgatgccgaatgagggatgtagagaagtgagggagatggtagattctgaatgtggcttcttactgaaagtagttaagtgttcatttgccgtgggataaagggatccagccgtccctgagtggctgttttggtgaaaagagtaagataggttgtctttatctctgattaatatatttttttctttatgtcagtctcagagaaagatgtcacatctgctaaagcactgtatgaacatttgactgcaaagaatacaaaattggatgatctgtttctaaagcgttacgcatctttgctgaagtatgctggagagcctgtccctttcattgaaccccctgtgagtatttcttaattaaggggaaaaaatacctctgcagatttatgtgcacttcataacaatgtgtaagaaaataagttgaagacttaattacatgaggattagatctctgtgaagagccctcaggggatggcttgagggactgagcagcatgccttggctgcggcagtcggagaacatagctctctggggccacagtttaaaatacaaggtctgtctcagaccttcagctataggcatggatttaccaaatgtccttggggcagttctctcatttcaacttgaaataggatttaatggcctgtagttcaacagccaagcatattatgtcagtggtaattacttgttcatttacataagttggtttttatttcttcgtctaggaaattttgcctttttttttttttttttttttttttgagatggagtctcgctgtgttgcccaggctggagtgcaatggcacggtctcggctcactgcaacctccgcctcccaggtccaagcgattctcctgcctcagcctcccaagtagctgggattacaggggcctgccaccatgcctggcacattttcgtatttttagtacagatggggtttcaccatgttggccacgctggtcttgaactgctgacctcgtgatccgcccacctcggcctcccaaagtgccgggattacaggcgtgagccactgtgcccggcatgttttctttaataagagaaatcacatatgcacaattcctttttgttatgtcattgaactgagtcaatacaccgtgtttatttcaaacacctcagccttccatacccatacctccatatgtgcacacacacatgcttgcacatacacacgtatacacacacgcaccctacctcctgctgctagctttaactctgaacccgaggcccttgaacttgtgatttcatgaaacaaggaaggagtactgaagcttgaggggcagcatcttccatgggcctggcagtcttagctaccagttggtagtgttttatgattttttaagttatgtaccatcacctcttgctggtatctctaacttccctctttttttctccttaacaggaaagctttgaattttatgcacagcagctaagaaaattgagggaaaactcttcttgaaataaccaggcgatactttgttttgtatatatttgtgattctgtgtctacatgttattttgaagtatatctgagggaaaaataaatgaaaattttctttatgtacttatgtatgtgtgatgcatgttcaaagtcttattgaccataactctgtgcacttggttattggacatttttggagtttttttctctgggaaaaatcgatagtgttttcttcaatgctgctgctgtgtgaagccatactttttcaggattcttcccctaattggctctttggtttccctgctctgtttcatttatttcattaaaatgttattcctttatttaagattcacttattagtctgctgtttctctgaaaaattttagagctaggtatagtgaccgtgaactttctaacgcataatattctgtgatacagccattccgtacatgtgtgaagtcctgcataactttcgaactttgttaaatgttggcactaggagtcatcagatctaggcttcatcattttccagtgagaagcagagacccaaagggcctgttacttgtgcttggtcaggggactgtctgtcatgcctggaggctcttcggcacacttccccatctttcccttctgccactgtggcttcaagcacctctgttcatagagcgtctctgaaattgagtctcggtcatgacttatcccgaagtagagcaatgtgtttcctctcattgtagtttcaggactttgtcagtacaagctctgccctaggcttgttactttatactcatatcctgaaaagatgtgatttcatctatgaaggggtaaaatattggtttgtatttaattgtttgaaataaaagtgatccctatattgaatctcatgcctgttaatatctacactgtaagtagtgacttcaaaaaaattctaagataggtagtcaggagagtttgccattataaaaggtgtcttaataatatggaatattgacctaactggagatgaggtaattaattaccgaaatgttgaaaatgttttgagaactctccccattttggggtattccttgttcatttgaatttggtgactccctactgttccagtttcagtgccaacttgggtcacactgttcacatcaggggagaccttgccttggggacgtaggcgggcctcttgcaacttgtgctgttgaccttctgtcttgtggaactctctctcctgcatctgctacctgcccgcagatggtgtgagggagggttgatggcgggaagccaggaagtagatgtcatcatggtattggccaggcttttacttcaactctttttgtggcgttagatttaaggaagcagggggcatggccaacgttgagtcttggcccagtggacatagtgcggctttcccttgagcactgcccagatgcaggacctgcacatgttacaggtttgccaaaagcatctttttttttttttttttttttgagatagtcttgctctgttgcttaagccagagtgcagtggcgcaatctcagctcactgcaacctccgcctcctgggttcaagtgattcttgtgcctcagcctcccacgtagctgagattacaggcttgcaccaccatgttcagctaatttttgtatggtaaagacggagtttcaccatgttggccaggttggtctcgaactcctggccccaagtgatcctccccctgcgctcgcttcagcctcccaaagtgctgggattacaggtgtgagccaccacgcctggccaagagcctcactcctgtctttagtgattgcactgaagcaggcctcatttttttgcagtcatgctaaccacaagttagtcaacattcactaattgacattcattagaataggtctccaaggtgaggcataacgttggggtgtaatctggatttcgcagtcatctttttggggaaactgaaagtaccatctcatttgcatgaagtgactccacactggccctgtatatggactctggtaaaatgtgagtgtggtacagaggaaataggtaagacccccttatctagccctctcggcagcagcgggggggtgttacaaaggactagctgttcaaatatcttttgtattgtattgattcccctattgaatataaatatttaaagtataataactatactgtaggtgggcttatgagtgttctaaatatctaatagctaaattgaaataagtagaaatataaacaatttagcagctttctgtaatacatttacactcaaattataagcagctaattctaaaaaagatgtcactgtaaactattgagaactatagtattttatatataattatatgttcatgtatttgaacccaaaataattttaactgaaatgctttgaataaagtatactgtaaatatctgtgggctgctgctgctttttttttttcttttttaaacaaacagtctcactctgttgcccggcctgtagagcagtggcgtgatcacggctcattgcagtcttgacctcccagtctcaggtgatcctcccacctcagactcccaagtaactgagactacaggtgcatgccaccacggccagctaattttttgtattttgaagaaacagagttttgtccggttgcccaggctggtcttgaactcctgggctcaagcagtttgcccaccttggcctcccaaaatgttgggattacaggcacgaggccctgcacccaactggcaccttcatttttatcttgtcaaatgtttgcacaagtgctttaagccatttcaaaagacttcagtcttagaattataaattaaaacttaggcagggacctctgttatggctagaatttccttgttaaatggcctataggttgtatgtagacaactgacaaaagtcagtgcttatctgttttaaggacaagcagataatttgagacttctgtggaataaagttggcaaaaattagaaggtagagcttgggtgtgtggtaaattgacacctaaaatgaaggaggttctatctgtatcagagcattttacatccccctagatggctggggcccacccacctcacggacaggctgccttcagcacctgcaccctttttcgagaatgctgagataccgtcagtgtcacctctgcctcttgggcccctcacccagcatattgttccctttccagggcttccacggctgcttgagcagagcaggtatcacactatcttccacacagattctgaactccacagggaccagttcttggtctcattatgtgtccccagacctagcataatcctgtcacagtaaatcaagccgtctgtagtcagttctgtgcgttctaaacactgcacctactgctatgggtcaggcagcccttttgcaatgagaattcaccgtgagaaacctagggtcacagcagtgaatttgcccagaatcaacttgataagttgcatggctaggactctgactaaaatcatttacttcctatgaataggaaatggaagcaatcggtttaaagtcagttaaaagtcaaattggaattgaaactgtaagaatattctaattaaaaaaaaaaaccctcacattcacattaatagaagtgctcccagtttccagacatcttacactgtaagcctattttcttacacttaattgaagatccagtgcctggcataatcgctgagtttaccagttccagtaaattattaagcaagctttgtattgcaaattgttctgaggacaatttctttctcaagtctgcaatgtgtgtactctgcacactttttctcatgtccttgagcataattttcatttaatatttgtctttctgatgaaccaatatttgtagaatttctataaccgaaagcaacattcctgaaggagggccgaactaatagctgcagggagtacaaaatcacggtaatttatcgctttcctgttgtacaatcatgcatgggagtgtttccattagaaatgtatcgtgctttcaggcccgtggactttacaaagcctacattatgcagccttagtacaaataaagaaaagctgcattagcaaatcaaaaataggcacttatctttttcttttctgcatggaggaaaaaaaaaatcaggtccaggtaaagcaaaagtgttcaaccagcttcagtcttcctgcccttgcacagttgtttggacaatggttggctgttgagatctatcctcagagagttctctaaagtagcgtgttgttttttatttatttatttatttatttatttattttttgagacggagtcgtgctctgttgcccaggctacagttcaatggcgctatctaggctctgcaacctccgcctcccgggttcaagctattctcatgtctcagcctcgagactagctgggattataggcgcccaccactgcacccggctaatttttgtatttttagtagaggcgtgtttttgtcatgttggtcaggttggtcttgaactcccgacctcaggtgatccgcccgcctcagcctcccaaagtgctgggattacaggtgtgagccaccataaagtagcgtcttcaacccaggcctggatgtgcccttgctgtgacattcccattatttacttgtttttgtctgttttctccctgaggaggtgagttcttccagcactctgcagacctgccaattagcagagcttggcatgataggcacccggtaggcatcactgaatgagtcaatcaatgggcacaccaccatgtccttcccctttccaagtcgtgttccttctgagatggatgatttgtgtgctttggagggtttcctccacatggtggtcttcttacaggatttctagtcagctctgtagctcagagttaggacaccggggattgaggcccaaggagtccttcaaaacccaagtgcccacataaaaatattttcaagtttactgtcaggaagaggaggcctgtgaaaaccagacaaactcaagatcaagctgattccaagcacagtgcagggcttctgtgcaatagtggaataatggaatcaacacaaataaagcttttcttttctctcttttttttgagatggagtttcgctcttgttgcccagcctggagtgcagcggtgtgatcttggctcactgcaacctccatctcctgggttcaagtgattctcctgcctcagcctcccaagtagctgggattatagacatgtgccaccacactcggctaattttgttatttttagtagatatgggggttccaccatgttggccaggctggtcttgaactcctgacctaaggtgattcacccaccttggcctcccaaagtgctgggattacaggcatgagccaccacgttctgtttttcttgttgttttgttttgttttgtttgtttgtttggagatcgagtcttgctctgttgcccaggctggagtgcagtagcgcgattttggctcactgcaacttccgcctcccaggttccagtgattctgctgcctcagcctcctgagtagctgggactacaggcacttgccactgtgcctggctaatttggtatttgggatagagatggtgtttcactatgttgcccaggctgatgttgaactcctaacctcaagtgatccacccacctcagccttccaaagtgctgagattacagtcatgagccactgcgcccagccgaaagagctttatttttagcatgggtcagtagagcttattagcagtttggggaaacaagaatatttccaattttaaagagacgagacaatcatacaaatgatgtgagcactattacatagaaagcagagaagtgtttttgagttggtttgtgtttaaaaatctcaacccactgcttaaacgttgttttaattattagctgctaacaccacacgtgctgctgttcctagtgcaccagcagagaatgggctgtgctccatctgcctgcctgcctacctgctgaagctgcctcaggcagagctcatgtgataaagacaggggatgttgctctgtacccaggccactttaaatgaagaacaaatcattatcaagtacgaatgacagatgacttgaaatctgaattatctagtgcagactattcacaaataaggatgtctgttgtctctcaggtgtgagcattggatatattttgcaaacaagcaaaggccaaccaacaaaatatttcatcactttccccgcattccagttccttgcacgcttcctcagggcctgtttggtgctccagaccccaaggccggttgggccaaaggaaagtggtctgtatgctgtgctaagccactatgaggaacccctggtcccaggtctgttaacacttggatttgacagatttgaacatttctgttgctagttgtttaatttgggatcatgacaagagttgaagtagaagaaaacaaaagcaaatgcgagatctacctctgtagactggtttaacccagggcaagattacatcttatatactatttataggaacaagagcagatttttttttaaatcaggaaatatttgagccaatattggtgattattttctgtttaattaaaattccccaccaatagcataacttgaaattggagggcttaaaatgcaaatttgaaaacctttaccaaggctctgcaaactacaccctcaggtcaaatctagcaacctgcctgtttttgtaaataatactttcttagaagacagccacaccggctgtacgttactatagtctacagctgctctcacactgtaacagcagagttaagtaattgcagcagagcctataaggcccacgaagtcccaaatatttactatctgactcttaacaggaaaactttgcaagccatgctttcaatactgacaaataaacaaatctctaccctttcgcaatgcagggcagggctcgctgaacagcatgcatgcctcgagagccttgggttttttttttttttttttgagacagagtatcgctctgtcaccaggctggagtgcggtggctcaatctcggctcactgcaacctctgcctcccggattcaagcgattctcctgcctcaacctcccaagtagctggaactacaggcacgcactaccatgcccagctaatttttgtatttttagtagaggcagggttttgccatgttggccagaatggtctcgatctcctgacctcgtgatctgccctccgcggcctcccaaagtgctgggattacaggcgtgagccaccgcacccgggagagccttggttctttgttttcctggcctcacaatgccttgaagagcattttaaacaaaacagacccatgggatcagagtctctgggcaatgggtccacattggcttttgttaaagctccagcatgggcaaccagggtggagaaccaccgctgtaggaaaaacacaaataaatggcagctgctatattttctccatccctcctgcctttgcactttgcccttttccccttcagcacggcatacagagccactgagttaccaaaacccattgcagaccgaatggtgaactcacaaagtcaggtgatgtatcttagtggctgtcaatcactgcacattagaattacctggggagttaaggcaagctaccaatgtcctcttcatccttcccccttcttcattcaggcctaacgccattaggggaccacagtgacaaggaggtggggggaagttgtggtgggccacgggagtgtgaggaagacagctgcagactcagggaaagctggacttgggagttagagcctgagcagggtaggcaggacgtccatacaggagaaggcgtggcagtgtagatgggagattacttacctgcaggcggttaatcaaatgagtaaataacctaagggtaatggaagccaggtttctcacaattagagaagagggaagaacctaggatcaactctgtgatgctggattggaaatggatgttatcagagtaaactcatgtgtacttaggtgtatatgtatgcacatgcgcgcgcgcgcgcgcacacacacacacactccctaactctgttcactgagagagcctgggagcagagatgttccacaagcaaagagcatacttatcaccaaaaccttggcttctaaataccattttccactaagaggaacccagattctctggagaaacatcggattccagggctgagatgggaaaatacaagatgaacctgtgacaccaggtgcggtgggtcacacctgtaatcccaacactttgggaggccgaagcaggcagatcacttgaggcctagagttcacaaccagtctggccaatatggtgaaacactgtctttactaaaaatacaaaaattagccaggtgtggtggtgggcactgttaatcccaactacttgggaggctgaggcaaggcaatcgcttgaacctgggaggcagaggttgcagtgagccgagatcgcgccattgcactccagcctgggccacagaatgagattctgtctcaaaaaaaaaaaaacaaaacaaaaaatgagcctgaaactcttggttgtttcagccctcaaaggatgatgaggacatatcaaaaggatgcagaagccagctcgacggggttcccactggccaaatcagggacaagctgagcatcagaattaatcacaataataaagggttgtaaggatacaatgggaattcacaagtttacatcaatcaaaattttaaaatgcataaatggaaagtttacaatttacatagtttcaaagtacccacttacaaaatgcttattaattataaagggagggaaaatagtaacttggctgtggagaagcctagcagacacccctttaatcaagtgatcaaagtgaacgttgttggtatgggagaagttgaaatcacatgccttctgataggatgcactgggcagaacacaaattgagagacagccttcaaactcaagtatcaaggtcacaaaagtgaaggaaagttgacaaactgttcctaaactgaaagagacaaaagagacttgagaactagatccaaggcttgattctggtctagatccccttgctatggaggacatgataggaactcccagtcaatctcaagaatggggtctgcaggttggatggtggcaacatgaccgtgcaagcatcctgagtgttgcaagtgctttggaaaacggcagcatgcttgaatgtgcacagatcaccagggggtcttcttaagacgcagactctgactcattgagcctgggtggggcctgaggctcatgggacctatccaatcagctccagctgtgcccattctgctggcccagggatcgtacttggagtagcaagactctagtgaacctatgaagagtatttgctatttacctcccaaacacgcaccttccccttcttttgattctaaactctaattttcctttgggaacatcctctcctgccctctgtgcacctgttttgggtcagatagtccccaacactcaggcaagaagtgtgcaacctgggcctctgcctccccatcctctggccactgtgaaaggttcaaggctggttctgaaacccaggcagggccagtgtattcatctgctctcacactgctatgaagaaatacccaagactgggtaatttataaagaaaagaggtttaactgactcacagttcagcacggctggggcagcctcaggaaacttgcagtcgtggtggaaggctcctcttcacagggtagcgggagagagaatgagagccgagcgaagagggaagccccttataaaaccgtcggatctcatcagaactcactcactctcaggagaacagcatcagagaaaccacccctatgattcaattatctccatctggtcccgcccttgacacttggggattattacaattcaaggtgagatttgggtgaggacgcagagccaaaccatatcagttagtgaaatgcaactctaagaagcctggctgagttaacagcctctacagaccccatttgtcttctggagccttcctaaactcctaaggcttacagcggctcaggccttgccttctgccctctaactccaaaggcctcaaaggcttttctgatccccatatgactccaccacaaagtatccatgtgcccttaggaaaatgaatttttgcttcagttttcacacctataaaatgggataccacttacctcaagggattgtccacctaaagtgttttcacaggacctgctacagagtagatgctcaatacatttttaattgttcacgttggcttttggagcccatgaccccacacaaaaagaagggatggcatcttgctggtacatcttaggtcactttctgtattgatggtggctcaccacggagtgtggggcccctggaagatgaagccaaatctgctagctactgttattgttccctccaggttccaacaattcctgcacagtctagctacccaattcattcctagtttgctcccatcctatatcgagttgcctatataaatgcatatcaaaaggaaataaattagcaacgttgtaggtgccaccgagtgcaggttttctcccagtcatcgcagtctcctgccagtgagcagaaatccctttcgactgtctttattctactgccatcctgtggctggtctgtgccactgcagcaccctgggccggatgtagctgagcatctgtagggtcattgtcctcactgtccccaggaaggggctcctgaggagggagtgcagttgaagggtctgctcaggtcccccaccagcgggcagacgtctggcgtgaatcaccagtcttgacttggtttctgtttgatgaaccttaaggacacgtagtacaggaccatgaagccaccgctgaggccaatgacgatgaggtagatggcgtagagagggtacgagtccagctccatgacactgaggatctggagacacagacatgcagtgggctcatgaggaggatggaaagccggacgtccaataatttagaacccgaggccttccccgcttactttatctcctgagaccgcgatggtgaggttcccgagaggcattttataagttcttctgctgaactgaatcttcatcagcccttcaaaacaccaccgcaggaaggacactttggaaatccacgcgggcactggagacagacagccgcgttactcacaggtgtccctcatattctcatggtttccccatattcgcatggtctcccccatattcacagagtctccccatattcccatggtctgcccatatttgcatgatctccccatattcccacagtctcccatatattcagtctccccatattcccatgggctccccatattcgcacgatctccccatattcccacgatctcctttatattgatgtggtctcccccatattcacacagtctgctcatattcccacagtctccccatattcccacggtctcctttatattgacacggcctcccccatatccagtttcctcatattcccatggtctccccatattcccatggtcttctttatattgacatggtcttccccatattcacacagtctcctcatattcccacggtctccccatattcccacagtctcccccatattcacagtttcctcatattcccagtctccccatattactagagtctccccatactcccagtctcccccatattcacacagtttcttcatattcccatggtctccctatattctcatggtctccccatatccccactgtctcctttatattgacacggtctcctgcatattcacatgatctccccatattcccacagtctccccatattcccatggtctccccatattcgcacaatctccccatattccgacgatctcctttatattgacatggtctcccccatattcacacagtctcttcatattcccacggtctccccctattcccacagtctcctttatattgacactctctctcccatattcccacagtctccccatattcccacggctcctttatattgacatggtctcccccatattcacactttcctcatattcccacagtctccccatattctcacggtctccccatattctcacagtctcctgcatattcatgtgatctccccatattcccatagtctccccatattcccatggtctccctatattcttgcagtcttcccatattctcaccgtctccccatattcccacggtctcctcctattctcatggtctccccgtattcccatgatctcctttatatcgacacagtctcccccgtattcagtctccccatattcccatggtctccccacagtcacacagtctctcttacctgcacaagggcacatcccactctctgagacagggccatggtggctctggcccaagttctctgatgagcaaggaggggagagagaccagagaccaagaggcaaaagggcagaggggttgctggggacatggactggggccgagggagctgagaggccacggggtcacccacacatttgatccatagcaattctcgagagggatgtgatgaggcatccctgcacgtgctcagcttcatggactgtgtgggctgaggagactcagcggccccacaccagagacaatggagcctgtgccctgatcctatggaggtggcatggtatggggaggggaaggaggcaatgagccctgcctgggtgcatcaggaaagccctggcagaagagatgccccatggaaggcgggcatgacattcccagagacaatagctgggcaggctcagaggtgagagggtggggtgtgctgggggcttcagaaagctggggaggccgcagggattgagcaaccctgggaagatttgaacaaaggggggcatgggtttgcaccttggaaagctcactctgcgtggctgagtcgagagggatgtggaggggcccaggttacagagaccaggctatggcagtggcccaggctcaaacaatggtggccagggatggagacacagccaagcagacatttcagagaaacaggaggcagaatcgacctggctcacaggtggatgtggagagggagggagacagtcaagggcgacttctggatatcagctgtgggataggaggaggtgcatctggaatctctaatggaatcattcctttggcctccagggcagtgggcaaaggcctctgcttccagaagggccagcctcgagttggatctaagtgataagtgtccatctccagatgaaagcaggcttcatccagtcacatgagtcctaacaaagctggcccaggccccgggggcaggccttacctgtccacaggctgctcaagtttatcatgaagcccccggcgaggtagaaggagttgtagagggcattgctgaagaaggaggccatgtggaaggtggggagcagggccgcggcggccagggccataatcctgcaacagaagaccaccagccacaccagcaggaagtgcagcaggaagggctggaggcctggcctcaggttggccagccagtaggtgggcatcccgtagatgatgatgtaggcacagtgctccggaagctccccgaggatctgcaaagaacagcccttgcaaggatatgaagccagcaccttcactgccattattataaacgtttaaaagtagcagtgcccccagatagcaaccttccctcctggtgatgatgaggctgtggcaggagggtgtgctgggacccaggagcatgagctcagtgctggcctcccccttgcagataccaaatgctccctctagggcagttcagcctgtttcccccagggcagcaatgggcacctgctgtcctaagacctggtttcaagtccctactccccctgaccagatcaagtagctgtgtggccttggagagccacgtagcctctctgaacctctgcttcctggaaacacctgcctggcctgctggggggccacagtgaggctctgaaaaggtaaaatacaatgaggacttcttttttttagattccttctggccagaaaactatcattcctggtccacagtcctggtgttttggtaaatgtttaaaataaaagttcaagtctctgaaactcccctagaaaatgtggcatctggtggcatcggtgacttcacatgacccacggccccatggttcagaaaagccttccttgtagcaacgttttctccacacttacccccaccctggtgggtggggggcacttgctctcaaccctgcccagtcaccttggcaaagaaatatggaccagtggtgtacagcccgtcttccagttcatagtaaagcattgccctctctgagtaacctaaaaagtaagggaaaggaaaagagaatgaagaagtagaataaatctacagtgcttctgttttggagactctcttaatacaattcaaagtagttatcatattgcccaagtctctaatttttttttttaaataggcacagtaaagccatcctaatttagatgtttgatgaggctcttcaggttttgcaagtctgtagctcgtgttctgctgtcaaatataaatcctgctaggataggaacagctaagactcggtaatttactttcatttgtatgctaatattaacatgcaaactttaaaaacattattgtcttatatatcacaatcacaatgaaatcaaacccgctccccaggagctcagaggaacacagcttggaggtggctgaggtcctgcctgcccatgccagtgggccacactcacatttggagatgacatccagaatgacgttgaaagggatgagagcaccgatcatgaacaagagggcggctgtatccatgaaggagagctggatgctcccatggccaaaatagaggaagccgatggtcattgacatcagacaggcctccgccccatggatgaggagggtgggcaggtctcggaagtcgttggaaatctgacgacttaaaaaccaaaaggaagagatgctgaggcaacagcatacaccagccccgtgaccctgggaatgtcacagtctccataagcctcatttttctcctatgcaaaatggggatggtaatacctgcctcatagagtggctctgaggattaaatcagaaaactgatgacagcatctgtcccacagtaggtactcaataaatgattgttacttttatcatgaatgtatcagcttggcaatgttactcaaagaaatgatcctgaggaaaaaatcaattacttccataaagatgtacggacaggctgggcgtggtggctcacgcttgtaatcccagcattttgggaggctgaggcaggtggatcgcttgaggccaggcgatcgagaccagcctggccaacgtggagaaactccatctctactaaaaacacacaaaaaattagtcaggagtggtggcacacacctgtaatcccagctacttgggaggctgaggcaggagaatcacttgaacctgggaggcggaggttgcagtgagccaagattgccctagtgcactccagcctgggtgacagagagagactctgtgttaaaaaaaaaaaaaaaaatgtacgctcaatgatgtctgctgcctcattgcttgtagtagcaaaagcctgaagataatctggccatcaagatggacttaatgggtgggtgattatggctagactaactggaatgccgaggaagacccaatcagacgggaggtagaggtgctgccctaagtgaaaagaaaccagctacagaccagcatgcagagtatgatcccgctacgtttacaaatgtgtgtatgcatggaaacatcaggaaagacacacgccacacagtgccgtctggctttctttgagggctggtatgaccacgacttcccttttaaccagagattctctcctattgtctccatttttctcaatgaccctatgctatttctacgatcttccagccggtgaggatatcttaattttgcttaaagaataaaagcaataggggtgttctgtgtcgcactgaaggttagtgctggtcccaacaatgctgtttcctttttttgagatggggtcttgctctgctgcctaggctggagtgaaggtgcaatcacggctcactgcagcctccacctccaggaatcaagcaatcctcccacctcagcctaccaggtaggcccacgccaccataactggctactttttataattttttgtagagatgggctttcaccttgttgcccaggctggtctcgaactcctgaacttaagtgatccacgcaccacagcctcccagagtgctgggattacaggcataagccaccaacgccctgctggatgctgtttttttcaaatgactctacctctcactttctcctttaaattcactttaatagaaagggcttaatgtgatatacaaagacttgggcaggggggcgggttcagtaataaaatgacagataattaccggatcagcgtcgtaaactgctgcaccgccccaggcatcttcgtaggactcgggaggcagttggtgtctagtggggtcacgctgctgggaggcagaagatgtggccaggtcatgggggcagccaccttctgcagggagctctcctctcagagtcgcctgccaccttacctttccacacaggtgtcctcgtcaagatccttcgtctctgctttccatagaaagtcatctaagtcacgcactttttctagaaacagggctgcgagtgactgagccttctccctggtggccaattcctgctctctgctgcgcctgtcaatgctggtcaggtccactgcaagcaggggatgtggagtcacaggtggcctgttccctggcacctgctcacaggtgaagagcttggtgcacgcccagctcacaatgctgatcacccctcgtggggctctgggacattctccccaccctcagccatgaagcaaggggcagagcagagagaggcagagggaccccaagggctggtccttcaccctgccaggcctgaccacatctgcagaagcctcagggtaagagcagtggatcaaaaaatgggaaagagtagaggccccgcccaagtcccactacccaggctcattttgaggacatcttaggacagagcaagagccttcagagccaagggccacatgacagtcatgctctggctccaactccagctgtccaggaagctttaatgaggactcagtgcccctccatggggagaagttgggctggtcgggggaggctgagtagttaggctcccagatagtgagcgttccatccagagagtgagaattctatccagatagcgagagttcaatccagatggggagagttctatccagatagacagtgacagttctatccagagggtgagaattctatccagatagtgagagttctatccagagagtgagcattctatccagatagtgagagttctatccagagagtgagagttctatccagagagtgagaattctatccagatagtgagagttctatccagagggtgagaattctatccagaaagtgagagttctatccagagggtgagaattctatccagatagtgagagttcaatccagatggggagagttctatccagatagatagtgacagttctatccagagggtgagaattctatccagatagtgagagtttgatccagatggtgagaattctatccagacagatagtgagagttctatctagagtaagaattctatccagatagatagtgagagttctatccagagagtgagagttctattcccacacagtgagagttttattcagatggtgagagttctatccagatggtgaaagttctatcgagttattaagagttctatccagagagttagagttctatccagacagacagtgagagatctaatgagacagagagtgagagttctatccagatagacagtgagagttctatccagagaatgagaattctatctagatagtgagattctatccagatggtgaaaattctatccagacagaaaatgagagttctatccaaagagtgaggattctttccagacagatagtgagagttcgatccagagagtcagaattctacccatatagtgagagttctatgcagatggtgagaattctatccacacagatagtgagagttctatccagagagtgagaattccatccagatagtgagagttctattacgacggagcgaattctacccagacagatagtgagagttctatccaaagggtgagaattctatccagatagagagtgagagttctatccagagagtgagaatactacccagatagtgagaattctatccagatagtaaaaattctatccagatagatagtgagagttatatccacagcctgagaattccatcaacatacacagtgagaattctatccagagagtgaattctttccatatagatagtgagagttctatccagagttagaattctatccagatagtgagaattctatccagattgtgagaattctacccagatagtgctagttctatccagagagtgaggattatatccagacagtgagaattctatccagattgtgagagttctatccagagggtgagaattctatcgagacaggtagtgagagttccatccagacagtgagaattctatccagagactgagagttctatccagatggtgagaagtctatgcagacaaatagagttctatcaagagtaagaattctatccagatactgagagttctatccagagggtgagaattctatccagatagattgtcacagttctatccacagagtgagaattccaacgtgatcgacagtgagaattccatccagatggtgaaaattcaatccagatagcgagagttctatccagagagtgagaattctgtctacatagatagtgagagttccatccagacagatagtgagggttctagccagatggtgagaattctatccagatagtgagagttctctccagatggtaagaattctatccagacagatagtgacacttctatccagatggtgagaattctatccagacagataatgagacttctatccagagagggagaattctatccagatagatagagaaatttctatccacagggtgacagttctaaccaaaaagatagtgagagttctatccagagagtaagaattctatccagatactgagagttctatccagatggtgagaattctatccagacagatagtgagagttttatccagatggtgagaattctatccagacagatactgagagtttcatccaaagagtgagaattctatccagatagatagtgagagttctatccagagagtgagaaatctattcagatagacagtaagagttctatccagatgttgagaattctatccagatagtgagagttctatccagagggtaagaattctatccagaaagatagtgagagttctttccagagagcgagaatactatccagatagatagtgagagttccacccacatggtgagaattctatccagatagtgagagttcaacccagagggtaagaattatgtccagaatgatagtgagaattctacccacagtgagaattctatccagacagatagtgagagatctatccagagagtgagaattatatccagatagatagtgagagatcaatccagagaatgagaattctatccagatagtgagagttgtatccggatggtgaaaattctatctagacaggcattgagacttctatccagagaccgagaagtctatccagatagacagtgagagttctatcgagatggtgagtattctatccagatagtgacagttctatccacagagtgagaattctatccagactgtgagagctctatccagaggaggagaattctatctgaaagattgtgagagttctatctagagtgagaattctacccagatagtgagagttctatccagagggtgacaattctatccagatacattgtcagagttctatccacagagtgagaattctatcctgatcgatagtgggaattatatccagatgctgagaattctatccagatagcgagagtagtatccagagagtgagaattctatccagaaaggtagtgagagtgctatccagacagagagtcagagttctatccagacgatgattattctatccagatagtgagagttctctccagctggtcagaattctatccagacagatagtgaatattctatgcagatggtgagaattctatccagacagataatgagacttctatccagagacagaattctatccagatagatagtgcgaattctatccagagggtgacagttctatcgagaaagatagtgagagttctatccagagagtaagaattctatacagatactgagagttctatccagatagtgagaattctaccagacagatagtgagagttttatccagatggtgagaattctatccagacagacagtgagagttttatccagagagtgagaattctatccagatagctagtgagaggtctatccagagggtgagaattctattgagatagatagtgacagttccatccagagggtgagaattctatccacattgatactgagagttctatccatagaatgagaattcgatccaggcagacagtgagagatctatccagagaatgaaaattatatcgagatagatagtgagagctctatccagagagtgagaattctatccagattgatagtgagagttctatccagagagtgagcattctatccagatagtgagagttctatccagatggtgagaattctatccaaacggatagtgagagttttatccagcgagtcagaattctatccagagagatagtgagagttctatccagagggtgagaattctattgagaaagatagtgagaattctatctagagagtgagaattctatccagatagtgacagttctatccagatggtgagaattccttccagatagtgacagttctatccagagggtgagaattctatccagattgatacggagagttctatccacagagtgagaattctatccagacagatagtgagagttctatacagagactgagaattctatccagacagtgagagttctatgcagagattgagaattctatccagacagtgagagctctatccagatggtgagaattctatctggacagatagtgagagttccatgcagatggtgacaattctatccagatagtgacagttctatccagagggtgagaattctatctagatagtgagagttctatccagatggtgagaattctatccagatagagagtgagagttctatctagagtgagaattttatccagatagtgagagttctctccagagggtgagaattcttttttttttttaattatactttaagttttagggtacatgtgcacaatgtgcaggttagttacatatgcatacgtgtgacatgctggtgcgctgcacccgctaactcgtcatctagcattaggtatatctcccagtgctatccctcccccctccccccaccccacaacagtccccagagtgtgacgttccccttcctgtttccatgtcttctcattgttcaattcccacctatgagtgagaacatgcggtgtttggttttttgttcttgcgatagtttactgagaatgatgatttccaatttcatccatgttcctataaaggacatgaactcaccattttttatggctgcatagtattccatggtgtatatgtgccacattttcttaatccagtctatcattgttggacatttgggttggttccaagtctttgctattgtgaataatgccgcaataaacatacgtgtgcatgtgtctttatagcagcatgatttatagtcctttgggtatatacccagtaatgggatggctgggtcaaatagtatttctagttctagatccctgaggaatcaccacattgacttccacaatggttgaactagtttacaatcccaccaacagtgtaaaagtgttcctatttctccacatcctctccagcacctgttgtttcctgacttcttaatgattgccattctaactggtgtgagatggtatctcattgtggttttgatttgcatttctctgatggccagtggtggtgagcattttttcatgtgttttttggctgcataaatgtcttcttttgagaagtgtctattcatgtccttcgcccactttttgatggggttgtttgtttttttcttgtaaatttgtttgacttcattgtagattctggatattagccctttgtcagatgagtaggttgcgaaaattttttcctattttgtgggttgcctgttcactctgatggtagtttcttttgctgtgcagaagctctttagtttaattagatcccatttgtcaattttggcttttgttgccattgcttttggtgttttagacatgaagtccttgcccgtgcctatgtcctgaatggtaatgcctaggttttcttctagggcttttatggttttaggtctaatgtttaactctttaatccatcttgaattgatttttgtataaggtgtaaggaagggatccagtttcagctttctacatatggctagccagttttcccagcaccatttattaaatagggaatcctttccccattgcttgtttttctcaggtttgtcaaagatcagatagttgtagatatgcggcgttatttctgagggctctgttctgttctattgatctatatttctgttttggtaccagtaccatgatgttttggttactgtagcctaagagggtgagaattctatccagatagatagtcagagttctatccacagagtgagcattctatcgagacagatagtgagaattctatccagagagtgagaattctatccagatagatagtgagagatctatctagacagatagtgaaagttctatccagatggtgagaattctatccagactgatagtgagacttctatccagagattaagaattctatccagatagacagtgagagttctatccacatagatattgagagttctatccagacagtgagaattctatccagagagagagtgagagttctatcagtagggagaattctatccagatagtgagagttctatctagagggtgagaattctatccagatagtgagagttctatctagagggtgagaattctatccagatagatagtcagagttctatccatagagtgagaattctatccagacagatagtgagagtgctatgcagagactgagaattctatccagatactgagagctctatccagatggtaagaattctatccagacagatagtgagagttccatgcagatgtgagaattctatccagatagtaagagttctatccagagggtgagaattctatccagatagatagtgacagttctatgcagagactgagaattctatccagatagtgagagctctaagcagatgatgagaattgtacctagacagatagtgagagttccatgcagatggtgagaattctatctagatagtgagagctctatccagatgttgagaattctacatagacagatagtgagagttccatgcagatgctgagaattctatccagacagtgagcgttctatccagagggtgagaattctatccagacagatagtgggagttctatccagagagtgagaattctatccagatagtgagagttgtatccagagggtgagaattctatccagatacatagtcagagttctatccacagagtgagaattctatctagatagatagtgagagttatatgcagagagttacaattctatccagatagtgagagttgtatccagagagtgagaattccgtccagatagacagtgagagttctatccagatagtgagtattctatctagatagatagtgagagttttatacagagagtgagaattctatccagatagtgacagttccatgcagacggtgagaattctatccagatagtgagagttctacctagagggtgggaattctatccagatagatagtgagagttctatgcagagattgagaattccatccagatagtgagagctctatccacatagtgagaattctacctagacagatagtgagagttccatgcagatggtgagaattctatccagatagttagagttctatacagatggagagaattctacccagacagatggtgagagatctatccagagggtgagaattctatctagatagatagagttctatccagagagtgagaattctattcagatactgacagttctattcagatggtgagaattctatccagatagtgagtgctatccagagagtgagaattatatccagataggtagtgagggttccatccagagagtgaaaattctatccagacagatagtgagaattctatccatatggtgagaattctatgaaaatagatagtgagagttctacccacagagtgagaattctatccagatagtgaaagttctatccagatcgtgggaattctatatatagagagagtgagagttctatccagagagtgagtattttatccacacagtaagaattctatccagatggtgggaattctatccagatagatagtgagagttctacccagagagtgagaattctatccagacagatagtgagaattctatgcagatggtgacaaatctatccagatagtgagagttctacccagagagtgagaattatatccagattgacagtaagagttctacctacagagtgagaatcctatccagattgtgagagatgtttccggacggtgaaaattctacctagacaaatagagttctatccagagagtgagaattctacctagacagatagtgagagttctatccagagagtgagaattctatccagacaggtagtgagagtcctatccacagagtgagaattccatccagatagatagtaagagttctatccagacagatagtgagagttctatccaaatggtgagtattctatccagacagatagtgagagttctatccagatggtgagaattctatcaagatagacagtgagagttctatccagatggtgagaattttatcctgacagatagtgagaattctatccagagacatagaattctatccagatagatagtgagagttctatccagagggtgagaattctatccagatagtgacagttctttccagatactaagagttctatccggaaagatagtgagagttttatccagagagtaggaattctatccagttagtgagagtactattcagatgggaattctctctagatgaatagcgagagttctatctagagagtgagaattctatgcagatagtgagagttctatccagatagtgagaattctatccagatagatagtgagagttctatccagattgtgagaattctatctaggtatatagtgagaattctatcccgatggtgagaattctatccagatagtgagtgctatccagagagtgagaattatatccagataggtagtgagagttatatccagagagtgaaaattctatccagatagtgagagttatatccagagagtgagaattctatccagatagatagtgagagttctatccatatggtgagaaccctatcaagatagatagtaagagttctacccacagagtgagaattctatccagatggtgagaaatctatccagatagtgagagttctatacagacagtgagaattctatccagattgatagtaagagttctatccagagagtgagaatcctatccagattgtaagagttgtttccagatggtgaaaattctacctagacagagagtgagagttctatccagagagtgagaattctatccagacagttagtaagagtgctaaccagattatcagaattctacacagagagatagtgagagttctaccaagagacttagaattctacccagatcgtgagagttctatccagatggtgagaattctatccagatagatagtgagagttctatccagagagtgagaattctattctatccagttagatagtgagaattctatccagatagtgagaatactatccatatagtgagagttgtttccaggtagtaagagttctatccagaaacatagtgagagttttattcagagtaagaattctatccagttagtgagagttctatctagatggtgagaattctatccagacagatagcgagaattctatccagagagtgagaattctattcagatagtgagagttctatacagttggtgataattctctccatatagatagtgagagttctatccagagagtgaaaattctatccagatacacagtaagacttctatccagattgtgagaattctatccagatagatagtgagagttctaccaagagagtgagaatactacccagatagtgagagttctatccagatgctgagaattctatccagacagatagtgagagttctatccaaagagtgagaattctatcaagatagatagtgagaattctacccagatggtgagaaatctagccagatactgagagttctttccaggtagtaagagttctatccagaaagatagtgagatttttaccaagagagtaagaattctatccagttagtgagagttctatctagatggtgagaattctatccagacagatagcgagagttctatccagagagtaagaattctattcacatagtgctagttctatccagagagtgagaattatatcgaggtagatagtgagagttctatccagagagtgataattctatccagatagatagtgagatttcaatgcagatggtgagaattctatccagatagatagtgagagttctacccagagagtgagaattctatcccggtagtgagagttctatgcagatggtgaaatttctatccggatagtgagaattatgtccactatccggatagtgagacatagtgtccactatctggggagtgagaattctatccagattgtgagagttctatccagagggtgatagttctatccagaaagatagtgagagttctatccagagagtaagaattctatccagataatgagagttctatccagatggtgagaattctaccagacagacagggagagttttatccagatgctgagaattctatccagacagatagagttttatccagagagtgagaattctatccagatagatagtgagagttctatccagatggtgagaattctatccgcattgatagtgagagttctatccacagaatgggaatacgatccagacagatagtgagagatctatccagagaatgagaattctatccaaatagatagtgagacttctatccagatagatagtgagaattctacccagatggttagaattctatacagatagtgagcattctttccaagtagtaagagttctatcaagaaagatagtgagatgtttatccagagagtaagaattctatccagtcagtgagagttctatctagatggtgagaattctatccagacagatagcgagagctctatgtagacagtgagaattctatctagatagggagaattctacccagatggtgagagttatttccatatagatagtgagggttctatccagagagtgagaattctatcccgatagatagtgataattctaaccagatggtgagaattctatccggatagtgagagttctatccagagagtgagaattatatccagatatatagtgagagttctatccagagagtgagaattctatccagatagacagtgagagttctatgcagagagtgagaattctatccagattgttagagttctatccagagggtgagaattctatacagacagatagtgacagttctatccagagggtgagaattctatacagcagatagtgagagttctatccagagagtaagaattctatccagatagtgagagttccatccagagggtgagaattctatccagagagattgtcagagttctacccagatggtgacaattctatccagatagcgagagttctatccagataggtagtgagagttttatcgagatagacagtgagagttctctgcagatggtgagaattctatccagatagtgagacttcaatcgagagagtgagaattctaaccagatagatagtgagagttctatctagagggtgagagttccatccagaaagatagtgagagttctatccagagtgtaagaattctatccagatagtgagagttctatccagatcgtgagaactgtaccaaacagagagtgagacttttatccagatagtgagaattctatccaaatagtgagagttctatccagagggtgagagttccgtccaggaagatagtgagagttctatccagagtgtaagaattctatccagatagtgagagttctatccagatcatgagaattctaccagagagtgagagttttatccagatggtgagaattctatccagacagatagtgagagttctatccagagagtgagaattttatccagacagatagtgagagttctatccagaggatgataattctatccagatactcagagttctgtccagagggtgagaattctatccagatagatagtgagagttctatccagaggatgataattctatccagatactcagagttctgtccagagggtgagaattctatccacattgatagtgagagttctatccagagaatgagtattctctccagacagataatgagagatctatccagagaatgagaattctatccagatagatagtgagagttctatccagagagtgagaattctatccagatagtgaaagttctaactagatggtgagaattctatccagacggatagtgagagttttatccagcaagcgagaattctatccagatatatagtgagagtgctatccagagggtgagaattctatcaagatagatagtgagagttctatccagatagtgagaattctatccagatagtgagagttctatctggatggtgagaaatccttctagatagtgagagttctatccagagggtgagaattctatccagattgatagcgacagttctatccacagagtgagaattctttccagacaaatagtgagagatctatccagagagtgagaattctatccagatagatagtgagagttctatgcagagtgagaattctatccagatagtaagagctctatccagatagatagtgagagttctatgcagagtgagaattctatccagatagtaagagcgctatccagatggtgaaaattctatctagacagatagttagaatcccgtgcatgcagatggcgagaattctatccagatagtgagaattctatccagagggtgagaattatatccagacagagagtgagagttgtatccagagtgtgagaattctatccagatagtgagagttgtatccagagggagagaattctatccagatagacagtcagagttctatccacagagtgagaattctatccagacatttggtgagaattctatccagacagtgagaattctatccagaaagttctgagagtgacagttctatccagacagatagtgagagttctatccagatggtgagaattctatccagatagatagtgagagttccacccagattttgagaattatagccagacagagagtgagacttctatccagagactaagaattctatccagatagacagtgagagttgtatccagagggtgagaattctatccagatagtgagagttctatctagatagatattgagagttctatccggagtgtgagaattctatccagatagatagtgagagttctatccagagggtgagaattctattgaaatagatagtcagagttctatccagagtgagaattctatccagatagtgagagttctacccagacggtgagaattctatccagatagtgagagttctaaccagagtgtgagaaatctatccagacaggtagtgaaagttctatccagagagtgggaattccatccagatagatagtgagagttctatacagaaaaatagagttctatccaaatggtgagtagtctatccagacagatagagttctatccagatggtgagaattctatcgagatagatagtgagagtactattcagagaatgacaattctatccagattgtgagagttctgtccagatatatagtgagagttctatccagagacagagaattctatccagatagatagtgagaattctatccagatgttgagaattctatccagatagtgagagttcctcccagttagtaagagttctatcaagaaagatagtgagagttttatccagagaataagaattctatccagttagtgagagttcaattcagatggtgagatttctatccagacagatagtgagagttctatccagagagtgagaattctaaccagatagtgagagttctgtccatatggtgagaactctatccagacaaatagtgagagttctatctagatgttgagaattctatccagataaatagtgagagttccacacagagagtgagaattctctccagatagtgagagttctatccagatggtaagaattctatccagatatatattgagagttctatctagagagtgagaattctatagatagatagtgagaattctatccagatggtgagcaatctacccagatagtgagagttctatccagagagtgagaattatatccagattgatagtaagacttctatccagagatagcgaattccatacagattgtgagagttgttcatggatggtgaaaattgtatctagacaggtagtgagagttctaacgacagagtgggaattatatccagatagatagttggaaatctatcctcagatgttgagaattctatccagatagtgagagttctctccaggtagtaagagttctatcctgaaagatagtgagagttttgtccagagagtaagaattctaccatttattgagagttctatctaggtggtgagaattctatccagacagatagcaagagttctatcgagagagtgagaattctatccagatagtgaggattctatccagatgttgagaattctttccatatagatagtgagggttctttccagagtgagaattctatccagagagatagtgagagttctatatagagtgaggattctatccagatagtgagagttctatccagagaatgagaattctatccagatagatagtgagagttctatccagatggtcagagttctatcgaggaatacgagagagttctatccagagagtaagaattctatgcagatagtgagaattctacacagatggtgagaattttatccagaccgatagtgagagttctgtccagatggtgagaattctatccagacagatagttaagagttttatccagagagtgagaattctgtccagatagatagtgagagttctatccagagagtgagaattctatccagatagatagtgagagttctatctagagagtgaaaattctaaccagacagatagaattctatgcagatagtgagaattctatccagacagttagtgagagttatatccagagagtgagacttctatccaggtagatagtgcgagttctatccagagggtgagaattctatccagaaagacactgagagttctatccagaaagtaagaattctatccagatagtgagaattctatccagatggtgagaattctaccagacagatagtgagagttttatccagagagtgagaattctatccagatagatagtgagcgttctatccagagggtgagaattctatccagatagatagtgagagttttatctagagtgagaattctatccagatagtgaaacttcttccagatggtgagaattccatccagatagatagtgagagttctatccagaaagtgagaattatatccagatagatagagagttctacccagagagtgagaattctatccggatagagagttctattcagatgggaaaattgtatccagatagggagagttctatctacatggggagagttctatccagatagaaagtgagatttctatccagaaagtgagagttctcttcccacacagtgagagttttatacacatggtgagagttctatccagatagtgagagttctatccagatggtgaaaattctatccagttattaacagttctatctagagagtgagagttctatccagacagggagtgagagttctatccagacagggtgtgagagttctatccagacagggagtgagagttctatccacaaagagagtgagagttctatccagagagtgagaattccatccagatattgagagttctgtcaggatggagagaattctatccagacagatagtcagagttctacccatagggtgagaattctattcagatagatagtgagagttctatccagaaagtgagaactctatccagatacatagtgggagttctacccagagtgtgagaattctatacagatagttagaactgtatccagagggtgagaattctagcaagctagaaagtgagagttctatccagagagtgagaattctattcagatagtgagagttctatccagatggtaagaattctatccagatagatagtgagagttctatccagagagttataattctatcccgagagtgagagatcaatacacatggtgagaattctatccagacagatagtgagagttctatacagtgagtgagaattctatccagatatacactgagagttctatccatagagggagaatcccatccagatagatagtgagagttctatcctgagagtgagaattatatttagatggtgagagttctatccagagagtgagaattctatctagatagtgagagttctatcccgatggtgagaattttatccagacagtgagagttctatcctgatggtgagaattctatccagacagatagtgagatttctatccagagagtgataattctatctagatagatagtgagagttctctctggagggtgagaactgtatccacaaagatagcgagagttctaactaaagactgagaattctttccagatagtgggagttctatccagatggtgagaattctatccagagagtgacagtcctatgcagagggagagaattccatccagatagatagtgagagttctgtccccagagtgagaattctatccagatagacagtaagagatctatccagagagtgagaattctatccagatagtgagagttctatccagagagtgagtattctatctcgatagatagtgagagttatatacagagagtgagaattctatgcagatagtgagagttctatctagatggtgagaattgtattgagatagtgagagttctattcagagggcgacaattatatccagatagatattgagagttctatccagagaatgagaattctatccagattgtgagagttctatccagatggtgagaattctcactgaaaattaataacttggcctcccaggcaccctgccgaaagcaggagaatgtctggctggagggttctagggaccggccaacttcaggtagatttctcactgaccccttggtcggctgctctgccccaggagggagacagcacacttggctgtagacccaatctgatcagcccctgcctcctaaatcccagggatgctaacctgtagggagcaccaggcaaccccacaccacagctgtcctcttgcagtgcctctgccttctacctccaaggccctggcaatgccagaaaaggcaaactgagcccagccacagccaggatctccctatacccagctcagtctaggaccatgcatgcctgcccaccctcccttcattccttccccagaaccttggcttggctagaggttccccactcctctctcttccccttccctcctcccatatcctttttttttttttttttttgagatggagtctcactctatcgcccagactggggtgcagtggcacaatctcagctcactgcaacctccgcctctcaggttcaagcaattctcgtgcctcagcctcccaagtagctggtactataggcaagcgtcacgcacccagctaattcatatatttttattagagacagagtttcaccatgttggccaggctggtctcaaactcctgacctcatgtgatctgcctgcctcagcctctgaaagtgctgggattacaggcatgagccactgcacccggcccttcctcccattttcataacacatctcaagacaagataatgtctaggtggggtcttataaaccatgatgtggccccctagtgtgcagcactgtagctcaaaacatcagatttttgggtaacccaggccccgtgtagctcttgcatcccaggttggtgagaggttcctgccccagggcttgcaggccagagccccttccagtaacaatataaaatgtaaaaaagagttttcaggtttgctgtggacacttgacttctggtaacccctctctggggttactttaaattattccccgatggccaggtcggcaggtgccttttggcccctattctggggatggctggcctgaggatgacacaccgtcaggaagccaggctgccacctgagcacagggagggaggtgacctttctgtgagttcatgcagaatgtgagtacagagggcaaggggcggcctgtcctcctgggggaaggatggtggagaacttgggacactaggaggagggtgtgggctgctggacgaggagtcacagccagggctgggcaccagtcccagttctgtgccttacaactgtgctggaacaggtgtttagctctgcaagctccaggcttctcatctgtaaagatggagatggccttggcctggccggggcttgagagtcaaacaggagaccctttgagcctggcatgtttgggccccatgtttgccttcaaggagatgatcgctgttgtcctgtttactggtggggtccttgctacagtttgccatcctgggtggaagctgggggctcaggcgacctatagcataagccatgacagctgtctccctgggacctggtacaaccatgacgcctgtccagcagccatgcccttcctcagcactcaggatttcaggccaggtacctgggaaggcaactgtcccctgcagaatgaaggaagcggctcatgctccctgagtgtaatatgctgagtgttcaggacccaagcaaagggcaagcctggggctgccagagcaattttcacatctagagattccctggccaaggccaccaccctgggcccccctctgccaccctgcaccttcaggctccctgccactgtgggaacaccagggcatgttttaagatctggtgacttcttgaccttaaaggttgtttccctactgagtctgaataaagactctgatatttattgatccccaccctcttgaattccatgccctcccatctttggagtttgcaagtttctaatctatcatgcacagaagggtagctctttgtcagaagcttctatttccaggccctcatttctagcatttgatacctggcaaaccaccccatgttcttccccatcattgctcctcctctcctgaaacctctgggagtttctcccctgaatctttccagcaagcttgggcagggtttaagcatcggggaggccctgtgtgccagggccctggctgctggccttggggactcaccatagaagtcagcaggattgctgtagcgaggacaggggtagccgatggctgtgaaatactggaccatgtgctgggccgcccctaagtagatgggggtgccagacgtcatcaggaggaccagatcaaacagcctgaagatgtcagagcgaggctggtggagggagatgagcaccagccggttgcctttggccagcctggacaaggtcttcaccaggttgtgggctgtgaagctgtcgagcccagaggtgggttcgtcgagaataaggattcctttccaacacagagaggagcctggtgagtcggtggggctctggccagaccaagccaagcctgaggggaccgcacaggtccctctgcccccatctgccccccaggccctcacctgggttccacaggagctgcaccccaatgctgactctcctgcgctcaccccccgacaacccccgcacgtacatgttgcccacgcgggtgtcagcgcactgcctaagccgcagctccgcgatcacgtcctccacctgtgggccagaaggagctttgaggccacctcaggggcctccttcagggctggacacattgtgaccccaaggataaaggcgcccgctcctccggctgggtttgaaagtgaagggagacagctccagcacttgagttccaagctgcaacattggttcccctgattctttccacaggtcccgaggggcctcgacgtgctgggcatggtgccctgtgttaggaacgtggcagtgtattggggaccatggctctctacccacatggaggcccagaaaacacacaaacaaatacactcatcccacatcttgacaagtgcagtgaagggaaccaatgggctgagctagcttctggcgggctgtggggtttgaaaggagggtggagggtgggctgcagcccagggctggcggaaggcaagctgagttgttcaaactcgacctgcggctgggtcctgaggcaaggcagcaggggaggagcggggcatggacactgtagcttcttggacctgggggtcaccactggggccagttagttacccttttgtcacgctgggcctgggagaaggttctgggcagccgcatctgggcaatgaaggccaaggtctctcgcacagtcaagttggggagcagctggttgtgctggcgcacgtgggccacacacttcctcaccagctgaggcgagctgggctgcccattgatccagatctggcctgacttgatcttgccgccgtgacctcggccagtgatcacatctagcaaggaggctctcccacaacctgcaaagccaccagggatatccctgagagcggagcttctgtgggggccaggctgtcagccactgctccccatacactctccaggaccccggactactctgtccgtgcagatgtgaccagcccctagagaggtggcatagtccctggacctagatggggtgggcccaggacatggagctccaagccttctgtctgcagccaacgtgagcacccctgtggggctgcaaggcatgatggcgctgggggttcaggccaggccagccagtggtggcctgacaggagaaagctagagtcctagatgccacagggccagctggtgcctggagcatttgtcccctcctgccacccaccaaggccctttctccccaaggcaggctggtgttaacataactatttttggctggcaaacatgccagcaatgtctcattattcaatgtcggttggctcagaagctggctttgtgaggactaatttggagcatttatagagcgtcttttaaacatgcaaaaccaaatctattttgagaaataatggagaaaaaaatagagaaataatagaagtggaaacaatttaaaactacagcacagtgtacatatatgttctgactgtatctacacccatctctcttcttttcatcagtggtacttttactttttctttttttttttttttttgagacagagtcccactctgctgcccaggctggagtgcaatggtgtgatctcagctcactgcaatctctgcctcccgagttcaagcaattctccctgcctcagcctcctgagtagctgggattacaggcgctaccatgcccggctaatttttgtatttttagtagagacagggtttcgccatgttggcgaggctggtcttgaactcctgacctcaggtgatctacccgcctgggcctcccaaagtgcatcagtggtatttttaatactcttttttaaaaaaggattcacctaactgagggtggaggatgggaggagggagagcaggaaaaaacacttgggtacaaagcttactacctgggtgattaaataatctgtacaacaaaaccccgtgacactagtttacctatataacaaacctacttgtgcatccccaaacctaaaataaaagttaaaaaaagattcattgcactcaagttaacagcaccctcttctgaatgatgtactaattattattgatttgagaaagtaagcatcagattggatccagtttccaaaaactttcggtgagcctctgtctgtgacagctgttcaagctatgaatgcggattgggctcaggctcagaacatcttcctaccgtggagctaggaatgagctctttccactcccgcagatggagtgttttctgcttgtttgcttgtttgttttggagatggggtctccctctgtggcccaggctggagcactgcagcctctaccatccaggttcaagagattcccctgcctcagcctcctgagtagctgggattacaggcacctgccaccatgcctgccaccacacccgccaccacacccagctaatttttgtatttttagcagcgacggggtttcaccatgttggccaggctggtctcgaacccctgacctcaggtgatccgcctgcctcggcctcccaaagtgctgggatgacagacgtgagccaccgtgcccggccccagatggagttttgatctccaaaaaccaagaagcttcttcacatgatctttctggttactgtgcagaggctctcagggtagaaggggcctgtgcaccacctctgggtgtacctcatttaagatccctgagaacatgagtggaacaaaatagccaggagagaaacctgggagagaagcttcagagccaggctccagggacacagaggacttcaccaacattcacagggaccacggattcccactcagaaagcaggaaggccacgttttctgagcaaaactttgtgagagcggtggggagccttccaatggaggatgcctgtggcatctggggagactctctgatatggtttggctctgtgtccccacccgaatctcatccgaaattgtaatccccacgtgtcgagggagggatctggtgggaggtgattggatcataaaggtagatttcctctatgctgttctcatgatagtgagtgagtttaaaaagtttacactcttatggtttaaaagtttttggcagttcctcccctcattcttctctcctgccaccatgtaagatgtaccttgcttcccctttgccttccaccatgattgtaagtttcctgaggcctccccagccatgaggaactctgagtcaattaaacctcttttctttataagttacccagtctcaggtagttctttagagcagtgtgaaaacggactaatacaccttccatgaactaagacaaaacacccactggcattcaagacccttattcaatggctggaatctccaaatcaataaactcatcaattggaaaccacttttggcattgctgagagtataaaagaaactaaaatgcctagggctgctttcttttcttttcctttttttttttttttttttttttttagacagtgttttgctcttgctgcccaggctggagtgcaatggtgcaatctcagctcactgcaacctccacctccagggttcaagcgattctcccacatcagcctcccaagtagctgggattacaggcacgtgccaccacgcccagctaattttttgtattttttttttagtagagacagggtttcaccatgttggccaggctggtctcgaactcctgacctcaggtgatccacttgcctcagcctcccaaagtgctgggattacaggcatgagccaccgtgcccagcctggctgttttctttgtattttaaaaattatggccagcgttcttttgtgtgtatgttgggcagggggagagggggatggcagtaaaagtcacaggaagtgtagttgatgaacctttctaataaatcattttaataatttcagctgctcagttaaactaaatttggcctgaggctgcctgcatactttgagttcccacagagcaaactgcaagcaaacttagtatgtaaacaaactgcaacttatcttagcagtatattctcttaagacagagactggctgagacaagttgctgagtctcagccaatcatggcagccaagcatcagccaatcacaggctaccgactgatgagctcctgtccatacccaacacctgatcacatcaccctcaaataaataaggtgaacacccaactgtaaccaatcagctatttctgtagggcacttcctttttctgtctataaatactgcctgaccaaattgcttgggggagcctctgaactggtcctgtttttgagtgctgccagattcattaatcactatttgctcagacaactctactatttatttgtctaaagttgtttgttgttgttttgttttttgtttttgttttttttacacaggcaagtaaacctgaagccaaacaacactgaatctataaacaaccaggagatgctcggtgcagtgactcatgcctgtaatcccagcactttgagaggccaaggcaagcagatcacctgaggccaggagttggagatcagcctggccaccatggcaaaaccatatctctacaaaaaatacaaaaaaaaatgagccaggcatagtggcacccacctgtaatcccagctacttgggaggctgagacatgagactcgcttgaacccaggaggagcgggttgcagtgagccgagatcacaccactgcaatccagcctaggcaacagagagagactgcctcaaaaaaacaaaacaacaacaacaaaaaaaacaaaacaggagactattcagtgtaatttattcattcctttctaagagacgggatcgtgctctgttgcccaggctggagtgcagtggcgcgatctcgactcactgcaagctccacctcccaggttcacgccattctcctgcctcaacctcccaagtagctgggactacaggcacccaccacgacacccagctaattttttgtatttttagtagagacggggtttcaccgtgatagccaggacggtctcgatctcctgacctcgtgatctgcccgcctcggcctcccaaagtgctaggattacaggtatgagccactgtgcctggccgggatctacttttttcttatttaggtcaggattgcagggacagggacagagtgagagggacttcatgactgtgatgctgtttcagttacaaagtgcatttatacataagatttcatttgatctttggttatacggtaaacagaacttatctaccagacgggtgtaaaagtttggagcagaatgtttaaaaaattgagtaatctctacctctggaaatgattaattaaaagatataaaatgctctctccagcactatgtaagggtgtcccagggagaaatgtcttgatccgagaatgatgaaaccaaagttctagttctagctctgcattaaatatgtgtccttacgagaatccctcaatttctttggatttgagtctcctcatctgtcaaatggaggggagtgtgtgtgtgtgtgtgtgtgtgtgtgtgtgtgtgcacgcgcgcgtgcaggaggatactctagacacactgaggagtagggagtttgaacaccttcctctgaaaatgcttccaaactggtagggagaaagaaaggtggaacatgatgagaatgacctctgttccccaagccccctttcagctcagacattctctcattttaaatttggccatggaaatgacaatttgaggcactccaagaacctggctctttgcagatgagtgaaagttgtgctaagtaagacactggagaggctgtctgagaggtgagagtgtggcaggggctgtctggccataatcagaatgtgattgtggaggaacaacctgaaccaatgcccctcatggctggaggagtctgaaaagaacattacatgctggagctgtttgctgatctctccgtccaggtgttagccaaagtcagatgctctggccacagcctcgggtggacaagaggcgcactcatgactcttaacaacagcacctaccctcaagccagcaaatggaggagccaggatttgagcccaggtctgtctgacccagaacctgtgttctcagccattctgctgtattattctactagtcagcaaagagctccataagaagcatccatttgtccaaaggaccattctgtatcccaggagagaaaccattgcccagcgatttgcctttccggtacctgagctccctatgatggccagcatctgcccacttctcactttgaagcttaggttctggatgcccagctcacaagaattctggcagctgggagatgtccagggcatcttgaactgagccagctgctcaaaccaagggacctgagaggccaggtccacctgtggggagatatcagaaggttccttagagagctgaatggttcagagggcttcagcaacttctgttcagcatcttcgttccccaggtggcccctctccacagaggatatgtcctcacctacacacaataggccccaacccaggttctaccaaacacggaagcaggacccatgctgagaacctgtagctgctgtttctaggtctgaagataagaagaatgaaaagcatgtacaggccaggcatggtggctcatgcctgtaatctcagcactttggaaggctgaggcaggtggatcacctgaggtcaggagtttgagaccagcctggccaacatggtaaaaccccgcctctactaaaaatacaaaaattagccaggcatggtggtggttgcctgtaatcccagctacttgggaggctgaggcaggagaatcacttgaatttgggaggcagagattgcagtcagccaagattgcaccactgcatcccagcctgggtgacagaatgagactccatctcaaaaaaaaaagtaaggaaaaaagaaaatcatgtgcaatagtggtacagaaataaaaataaaacacgaagcaaaatgtcttcacttgatactagtaatttactaataatttatcagatgtttactatgtgcaagacattgtgttaatcacttaacatccatcaccttattcaatcctcactgcaaatctataacatagatatgctcagaatccttgttttacagatgaggctcagggcagttaagcaacttgctcaaggtcacacagctggtaagtggcagagcagagaaaggctcattggcttgtcccaactcacacccacaggaagccagactcaggcctctgaagttcaccatcccagaccccaccatgtcccatctgggtccctggggagctgtgggaatatggatccttgaatctgaccagggggttcctgggtgcctctgaaaggtcagtcattgtctttgcactctggatgttttataagctccagggatagtacattttacaaaaaaaaaattatatatatatatatatatatacacacacacacacacacatatatatataactaatgaaatctgaataaagtctgtagttaatagcattgtacattgttcatttcttagtgttcataattatactatgggtatgcaagatgttaacattaggggaagctggacaatgggtatatggaaacactgtgttatttttgcaattttttccaaaatctaaagttatttcaaaatatagtttaaaaagagtcccagagacatttttctataggttcacgcattttgttttatgtttatacaacagttttattctcttttcaagcctctcaacctccagctctgatatatgccattgatgacacctattgcacctgacacgtgaggcatcaatgtggactggactctgtccttgcgggcagagggcctgcaagttgggcccacccttttatttccacccggggaatttcctggctgtccctgcctgctcctctccccttgaacccaggcgtgcctctacctggtagttgaggtctctgacctccagggtgttgggctggccactgtaggtgaagtacaggctgttgtcactttcagaggagaacaatctatcctggaggccctgtgggagacaggagagatgaggggctcctttagaagctgctgagaacataggagaagacaagaaggaaaccaacaggtgagagcaacttcttagagccgacgtggttaaatctcaaattggcaacagatgggattgcacaggtggaacctcagggctttgggaaaataggagtgctgacaagggcccatctcctcttcccttcagagagaggtttggggcttctcccggggcaccttcccagagaacctcaacctcaggctggtggagcctgaagccaagcagcttctggtaaagagacccagactctggaccggagagagttctataaaaaaacctctgtgctctgagaagacctgactggagtgggcaaactctttgcctttaactttctcttccctgcagctggcttaatatctcctgaggccaaacagacatgacacttgcagcatgtgagagggaagcagctgttgagagttaatgcccaatattcatgaagataccaccctgagaaaaattctaaccaacatcttagtcctcactaacatctggcatacttctcctcatatctgattttgatgaagagttcatgcaacaaagtgatggaaaatgctgctgggagctttgagaggaagtccctctcatcatcatcatcatgttgttgttattgtcgaagtggtggtatatttgaatgtacattaaaaaatcaatgtttcatggtgtcggctgatacctttgaatggtattaaccatctgcagatctcaattcctcctattttgacaattcaatcatttaaaccattgaggcccaaacaaagaagcaacaggaagtcccccatcatttctttttctttggattgggtctcgctctatcacccaggatggagtgcagtgacatgatcacagctcactgcatcctcaacctctcaggctcaagcaatcctcccacctcagcctccccaccacacccagctaatttttgtattttttgtagagacagggtttcaccatgttggtctcaaactcctgggctcaagtgatccacccacctcagcatcccaaagtgctgtgattacaagggtgaaccacctcgtctgacctccattttttactgcattcaatttttcttacatttctgtcaggcaggaacaagtacactttcattaacaagttcccatagactttcctcctcaagctaccattctcacactatacattccttcaatcaaccatgcacccaacaaacacttatggggagcccagaacacccttcaggcttggaatttgggatgtgacaatgaaaaggccgttgaaaagcttagattttggcagatgagacaggtgattacgatggagcgagacagaccaggcagagagggaggctgacctcaagcatctgaccagggtttattttcactatgtacacaatgcacgcacatgctgtaggtgaaactaacatgacttatgccttacgtgaaaataacaaataacatacagcagtcttcttgtcaaagtacccctgcaatgatgggggccagaagttctcggaaagaacattccaggtcagtggaggtggagggaaagaaattcggtgacagtatgccgcaggcgtgctgtggggaacccttagagttctgggagagtatgaaaaacagcagacgaaagtgacttccattgcttaatgtttgaattatcaccataaagacccaaaattatacagaaaaaaatgggaaagataaacacctaattcaggagaggggttatctctggggagcggggagagatgaaaggagaaaggggacacagtaggagtgcggggatcaagcttcaaagcttttggtaattggtggtgtgtacatgagagttctttaagctgatttgtgtacgatatttcacaatatgttgtcaaattgagagagcaagccagtgagtagaactccagagttccattcccacctcaaccccagttgccaaagcccccaagcaggagggaggttgagggagaggaggtaagaaggtctgtgccccaagctcctgaggagattgaaagcagctcggacagatgctggactcctggcagatcagcccttcggccttgcccctcactcgccctctccgctgtcactgtgcacattgcttcattgtcccatttttgttgttgttgttgaatcatcaaaaaatcttagccattgccagctgtgcgcagtggctcatgcctgtaatcccagcactttgggaagctgaggagggcagatcacctgaggccaggagttcaagaccagcttggccaaaacagtgaaaccctgtctctactaaaaatacaaaaaaaaattgccgggcatggtggcacacccctatagtcccagctaccctactcaagaggttgaggcaggagaatcacttgaaccggcaggtggaggtgcagggagccgagatcgtgcctctgcactccagcctgggccacagcgtgagactctgtcaaaaaaaaaaaaatcttatccatttctaagagactcatgtgggctaacatgcatcttgctgttgttgtttttaaaacaaatatctgcaggagggatattagacaatgtaaatgagctgagaaattacttctgctggccaaaacatccccaggtcggatttaggcatggaggaggcgctgaggaaggaaggtcagacatttggagtctggagcaatgtgtggaggtaacctgcagcccaactgggttccactgtgtggtgctttgagaaggggagggagctggcagacagaggaggcagagcagaaactgggtaagaggaaggggagaggtgcctggttgcttgttccaaggctcaccccaagccccttcactgtggcctgggaaggcaggtgtgggccagccctgactccaaccaccattgagggattgtgccttccaggagttgcacaggcagctcatctttcggaggaagaaaattcgtgcctgggttggggacgacctctgttccattttaaaatattttccttggctcccaggaaggatttgttagactcttcctgaggttttgacaaactctctgtatttttcaaatacttaagtatctattcggctgacatcttaatcagtacgactgtcagaacatcacttgaatttctgacaggtgacacccaaaaaagcaaaagcaggtttatttgtaggtaaccagctctgctcatgctgggctacattgtaatttctcctcgtattaacttctgatcaaattcctgagtcagatgcctaggcaagaaggaaactcacagagcacatgtttctagttctgagatgaggagcctatgccccggggggagtgatgtgctgacactcacggctggagggttggcaagaggacacgcaggacttgttcctggctgaagaaattttatcgaaacattcagcctaggtcacacacagctctgcctgctgccagggtttctcttgtccttctctgttgctgctcctgcccatggcatgaggagtttgtgggttaagggcacttgccactccaggtgcccaagatgccagatattctctgtgcaaatggccccaagtccatccccagggtctgtacacctcttcccaggcccaacctcctgaggacttttaggccagagaagtatatgtctgtgcagggcagggctgcaatgcaggtaggcaggagggtgaccatccagggtgttgagggccccatggagtgggatggagctgagggggccagaaaagggggacaggttgtggctcgggctggaagtggctcccccgtaccagcgcattctagccaagttgccttagaatttctcaatttacacatggcctttcaggttgtgaggaagatatgtcaagataagaggatagaaactattttatttaactgttcttatagcttgactgatgacttttatatatctagacataggaaatgtgaccctcatcctcttgttccaagacccacaggtgttacgggcagaccgtcactcagcacctggagtgacaggatcggacagaagggaagcagaaatggcagggcctgcgtgcatttctggtgtggtcctagcatttctttgcctctcaagctgtggtggctgaatcgtcagccctcccaggcaggaagtgttcccaaagtcccgctgactttctattctattcaggctttaaacatttcccgaagtggtgggccccacagggtattcagagagcagagctggtcagatgtggtggttgcagaactgactagaaatggtgggctccttgggtctggccgagtcaagtcctggaaactcaaggccagtccaggttgttttccccattgggtgtggaatcctcgatcatgcttgtctttctctcctccctcctacccacaacaggcaaagatggaaaggtaggatggggtgaggtggtgggagtggggatctgcttctcgcttgtcttccagtttagcctcctgcttcaaatcctgccacatcccgaattcagtcaaaggctatttcttgagtaaacacttctcaggtaaaatgaggaaggaaacatacctccacctcctgccacctggctgcttctactccttccagctttctcgcagaacttacgattgcctgttagagccacacatgctgatgttcccacaaaagccgtctgtcaccctgtctcacccatcacttcattactgagaccaacctgacagccacatggatggaggagacaccagtggagtccctggcatgtgtgagcacatttctatgatggagtctcattcggaaaaagcgaaactggccaggcacggtggctcatgcctgtaatcccagcactttgggaggccgaggagggtgggtaacctgaggtcaggagtttgagcctgaccaacatggtgaaacactgtctctactaaaaaatacaaaatttgccaggtgtggtggcaggtgcctgtaatctcagctacttgggaggctgaggcaggagaatcacttgaacctaggaggcagagcttgcagtgagccgagatcacgccactgcactccagcctgggcaacagagcgagactccgtctcaaaaaaaaaaaaaaaaaaaaaaaaaaaaaaaaaaaaaaaaagagaagaaaagaaaaaagaaaaagtgaaattgtcccacatcacacaaaagaacatcatttccctaaaagagcatttcttagggcaggaagtgacctcagaggcctctgggaccctgaatctgttcccctccgccctttgacatgcaggaaacagtcctgcggccatgtcctcacactgcttgatgtccgggtggtgctaggacagaaggctcctgagggaagagagaaaggtttgatttctcctacccgcccaccaggcctgggccgacttcccattgctcactcaccgaggtatcctggggagtggcccctttcggcagccctctctcctctgccgccttcccggccatggggcccacaggtctgtgaccctgggctgcagctctcttagacccagctgctgcctgccagggccagtgtcttcactctgtttcctggagcagggacacctcggcctcctgccctgggcccgtctctcccagcattccttgctggcaagcccacctacaaacgtgtgtgttctgcccactgtcaagataaggacgcgctggctaaaggtacatcagataatggtctccgtggccaagtcccagtcctgctgtcccaagggactccggggtcaggtggagcaggcagggcagtctgccacgggctccccaactgaagccactctggggagggtccggccaccagaaaatttgcccagctttgctgcctgttggccatgggtgacctctcatctttgacccccggagggtccatgggtctccaagtaaacagaggctcccagagctccctggagggggctcctgccaccgccccggagcctcacagcctgggcatcctccatgcctcctacagcgtcaggtaaggcagagcccttgctgctgctgctcccccaggagtgcggggcccggcgctcacccctctgctgcctttcttcactctttaagtgccagtctgggcacttcgggctccctctttagtggatcgggtggagagaggagagggagaagggctgtgctgggaaacatggagcgacagtgaatggcccctccccctgcccagggaagggcctgggcataaacaaagtggcagcagtgccctgccaacccagtgtctacggcctgccctctgtggatgggaatgggggtactgcgaatgcaaggagtcttgaaacctggtgaaagaatgcagggacagccacctcgcagccaaacggacaggacattcagagcaactccagcacaggccccctccctacgtggcagacagcctcagtcgctatctgccaggttctacagaggagggcgcagagactgaaacacgttaggagcctgtccggagactactggggtggggcacaggtaggatcaatgctggggacctgggtgtggccccttccagggccccaagctgcctttgccttcctggggtttcctttaaagccaccgcgtgaggccctggtgggacatcacatcttgccggcagcagtggaccaggcagatcctcaaagatgtctccttgtacgtggagagcgggcagatcatgtgcatcctaggaagctcaggtaagcttgggaaggaggattctaaaaaggatttggcttgagttaaactccacattgaagaaacagattaagttgtaacaagaaagccacaggtttgatattagaatgaattctattgatatctgactgtgaatggaactgctaccaatgtgaaatctttagaaagatccttgaaagagtataaaattctgcctaacatgtacgtgaattcatatttcaaaatataaaaagcccccacagttccatggcatataaaagtactcaggaaacacaatttcccctatctgtacactgcctagagacaggaaaaggattaaataagcacaaaaatgcccattaagcccctatctttgattccagtggtgcttttttatgatggtatattttggacatacaatcaagaatagagaataggctggtcacagtggcttatgactgtaatcccagcagcttgagaggctgaggtgagaggattgcttgagcccaggagttcgagagcaacctaagcaacatagtgggaccccatctctacaaaaacatacaaaagttagccaggcatggtggtgcatgtctgcggtcccagctacttgggaggctgaggtgggaggattgcttgagcccaggagattaagacttcagtgagctgagatagtgccactgcactctagcctgggcaacagagcaagaccctgtctcaaaaaaaaaaaaaaaaagactggagaataatatttaaaagttcatgtattaacatcgggccttatcagatcttatctggtcgtttttcttttctttttttttcttttttgagacagagtctcactctgtcacttaggctggagtgcagtggtgcgatcttggctcactgcatccttaacctcctgagctcaagtgatcctcccacctcagctgggactacaggtgcacaccaccatgtccggctaatttatttttatttttatctttttttgtagagacagcgttcttgctatgtttcccagactctttttcttttttaaggaattaaacattacaaattgcactgaggtcatccactgcccgttctccacatcatccttctcctcctctttcccagggtagctgcatttgagcctacagtcggtgtttgtgcccctgcatcagccagtcattgccccagagagtctagcctttggtgagacagctccttgtggccgagggcaattccctgggagggtccctgtggtgaatcttctgcagctgacgttctcagcagctgggggatggctgcattggccctgaagaggggttctgtgtggcacaccacagtgtctgctacactggattaccatctacattttaaggttaaaagcttctgacaaattggctccacagaagcctcttgattgagctattgcttgcaaattgttgacattcactgccactctctacttgtgttattctcttcaatggagatggggactccattgaagtctatgaccaaatgtaggcatggtcagcctccttagactcagggaattgaatccatggctattcacctgctacagcaggtgcacaaccagatgccaacagtagtgttgttaagaggaattcccaggccgggcacggtggctcatgcttgtaatcccagcactttgggaggcagaggcgggcggatcacttgaggtcaggaattcgagaccagcctggctaacatggcaaaacccgtctctactaaaaatgcaaaaaaaaaattagccaggcctggtggcaggtgcctgtaatcccagctactcgggaggctgaggcaggagaatcccttgaacctgggaggtggaggttgtagtgagccaagattgtgccactgcactctagcctgggcagcagtgagactccatcttaaaaaaaaaaaagaagaggaattcccagactgtctcagtccactcaggctgctacaacaaaataccatagactgggtggcttataaaaagcagaaatttttttctcacagttctaggggctgggaagtccgagatcaagggggtcaacagattcagtgtctggtgagggagacttcctcctagacagccattttctcaccctaaccttgcatggcagaagtggggaggggtctctgaggcattcatctgaattgtaagagctctccataacctaatcatctcccaatatcacctccttgcatgccccacctcgtaatatcataatcttgggtgtgaagatttcaacatatgaattttagggagacataaacattgagactatagcactgactaaagctgttacacttttcaaagactttgtcagttcttatttccatttttaaccaacatctagctatacacatgtaccgtaacatccagggtcattctcagcttccttttgataaatacagtgtgcttctttaaaaagaaaaaaaactgcctcttctcctttaacaaattttcacctgttgcagtccttataaagaagtaaacaaggtggcatttagcacccttctcagaagtgtgtcccacttctaagaacaacaagaaatggaaccccccatctcagaagtgcaccccaaaggccaatgctcagaagtgcaccccaaaggccaatgttgtgtttcatgcacatacagcaggacagcaggaggggctcttgattggggtgggggagtgggctgatttctgatgagatgcctaattacggctttgggacaatgcctacactttatactgaaatgaatccacagtgggctgcaagttctacaagggcagggactgtattctactgtatccttatcacctagaacagggtcggtcacgtagtgggtgcttaataaatatttgttgaataaaggagtaaaataattttatgaattactccatagtattgcataaaatgacaatttcattggtgtcttatctcaagcagtattatctatcaaatcttcattagcgaggcaaaagatgatgacatatacgttcaaagtctcactagagtatagtctaaagcaagcctgcacagagccatccaactccaggggaactccaacttatttgaattgttatttgctgttgaggagggcgtagactctgggttagatgcttctttgcagattatttagttgcaaatgtcatagttttatcgccctttagggcattaaccttatgatccatccgccttggcctcccaaagtgctgggattacaggcatgagccaccacgcccagcctctcatatcctcttttgaatgagctttgtcatcttgctggttccctcattaatgagttaacaaatacttgacacatttttttaaaaaactaaattcattattataaaaaaaaaagtatcccaaaatttagtggcttaaaacaacaccattcatgatctctcagaatgtctatggatcagaactctggaagtgacttggttgggtagtcctgtcttgggatccctcccagagaagtatacactggatttggcaacaataaagtggctttaatatccctggggaggccagttttgatgaagtggtggggctgggacccaggctgcaggatatttgcagcttctgccagagttcagattggatccaaaaaatgtaaagccaggatggctctggttagaagaaccacacgactgggaaattacagggcacattttgaaagacaatcccaatgaagtcacattttgtttctttataatgggttttcctctctttccccactctgtccacctcctgaacacgcaggggctatttctgagttttgtcaatgatgcattagaaaagaagacaactgctaagggagttgattcatctttgtacctctcacagcaacaagcaagtttctttaaaatatttcaacaagggccaggtgcggtcgctcacacctgtaatcccagcaccttgggaggccgaggcgggcggatcacctgtggtcaggagttcaagaccagcctggccaacgtggtgaaaccccgtctctacaaaaatacaaaaattagccaggtgtggtggcacacgcctgtaattccagctattcgggagactgaggcaagataattgtttgaacctgggagacagcggttgcagtgagctgagatcttgccactgtactccagcctgggcaatagagtgagactccatctcaataaataaataaataaagggctgggcccggtggctcacgcctgtaatcccagcactttgggaggttgaggcgggcagatcacgaggtcaggagattgtgaccatcctggctaatgcagtgaaaccccatctctactaaaaatacaaaaaaaattagttgggcatggtggccggcgcctgcagtcccagctactcaggaagctgaggcaggataatggcatgaacctgggaggtggaggttgcagtgagccgagactgcgccactgcactccagcctgggcaacagagcgatacttcgtctcaataataataataataataataataataataataatatttcaacaaaagatctctttggctctgcacaagccatctcatcagtagatttctcttgctatcttcccagatagttcagaacttcctgcctatttctctgttatgagtcccaacttctcagcctccttggataggaaaggcctgggaggtctattctgtctccatgaactctgggcctatggtaaacttgtgtccaatatgactgaggggccatcaggttcttgtcctaaaggcatcacctaacctttaaccttagaaaaaagcagtggctcacgcctgtaatcccagcactttgggaggctgaggcgggaggatcacctgaggtcaggaggtcgagaccagcctggccaacatggtgaaacctcatctctactaaaaatacgaaaattagccgggtgtagtggtgcatgcctgtaatcccagctactcaggaggctgaggcaggagaatggcttgaacctgagaggcggaggttgcagtgtgctgagattgtgccactgcactccagcctgggtgacagagtgacactcagtctcactcaagaaaaaagcaaaccaagggaagcatcatcccccagtcacctccagcaggcagttagttcaccacaacccctctgtgggaacttcctagtgacatccagctaggctatgccccaggctctagtgcaggctgtggccaacttggtcttaccaaaggacttaccaagccagtgcttctcaaactcgactgaagcagagctgactcagcaggtcttgggtgcggcttgaggctctgcatttctggcaagctctcaggggttgctgatgctgcttgctttgtgagcaaggctctagacaatgtcacctacatccaggtacaaccagaccaccccaggggggcacaaaaagaaatccgtcctaggatccaaacgtttccaagagtcttggctttcctcttattctgatacctataagtattttgtttttcaatccaaaacagttttaaagacaaataaacaagcagagaaagcacgttcggtcttgacccagatgagagaaatggcatgtcccctctcactcaggggacaatccagagactcacttgcgcgtgagactgctgcacgcacagtgcgcgttccatagggcagggcctgtatcctgctgtgtccttaacacctagaacagggtccgtcatgtagcactcatggcccgcggggtcatgcctgcacagagggtctcgggaagctcctccaaggccggcacagagtggttcctctagggccttctgttgtcgccccgcaggctccgggaaaaccacgctgctggacgccatgtccgggaggctggggcgcgcggggaccttcctgggggaggtgtatgtgaacggccgggcgctgcgccgggagcagttccaggactgcttctcctacgtcctgcaggtgggcgcgtcccccacacccctggcccccccgcccgccccgggggcttaggctacactgacgcccgagtctcctgcagagcgacaccctgctgagcagcctcaccgtgcgcgagacgctgcactacaccgcgctgctggccatccgccgcggcaatcccggctccttccagaagaaggtgggtgcagccccccgctcacagagggcaaactgagtacctttgcaccccccgctgccctcctctcttcgcctacgcttgcccattccttccctttgctcgtcactccttcactctagagcgcgccctgcgtcctgcaccgtgcaccctgtgctgcccctagtcacatgtgcctttggagacttgaaatgtcactagtccagactgaaacgtgctctgagcgcaaaatacacatcaaatttcagactcttagtctgaggaaaacagaacgtgaaaaagcccattaagaatttttaggtcgggcagggtggctcatacctgtaatcccagcactttggaaggccaagatgggaggattgcttgagtctagaagtttgagaccagcctgggcaacatagcgagactcagtctctataaaaaatacaaaaattagttggacgtggtgatgtgcgcctgcactcccagctgctaaggaggctgaggcaggaggatctcttgaacccaggaggtcgaggctgcagcgagccatgattgcaccattgcactccagcctgaaggacaaaaagagactctgtctctcccaaccaaataaataaataaatttcaaaaagtattgattacaggttgaaatggtatttttggctgtaaataatatgttattaaaattaatttcacctgtttctttttacttttcaaaatttggctactaaaatttcacttctgtctgtggcttgcattacccttctctgggaccatgctgttctacaagttccctgtttgaacagacatagttatttttgccactgatttttctcagcttgcttggaggcatcttgaatgtgcctcatccaaactggactgagttaatgaaggaagaaatgattgaattgtcaactccttctaggttccaatctctttcttaattgtctccagtttggaagtagccacaggtaaacccaccggggaccttacctggaaactgcttcatttctctctagactgggaaggcccacaagcacccagggaaccaatgacaggtggacatgcctccttcaaggggcacagctccctgggagcaggagaactcccgatagcagagttctctccaattgagagtcatttctgagcaaatccagcccacagcgtgtaaaatcctgataagtaattcagtgggaaggaagtgctgatgataataaaggagatagcatggcagatctgcttctgtccttggaagaacctggaaataaagcaaggccaatgtgagcaggctatgtctgcggggctgttggctaaggctcaggcttcctggaccacttcagagagcccagagagtcctctcaatcctggccctgccatttgctaatggcattatcttgggcaagttatggaactttgttttctcctctataaaaaatacaataagaatgcatttctcctgggtttgatgtgaagaatacatcagattacgtgaaagcacagagcatggagggttggacttgctcatcccaatagtccttccagggactctgaattccatttccaaaatttgtttccaaaatgtgggagagcattcctgctggggtgtgaaacctctgagacaaattaagtaaatgtcttctctgtccatctcttccaagccaggaggggcaagcttactccttatgatgttacagagatgagaaggaggctcgggaatctaccctggctggtcagcacagaaatctcactgtgtcaagcaaagcttaattctaggatccttctaccctgatggcaagagaagagctttcttttgttccagaatatatctatatctagtttatttatgcatttttaccttctcattattcctttgtacctatttcagatatgtccattctttgggtgggtcaaagctacatctatgccgtcaaccccactccctgactcctcttgaatgttggtccacaagtcattccctcttcttctgcaatctagcttattgttttttaatgcaatggttttgtttccattttcataacacggccttattaggggtgtctggaaacaaaacttattaccatatgagtatcttctgtctctttctgctttccccctggggtttctgcagttagaggtaatcagtacagggggacagaaacagatttgtgaacaggtctctggagaggagataagctgaggaaggaaagacagtgagggaggaaaaaagccaagcttcttgattagaaattcagtaaagaattttttttagtcgttattgttttgggagagttgagaatgaggaggaaaaacggtttcagggagttacaggctttaagtacagcgaagagaattggaagaaagggaattttaaatgtggctgggggttataaattgggtccccattaaagtccttaaagaaattcaagtaaagattggaattatttttaattacttctgaaggctggattatatgtctttgatgtggactcacactgagattgtaccacatgggaccccagcacttatttgggttatacagtgggaaacaggtttagttcaaatcaggttggatttttgtaaacacataaagcatttatgataataaaatttcaaaacccaaacacttatgaaagtaagcgatattgtaatcatgaatttgggggatttttctgtatgggctgcagtgactatggctcctgcaaataggagtttaatgaagtatctgttgtttcctggttaattttcctgaagcaagtgtaagcagtttgtgttctagggaatcttattttattttatttgtttatttatttattattattttttttgaatcggagtctcgctctgtcacccaggttggagtgcagtggtgccatcttgcctcactgcaaccttggcctcccgggttcaagcaattctcctgccttagcctccgagtagctgggattaccagtgcctgccaccactcccagctcatttctgtatttttagaacagacagggtttcaccgtgttggctaggctagtctcgaactcctgacctcaagtgatccacccacctcgacctcccaaagtgctgggattacaggcataagccgccatgccaggcccattttattttattttattttagagacagggtcttgctctgtcacctaggctggagtgcagtggtgccatcatggctaactgtggtctcaacgtcctgggatcaagcgatcctcctgcctaagcatcctgagtagctgggactacaggcacgtgccagcatacccggctaatttattgtttttttctttctttttttttttttttttttttgtagagacagggtctctctttgttgcccaagctggtctcaaactcctggcctcaagcaattctccctcctcagccttccaaagtattgggattacaggcatgagccactgcacccagcctctggggacgttttaaaaaattcatattatttatttaaatctgacacatgtattacgatttaagccgaattggatcatattattatcaaagacatgctttccccagggtgtggtgagtctggaagtggcccttggattcttgggcggtgtgctgcctctttcatgtcctccccagcccatgaattgaaatagcagccacagagactcccagccttcctgtaatttgtgtctcctgcaggtggaggccgtcatggcagagctgagtctgagccatgtggcagaccgactgattggcaactacagcttggggggcatttccacgggtgagcggcgccgggtctccatcgcagcccagctgctccaggatcctagtaagtggcacccagaactgttactagctgctgtctgggcatcttctgtgtgtgtgcagatactttgggccctttcttcacggtcctcatttggaaaggggtttgtgtacaactgaaatcacaggtttttcaaactgaggacccagtttttttggaaatgctgtacagttcatttcctgatgcgattccatcatccaaacaaaacagctcctggacccggaagcgttgcattggtgttgaagtgttccattggggttttccttgaatatggagccttgccctgccaatcatttcttctcaccagggcaataccactgtgtgggctggggaaagccaatgagttttgatatgaccacaggtgttcatgaaatggcaggaattaaaataggaatttgaatgataaactcaaaagtgtatatgttgtggggaagggagtatcaaaacagagtagtcagtcctctgccaggtttggtcattttccccatcacctggggaaacctcgccactcatgcagctggagaggacaaactgcatctggatcctttctttgcactgtggtagaccaggacggcctgttcttcaaatggtgcttggtcactagaaggcaaataagagagatgtttttaacagctcttgtcactttttttttttttttttgagacagagtttcgctcttgttgcccaggctggagtgcagtggtgcgatcttggctcactgcaacctccacctcccaggttgaagcgattctcctgcctcagcctcctgagtagctgggattacaggcgcctgccaccacacccggctaatttttgttcttttagtagagacagggtttcaccatgttggccagggtggtctcgaactcctgacctcaggtgatctgcctgccttgacctcccaaagtgttggcattacaggcgtgagccaccgcgcccggcccccttgtcactttttaggaagaaataagttactttaaaccctctaaagaacccaaatgcctgccacacttcaggccttg

SEQ ID NO: 19 - DNA, 41203 bp, Mus musculus
caaagggattggaatgttcaggacaggggtaaccacagttattgaagaagccaagcatctcctctggggtgccacagaacaccaactctccgtaagtcaggatggcaattttgtcgaagtgctgcttggacaatagatggtgttagtgtgtgctccaaagcctgggttactcccatatatgggtgttgttatatgcctctgagtcccagaatcaatcacacttgggccactgagagagtggccataagcaaccagagtagtgttttgtgtgttgcttggttttgaaatattaaatcattatcaattgacaaacaaacaaatactggctaactaaaaggatgccatgggtatcaaatgaaatttctttggggtaaagtctataatgtggtgatgaaatggggctttggtggctaactaagtcatgatgccactgccaggtgcctcccctccccgtgtgtgtgtgtgtgtgtgtgtgtgtgtgtgtgtgtgtgtgtgtacatgcacgcatcaacatcatgtgtcttgcttaattactctccatcttgtttgagacagtgtcccttactgaacttagggattcagctagacaaaatggccagcaagccccagagaccttcctgcctctgcctcccttgccctgggtaccaacacctcagtgcccagcttttacagtcatggggagtccaaactcagagcaagcacattaccaactgagccatctctccaagctgccactggcagcattttaccaactgtgtgattctggctccatttcaagtcatttctaacttgtccccttttctcccttcaagtgtgtatgtggatgcttaaccccaggattgctttgtggactaaatgatggtggcctgaatgagctagtgtatagactatgcttggcatgcctttggtactgtgtaaatcagcctgtgttctctcattactggcgtgtgctctttaccctgccctgccattcccggttcaagacaccatgctcctaccattgggttcagtgcattcccttacttggaagagctcagagcgaggctggtggatggtgacaatcacaattcggtccctgcgagccagctcagccaagagaaggacaatttgatttgcagtcatgcagtccagtcctgtggttggctcatctagcatcatgacctctgccggcaaagaagggtcaggtatctgaaccactgcccagcatgctctgtacttaaacctcagtgtttctgaccagtccttcattgagacgccgtaccccatccaaactgcgtggtgagaagtagccacatggaaactggctttcaacctgagcccaggagaaagaacctgacctgggacgacccagctctcagctctggagcacacctggagataggagagagaccgtatcaggcctctttgtactttggactacttgggctccatgcctgggacactgacagagaccagggctagcaggcaggcttagggagggtaaggaagtagctaacgtttacctagcccaaccctgattcataccagggcactttgcaatattaatgaggtctggtctttgcacagcagaaggaagaaacaaggtctgaagtgccagtagctggacaggaattggctgagctccttagacgctttaactatatcccatgtctgcccaagaagtgacaagggtttttttatcgtctcctgaccaagcgccgtcagaagaggcaggtttattctaatgcagagtaaagaaagaatccaggtgcaaaatgacctcttgaaggagcacgtgagtggtaaggttggtcaagttgggagaatgagcaaaccaggctgggggaggcagaggactggctacctcaccttcataacctcttccctagtggaccacagatacacaaacaggatactcttaagagatgttcagggtgaatggtttttgtggtggtagccctaactctgaataacctggtaaccatggcaaccataagctgaaggtgcatttaatacacccaacctaccgagcatcttagctgggtaacagtgcactgcagggccagtcatttcctctcacgggctcactgctgctacctagcatcatgaggggatgtgctaccatttatcattagtctgagagaggatcaacggtcacagttcagttgcgcatgtatcactttcacgtttctgtaaagctgacctgtgataagttaagggactgtctcccaattacaaaccctcaccaggaaatgaactacatgacactttctaacattgggatctcgaattttcgaaaccctggggaatcccaatcctatacaaatcatttttacctgggaactgtgaggacagagcctcaagcgcacaaggacccctttagcatctggtgaccggtttgtgtcccacttactggggtcctgaaggagttgggctgcgatggaaactcggcgccgctcgccactggaaattcccccaaaattatagctgccaatcatttggtccgccacgtggctcaggctcagctctgtcatgactgcctctacctgtaagagacacaataccccagggctgccacctgtatctatggctgacacttcagtttctgggctgtgatggccccagagagataacactgctctaaagtacaagggctactttcagacccaccataccctggggagaaaagtccattagtaaaatccaccttagtttaatacataatacaccggtcagatttaaataaaagttttaagtccctgggagacaaaaaaaaaaattgcttattcttgcaacagaaaaatgtcccaaaggcatcattatgacatagattatgttaagtatttgggttttgaaattttattatcataaacattttctgtgctttaaaaaaaaacaatttggtttgaagtggcccccttatcccctttgtaacgaagtaagtcctggaggctcaagtggccaatcacaatgtggttttacatcaaaggaatataatccaacctccaaaagtaattaaaagccattctaatctttactcaaatctctccgggaaacttcaaagagtccccaacatataatccgcagctctgtgcttgtccaggcttctaattccccaccaatcctctccattctcctaccctgcggctccctgcagtccgcttcttattccgactctccacaccataacattccaaaacagtgctcactggcttgctaagaaggctgccctttctccctccactgcttcggtttactgcagcccccagagacctttgggaaatctctacctctctccttcctcgatccctgagtctgcaggaagccctgggggaagcaggggcaggaatgaaataatatagccaagaatttgttcctagctgcctttaatgagattgtgtccctttcaaaatgaaaaaaaaaaaaagagagagagagagaaagaaagaaagaaagaaacgggcacatttcttcgaaaaagagccgcaatatgactgcaggcaaagagatgtagtagcttttggagcagagttccagggaagagcagccagagtcaccagcgtaaatgaagccctggcctacagacgatgcgaaggagaaacgaggctatcagaaagccagtaagatctgatctggaaaaaaaacacagagtctcctcttagagtcagatggaaggatcccagaacggagctttgcctgactcgtgggtgctctgaatggaaccctgcttggtcctctgaagaaacagccagtgctcttagccacttatctacagagccatctctccagctcccttctcaaaaaactttctcctatcattttagatttaaagaaattactaaagcaagcagagagacagctgcagagggactacatggcttgtctcttcctctgtcgcccggctagacccaccaagccacgtgaacatgtttctgcacaaccacctcccaggagagtatacatgtcctcctctcagactgtatggttctcaagaaagcatggagtcagagggtgtgggttttccccatggggtggagatgaagttccctcccccagctaatattagatatcagtgagataatattaatatcagtgagatactgtatttgtacaagcctgctgaatgccagccagagaaggcaccagagacaggacccatgtaacacccctgagctctctgggtaaccttagtgggagagatagatggctgaggcatcgctctgtgggggctgggcacctcccgccaactgcctccctcagctgtccaggattcttaagtataagcagtctgctcactttcccaagagctcggtaagacgcccacctacttcctagggagctgttcctgttgcaggtgacagccctgcctggtgctatttttttcccaagtttcccaggccttcatagttcagactgaaggaagcaatgtttctaactaagatcaaggtgaatttatttacagctacttgcaaaatgggtgtggccaacaatcaaacctagatgaaaaatgactccatagtttcttccttaatggaagaaacttagtctcctttgcatgcatgaagccccgttaaagacaagatagataagcgggtaacagcaccgaccacctgaattggatcccctaaagccacgtgatggaaggactaaaccagaggcataaccagacttggattggagtggtcacgtttcagatcttcagacagctcatgtagctgccgcttaggatggcagaggtagaggtgaatacaagcgtgaagcaaagattaaaaaaacaaacaaacaaaaaaaaacccgaaacaaaaaaccaggaggaccaggggaccaggggtggccagaggaggagctggtgaggcacctggtcttgtcccttggggaactggccttcactcagctttaactttcaagtaccttcttgttgtagaagtccgcggagctgcggcagagggccagcatcgctgtgtatcgcaacgtctcgcgcacagtgaggctgctcagaaaaacgtcgctctgcaggaaaggggacatcagggtcgtcgaaatcccggggctaggggccagagcccgggcaggctagggccagggacacgcccacctgcaggacgtaggagaagcagtcttggaactggtccctgcgcagctcgcagccattcacaaacacctccccttccagggtcccagtgcgccgcagcctcccggagatggcgtccagcagcgtggtcttccctgagcctagggggcgacaagagaaggccctggaggagcctctgcacggtgagaatgggggcacttctccagaccttttgtgtttcaatgggaccctgactgcaccatggcccctggtcaaaatcccagggtctaaataaatctttccagtttatcctctgaatgaactgggacacgcctagtaaagaggccaaacaccacatggatttggtgacaggaaagcagttctcttgcccttggtaatgacagaactggaacccaggtctgaagaagttttgtatttagataaaatgtataaaagagggctcagatggcagggtgcttgcagccaaacctgaggaccttatttcagtcccagaggtgaaaggagatcctgaattatcaaaaattgtcctctgactttccacatacaccatggcatgcatttgcccgtgcacatacacacatgcataaataaatagtgggggaattttgggttgagaaaaatgcaggttgctgggaagtggtggcccagggtctgaatcccagcgctagggaggcagaggcaggtggatctctgtgagtgtgaagccagcctggtctacagagtgagttcttggacagccaaggctacacagagaagccctatcaaaaaaaaaaaaaaaaaaaaaaaaaccaaccaaccaaacaaaaaaacaaacagaaaaacaaacaaaacaaaacaaaacaaacaaacaaaaaaaacgtgtgtgtgtgagagagagaaagagagagatcccagggagggctgttggaagcatctggtgcctaggacataaattcctttttgtgatcccctaagcctgtccagctctgcatgaatctagatggccttgctagagccttctgactcttctgactcgtggtctgagaccctgaaacggagactcacagacctattgaatgtgactctgatttttaacaagttcccatgagtattagagtgtgagggacactggcttagcagcctttggggaaagcaacctcagcctgtaccaagagccttggctacagctagccagttactaccccaaatgctcctgcagagttctagaaaagcaactgcctgaaccttgaggtgacagaggaacatgcatctctgttttgttttgtttccccaaggtcacatcatacacaggttagcctgggttccagaacccctggagacaggacagacttttcctggtgattcctgctagctaaccagacttactaacaaggacacaggcaggaggctctgaaccaccttcgagagcaagggaattctgccagactgagccgctcacacagggccagacagaagatctcccatccaagagttttgtagaaactgcttttgctatgaggggtccaaagataagtccctacagcaacgaccattgtgtctaaaccatgtctgacagaactcggagttagcacgcatgttcgggcagtgtggagcagaaaggggaacaagagcctcctttaaaggaatgggcttccagatgtcttcagtggtggtttgtaacctgtaaatgttgataatacgctgtttattacacttcgctgttcacgagactcactccgtggctcttctgcccacgcatattgtggaggctgtttgcaattgttttccagtgacattaagagtgtagttcatgtggagaaactttagcagttgtcgtctccccacctgtatttatgggtgttagctcaactgcctcactgcagaaaaggctcattatcacagtcagtgtatttgtaaactgcctgaaaccaacgtgtaggcatagaaatattttcttgtaataagagaaaaataaatcgtgggctgggggaatggctcagttgtagaacacttggttcaacctcctgttacacacagagaggtggggggagaggaggggagcagaggaaggaagaaggaagaaggaagaggagaaagaggaaagtggccctcagagggatttatgacctgatttcccagccgtgagccctgccctttcagtgaggtttctctaagcagagcctcaactctacaaggtagcgagatgcctcaacccctccttggcatttgttcctgacacctgccctttctctctgtctctctgtctgttggtctgtctgtccctgcagcttctcagcctcacacagagacctttaggcttccccctagccttctctttcctctggttctcaccaaacaacgccaaggactaacttactacataagtctggcagcgtaggaggtagatccttagtcacacacaaggtgactgaagcagaattacgaagtatattggaagctgataagacattgccctcacaactggagttagtgtacttaggaaagagcctgagggtcaggaagatggttcagttggaaaactgttcattgtccaagcgtgaagatgagcgttaaaaccccagtaaacaaagccagcatagtgacacttgtaatcctggcaccacagaggcagaaacaggagggtctctagggctcgctggcttcccagcagcctcgacgaatcagtaagttccaggtagaactaactcatagaccttgtctcagaaaacaagatgggaagccaatagtggtggcacataactttaagcccagaaatctggaggcagaaacaggcagagctctgagtttgagagcaggttgggtctacatagcaacttccagaccagccagggctggaaagaaagaaagaaagaaagaaagaaagaaagaaagaaagaaagaaagaaagaaagagagagagaaagagagagagagagaaagaaagagagaaagaaagaaagaaagaaagaaagaaagaaagaaagaaagaaagaaagaaagaagaggaaaggaaacaaaacaaaaaaccacacacacacacacacacacacatctacccacaaacaaaatacaagcacaaaaaagacacctaggttgattgcaggccttcacaaacacaagcccctgcacatatacacacacaaagtaatttaattaattaactaaaaatgtaagagacttgggagaaatcccacaacccttccattatttgagattagagctagaaaataccacttctggaaaagccagctgctgtaacttgaatataaaatgccccccacccccctcaccccccaccctcagcctcctagatccccagttgctggtactacttgtggagattctgggaactttaggagggggtgactagctggaagaagtagatcactgtagtgctcctcaggggtgctcctagggggtgctcctggggaactttaggagggggtgactagctggaagaagtagatcactgtagtgctcctcaggggtgctcctcaggggtgttcctctggtgtatcttgttcccacccttcctgactcctctctcagcttatcatccatcatgatataagcgtcctgcttgcctctcactgtgatgggctgaactcttagaaagcgtgagccaaaacacatctctccttctttaaaccatttatgccaagtgttttgcccacattgacaaacagctagtacccagccctcaccacagacagctctgtcaggcctttggtcttggctgtcagtctcttgaagtctgaggaatccacactcttgctcataagtcacctagtgattctttccaccatgattcttttcttacagtaacctaattagactaattagcaaattaactgttgctgttattatttcatttattcttcatctattgtcatatagctgtgcttggatgaatgctcatggatttaatctgaggctagaaatctgttttgtattgctataggaaaactcccgagactagacgctcaaggcagagaaatcatagaagagagagtatgtgtgtgtgtgtgtgtgtgtctgtctgtctgtctgtctctatctgtgtatgtgtctgttagtctgtctatctcagtgtgtgtcagtttgtgtatctgtgtgtgtgtgtatatctgtctatctgtgtgtgtctatcagtctgtctatctgtgtgtgtgtgtgtgtctgtggtgtgtgtgtggtctgtgtgtgttgacccacagtcttggagacttaacattcaaatgggctagcctcatgtgtctggccttctggctgcatggcaccacggtaggtgtcattgtgagtcaacaggttccgagctgcggcatgatgagacagaagccagagggacccacgtgtcagcccttctttcatagcaactttctctggtgagaaccactttggacactgcatgagctacattcagagggctacaccccgtggcccttcatcctccctagagcaccaggcctctcatttccacaggaaggacaagctcctgtcacagagctttgggactcactctcagctacacccaacagtgtcatacctgactctccccacagccttacactgcctgtttctaagagagcacaaggcaaggggacagttaaatgctgacagtttacaaggggctgctcagtcaagaacggtctgtgagtcgaatatgccagaatccttaagcagaggcattcagaataacccagtgttgcgaacactgcggcatgctacccagagcccctcttctgggccagtgtacccctccccagctgctgcagataggaaaatttacagctataggttttgcaggggcagaggaggaaacccctcagaggataatgacagttagtggaagaacacaaaacaaacatggaagtcacattcaaaggttaaaatctcacctggaaagaatagtgagacacggggaatacacacaggtgggctcagcgcagtgtgtgtgatgcttaactcctgaagagagaggcccaaagaaagcctggtgtgcttggtgtgctcggtgagactatattaacatgaggtcttttttagtggtatctgttctcaactgtgtgtctgatgaccatcataatgaaaagacaagtagggtcaggaatagaagttaagtcctgcctaacaactccttgacaaaaactttccagatgtgggaatatcagttgaaagtagaattgggggccttcgaaggaactccacaggaagaccaacagagtcaactgacctgggctcttagctctcctaggcctccctgcaccacagtcaatcaaacaatcaggaggggtggccaggagaaggtcagtgagcagaatgcaaagtgagaaagaaagtaaggaagaaagaaagaaagaaacaaagaaacaaaagaaaagaaaggaagaaaggaagaaaggaaggaaagaaaagaaagaaatatagaaggaagaaagaaaaaaagggagagaagggaggaagggaaaggaagggaaggaggaagggagggaaatacatttggggctggggtgctggggcagaaggtttactgagcatgcccaaggctctgggtttgctctctagcatcacagtcaatcaaacaagcaaagaaggcacttacgtgttaggcaggactttccactctttccagggattttcctcaagatttcactttggtactaggttctattggcagccagacaagtcaccagattgtattcaaatgccaaatgcatggctgcctctctacaacttaaacttacttcttaaacattgtgcttagacagagccaaagcctcccagagcctgccttagaagtacaggagccccggcccccccaggcacttacctgagctgcctaagatgcacataatctggccactctcgatgtacaaggagacatctttgaggatttgcctgtcccacttctgctggcatgatttgatgttccaccaaggcccgacacggttgctttaaaggaaatcccacaagggcaaaggcagagtagggtcctggaaggtgccagacccctgctcccagccctaccccatcccagttgcccctggacaggttgacaactctgttttagccttatgtaccactctgttgtccttggaggtataatgacaagttggccaccacccaaggagcatgcctcccattagctgctctgattactgggtctctgactgggagatggtacacctgcacactgctttcttcttgaagtgaaccctgcattccttcagcagtgttcattccattttgtgcccccagcacccccactctccgagccttctccatctacacaggacaggtggtgggcgagtcaaggaaggggagagcagaaatcagtgagaagcagcaagcggcttcaggcagggcatgttttaatgtccaggctctgccctgcgcaggaggaggaggaggaacgactcactgttgttacagactgtccactttcaccctgatctgctggacagacaacccaaagcccacaggcccacccacccattcagaaaaggcaatcagagagcctagctttttgctgtggaggtccccttacctgacgctgtaggacacatgcaggacacctaagctgtgccgagcctctgtgcccgtgaccgaaccttgctccagggagctcagagaccctctgttgatgtgaggccctctggctccctctggactcagaaagggcagctcacccatggctagcaggaagcaaatgcaagtgaattttctagtggcctgtccggctccagggcagctttaactgaggagccaatgggagtgccctgtccgatcctacccagccctggaatcctcgtgagataacagttcaccaatttggccaacgatgccattatctgatgtacctttagccagagtgtccttatctcgacaataggcagaacacacggtgtgtttataggagtgtttgccagagaggaatgctgggagaaaggctggcacagaggagggctcaggtgccccagctctaaggagcaaagacagagagagcccaacagcaggggaggccacacaaagggcacaaacagcactggtcatggctgagaaaaccaaagaagagacccagctgtggaatgggactgtacttcaggatgcttcggtgagtgagctctgccaggggggaggcagtgtcagactgacttttctttcctaccacaggattagtcctaatgtaccacctggacttcaagtagaatggaaatggggcggcagggccctgtctcctcagtgttgatggtctgaggggaacagtctcaggagccaggagacctctgaggtcacttccccacgacagcacgctcctgtgaatgaccgggattgatgttttccaaatgacattccatcacagagcgttgacccatgtgactgtcagaccaagaatctcagtggtagtcaagagacagcggggaggtaacaacagatcgctacgcttgccatacttatgtagtaagttagtccttggcattgtttggtgagaaccagaggaaagagaaggccagggggaagcctaaaggtctctgtgtgaggctgagaagctgcagggacagacagaccaatagacagagagacagagagaaagggcaggtgtcaggaacaaatgccaaggaggggttgaggcatctcgctaccttgtagagttgaggctctgcttagagaaacctcactgaaagggcagggctcacggctgggaagtcaggtcataaatccctctgagggccactttcctctttctcctcttccctcttccttcttccttcctcctcctctgcccccccacttctcccccccccctgtgtgtaacaggaggttgaaccaagtgttctacaactgagccattcccccagcccacgatttatttttttctcttattacaagaaaatatttctatggctacacattggtttcaggcagtttacaaatacactggctgtgatagtgatcgcttgtttgggagcgtcagaattgtgtgcttgcagtcttatggtctgggagggaggcagagtggacagagagcagcgaggtggccaggaagtggagctcctaggcctccttcctcattaaccggagaaacatttgcttgataaatggcctttgactcgagttgtgggcaggatttgaagcagaaggcagtatgggaagacagagcaaagacgacctccccctccccccagcttctacacccggcccacttttctggagacaaagaccagaacaggatggccacattcaacagggacgcctcagtcccctgttctaggggagacaggattgcctgagattgaccaatcctactaccacagcaacaggcaactctgctgtcagaatccccatgaggcagacgtctatggggaaataactccttctacgtctttgatgctcccttcctgagtaggatataaaatcagtggtgggtgtgggggcttttgcccttcagattacagctaaaaaggcaatgagctgtcagaattctatattcaaaagtgtgcctaggtcctgccacctacaagttccttctgtgaggtcccactgttgtaggtgccctgtgatggcccgccactgacaactgcagggcttggggtgggggggagacaatgacactgatatgccctgtgcctccgttcttaaaagctgtcagtcaagctaaaaactgcccagtggtttccagcctctcatctctgtatgcaaatttagaaaactgagcatttcttgcggagctggctggcttctgctccatgccgtggccatccatctcctcctctgcccacccagcatctcactctacaaagaactcacatagcggccacaccgtctttctactcatattcgagtcaggtcttcacagagaccggcactacccatactcagtgatggcctggaaggagggaggagatcagggctatctcacagggaattctggcactgagtaccagggcgccaggacccatggtctacagctcctcgcactgcagacagggataggaaagcctggactctaagcagaggcagatgagatggtgtctgcaggggtcaacagagggccaggtatgtgccttgggccaaagacttaccatatatgtccccaccaggcaccactgttttctgcacatttctccctttttgtgccctctggattttcccatgtgtctgtgcttctgactcaggaatgtaaccagaagttaatacaaggagacgttacattgtagcccagcaggagccacactagttacctacaaataaacccgctttcacttttttagggtgtcacctgtcacagattcaaatgatgttctgacagtcgtgctgattaatgtgtcagccgaatagatatttaagggtttgaaaaatagagagaatttgtcaaaacctcaggaatccttcctgggtgccaaggaaaatattttaaaatggaacagaagtcatccacaagccagacaggatatattttttttttcctttcagaagctgagttgactgtgaggctcctggaaacccagactctccgtgtggacggggtcagtgggtttgagtgagtcagagtggcgacctgggcactaatcaactgcatccctgtcttccactctgtcctctctgtctgtctaacccccccccccccaggtcttcacattagcgcagtaacctgagagctttcctccctcagtagcccctccactcctgaagccaatggaagaaactttgtatcagtacaagtgtctaggaacaaattcctagcccatgcaagtaactaagatctctcctaaagataattgatttgaaaacaagaaaccccagggaccccggatgtgttgctatggttctgtcagtatcatgattggcctagtatatttgatgctatggatttgattccccaacacacacacacacacacacacacacacacacacacaccccaaaagatatctccaatatattcctacttcagagagatgaattatattacagggtaggggatggttggcagtcagatcctgggcatcaaaatgagatgggagacataaattctagtgttctgaagcacagcggggtgaccatagtttaagccattgctattattattttttagtaaagatcagagaatggagctggggtgatgctcaaacattaaaagcacctgagaatacctggaccccattcccatcacacacagatggttcacaaccacccataactccaggtccagaggacccagtgacctcttttgacctctgagggtgccaggtatgtgtgtggcgcacgcacatgcatgcaggcaaacagtcatacacacaaaataaaataaaaattttactttcaaagcaaaagacccggagagaagaatctgatggtttccaacacaaagaaatgagaaccggggaaggcgctctctgcatgtgacccttacacattgactacatgtctcccagcagggcctccaggacagcttgttctcctcggaaagtgacaacagtctgtacttcacctacagtggtcagtccaacactctggaggtcagagatctcacctaccaggtaggggcacgtgcctgggttcaggggagaagggtgggcagctaacaaaatgttcaggagaaggaagggtgagcccactctgtaggttctctaatcccaagggtgaagttcagactgtcctgggcgcaagccctatctgcagctagaggtttggaaaagggtagaacccctcgtgaggatgctagtgttcactgtgaaggcctgtggggatgtcggtactcataactttaaaatttgaaatccttctctagatatagatatagtgtgtgtacatttatgcacatatatttttatgtttgtaatattatatatatatcatatacataaaatatatgtgtttatatatacatacatatgatgtagctatacaatgtatgacatatatgaacgtattatatatctgtattagatgacagatatcaaaggggctggggagacagctcactcagtaaagtgcctgagctcagatttccagaacccacagaagacaatctggcctgggtggcacaagtctgtgatcctagagtctagaggatccttcatgtcattcagcctggccgaatctgtgagttacaggttcagcaagagaccaggtctcaaaagtaaagtagaaagtgccatttaccgctgggctctcaacacacatgtgcaaggtgcattcacacacaaatgtgcatgtacatacctgtagaaaacacacatagcaaacacacagtgtttgtggagacacactttttgcctggcttcccttgaagtccacatcttgcaaactacatagtaattatcaaaactaggaaattaacaatatgctcttaagtaaatgacagtttgttgagatttcattcacttagatctattatcatctatctgtcatctatctaacatctatgcatccatctatcatctattatctaacatctatctatgcatccatctatcatctattatctaacatctattcatccatctatcatctatatatcatctaacatctatctatccatccatctaccatctatctattatctagcatccatctatcatctatctatctatctatctatctatctatcatctatctatctatcatctatctacctatctgtctatcatctatctatctatctatctatctatctatttatgtacctacttatggtctattttttataaaatatgttgtcccattgcccataaaacatgtagaatgtgaaggcacccaggaagggcccccagaatgcctttgtcagaatgcaatgattccccattccccatttccccaggggcagaccacatgctgcccaagtgggatggtgaacttcagagtcccaagccagccttcttgtgcctctgagtctaaacaaaggaacgagccgctttgtaacctctctctgctctgccacgcactgtaaacagtataagcttgagagaattccttaactgctttgaactgctcagtaaaacagacaatagtacccacaccatatgcttgcaatgaacagtagatggataatgatataacgtgattattgtaatggcttgcagctggtaaacacttgctggcttttttttttcctgatatttcacatgctttctggccacccaccctctcagctctagacttgaacaggatggtggggtctcgctgccatgtttggtaggactgtggtgtgggatgcctcaagatctcttatgcatcagtatcgatcggggtgtctcctgtgagaggagttatacaaaatgcagtagacgctgctgaagccctctgaatggttcagtttcccaagggctcgctaacctctccccacaggtggacatcgcctctcaggtgccttggtttgagcagctggctcagttcaagataccctggaggtctcatagcagccaagactcctgtgagctgggcatccgaaatctaagcttcaaagtgaggagtggacagatgctggccatcatagggagctcaggtaccaacagaggctgtcaggggacaatggcttttctcccctacgattcagaacagccttcagccatgaatcttgcatgcagaaccctggactaagaaagtaatatggtaaaatggcttagagcacaggttctcagtcagatagacctgggttcaaatgccccctccctcacccaccaactcttagatgttgctgttgttgtgcccctgagtgagagtctagtccacctgcagctttggctatcgtgcgtgcctacagttcacactggactaagacgatacacaagcagctttagaacgtgacgttcttttcagagacttcccccaaccacgggtgcctgctcaacccaagtcaggtcatggtcagacaatgactcggcagggccgagctgccactgcccccttcacagtcctagcataaccttcaaccgcctgccaagaggtagatccttgaagtgtctcaggcagtcgctgtcacaggtcaaatctgaaattacagaaccttgcagatgagaggggcttggagaacggggttggtttcccatattggaccctacctcatacccttcctgtctggaagcattttagggagaagatttttaaatcatttatctagtcctccatatttctagaacgttctttgtgagaacatgcacacacacacttgacaggtgagaacactaactccaaaagagttgagtgagactcctaagggcaggaatttacctagcgcagatcttacactgacatctcattatgaatcccgggattcctttatgcaagattagagaactttatactttttagttaatcatttccagaagggaaaattgcccaacactttgaacatctgttccaaacttttacactcttctgatagacttgtttactgtctaaccaaagagcaaataagctacaaaatgtaaacgtactttgtaactgaaacaacatgcatactcattcagtccctggccctgaccccgtgatgctgatctaaacaggcaaaggatatttggactaataatgtctgatagcttgtcttgttggatctgtcttttctgggcaccccggagacctaggaaccattcctcagccatgatgccgaatactgttgaataagtatccatccggccccctggccagcagcaccccgacttttaagagagtgaagttccgagaggcagagcagggtctacactgactaacgcccaggttcgggcttagctttgcttggcttcaagattacttgactgaaaattttgaagcttttttagagagatttagtcatcatacgtcctgtgatgttgattcctttaaatactatcacacagggagaatatgaatatgcatagtagccattataataatttaaaaaattattctaaaacatctgctccaagcatttagcttgttctgtagaatcggccatacacaaggatttcgaagctaatgaaattcctggtgaggagacggtggccacattgcaaggctcttgggtgccatggctcttcagagagcatttgcccaaatgcaccaggcgctctttgctaggcagtctgcctctagcttttggccacagttttgtttaggaaatgtgatctccctgccctctgactggggatgcctggtgcctgtagggctggcacagtttccagcactcgcaaagtcagtgtctgaggccgaacaggcacagggctgaggtctctctctgtctctctctctctcatgcctagcaggcagccctggattgtaaacaaggggattatatatgaaggtccttgggtttgtggacatggcaggcagcatgtgacatatagcaaggagaatttgtcacagactgtctataggcatttgccttgtttacaaaagggggaaaaaagctattaattccacaaaccctacagagtgggaaaccaacaccttgctgggagactcaaacagacttttgtctccatcttggaacacgggagggtgttctccaagcatgaggcgggttcacatccacagttaaactggttataggtgagccaggtatggtggtgcccacctttaatcccagtacttgggagacagggacaggggacagggcaacctcagttgcatgtgagccagcctggtctatatggtgagttccagggcagccagggttgggtagtgagaccctgtcacaaaacaacaaaaaaaatattcattacaggcgtgcttttggaaaggagattcaatgctcgcttctctgcatcgataggcatgaattggtgttcaggagtggataacgggataatccttgtttgcaaggcagaagaaaaaaagacactgattttaaaaatgagagaagggtatagatatttggaagccaattatttttctcaaaataggttttaagtttttttttgtttggttggtttgttttttttgggtttgggttttgttttgtttttggttggttcgttttggttggttggttggtttggtttgtttgtttgtttgtttgtttgttttttgagatagggtttttctttgtagcccttgccatcctggaactcactctgtagaccacgctggcctccaactcaaaggttccccctacctctgcctcctgaatgctggctgggattaaaggctagtgtcaccaccaaatagctaaattgtagttctgagttcttcaaagacagactatgaatgctccaaattagtcattcccacaaagccacttccgagcccaatgatgaatgagacgctggccaagtgttttcagccaaagaaatagctactacactttgtagtgtaattagcaccaacttgggagaaagccgttggttagtggtgggagagggacagcagcaggcttgtagcagtaaggactacagcgtctcctatctgaaacctctttatcagtgtgtccccaatcactcaagatggccttaggaaaaaaagccggaccgtgcacctgctggactgtcccacccaaatctaagaacagtgttggtttccctggaatttggtggcttctgaagagcagttccggcgcttcgcgagtgggcagggaaggaggaagtagttgggggcaagcccggcagaaactctgccctcagggatatctctggatttgcaggctgcgggagagcctcactactcgacgtgatcacaggcagaggccacggtggcaagatgaaatcaggacaaatttggataaatgggcaacccagtacgcctcagctggtgaggaagtgcgttgcgcatgtgcggcagcatgaccaactgctgcccaacctgaccgtcagagagaccctggctttcattgcccagatgcgcctgcccaggaccttctcccaggcccagcgtgacaaacgggtaaccagttggctggttggtgtccctggtgtctgagaattccttggtttgccagaagacccagtctagctgggtagttaaaccaacccaccctacaagccaatgcgcttagccccaggggttcccttccccgcccgcgccccccgcccccaccttgtcaagtgggtgataagtgtgtgtgtttgtttgtgtaaggttttcctggtgcttcgtgtgagtggggagccaattatctggtctgattcccagtccacaatgtgtgctcttcagggcgaatctgctcagaacctggggacacggggggggggggcagggggggcggagggagcagagtgggggtcgccaaacaatgctgctggaaaatatactgcagaagccttcctttgcattaagtgaaagagtttgtgcagcccctggatgcccttaacgctccgcctgtcctcaggtggaagacgtaatcgccgagctgcggctgcggcagtgcgccaacaccagagtgggcaacacgtatgtacgtggggtgtccgggggtgagcgccgacgagtgagcattggggtgcagctcctgtggaacccaggtgaggcctgggaacctgaggggtgaaaacctgagcctacaacctgtccggcagcggcagcgtggtcattggactccctgtgcaatatccccaggaatcctcattctggatgaacccacttctggcctcgacagcttcacagcccacaatctggtgacaaccttgtcccgcctggccaagggcaacaggctggtgctcatctccctccaccagcctcgctctgacatcttcaggctatttgacctggtccttctgatgacatctggcacccctatctacctgggggcggcgcagcaaatggtgcagtacttcacatccattggccacccttgtcctcgctatagcaaccctgcggacttctacggtgagtggtaaaggcaaggacctggaacctggtgcacagacatttgctgacgccccctccaaacaaaagaaaacaaaaacaagcacaaaatccttactggaaagatctaggggggtccctgttatgcatgcccagatgagagatcgagctaggaccaactggtagcatgcaaaacgggaaactggtcagtttgccagggtcgaatgcaaggcactagtactgcagtcttctggacaggacaggaaggggtagaagactgcagatgggtgagcaggtacgtaatccaggagatcttggatccatgtgtggtctttatgaaggctgtaagagtgtgtgtgtgtgtgtgtgtgtgtgtgtgtgtgtgtgtgtgcgcgtgtgtgtgtgcctttgtgctcctcagaggcaggtagcataggtagagggcccaggacagggccaatgagtctcttaatatagattgctggataggtaggtcactgccttagctttttttggggggggggtggtgtcccaggtactcactctttcatgaagaacaccgtgaaccacttcattcatggggaacagtggtcttttcaggacacctgcatatgaaacacccatcaagagtgctgaagagtagaccagatgctgaacaagtggccagtgtactggaacctaggaaagcagaagcaatagccggtcctctaggtgaccaggaaccccagaagcttcctaggatagccaagtgctaacctccatggtctctatcaagccaaggtcaggtctgtttttgtagatgagctgaggaacctcatccctgccttactgtgttctagagcaactgtgggaacaggcccagggctcccgttggtgagcctggctctcagccttgactctggtccattccacccacactgtcaccccagcatccttggctgtcccaggaggaaaagctcctggctcctttccctgccctttgaactcatgccctcagtgaactcccatacaagccacctttcatgctcaggttgacatcctgacttccatgtgtcacactttggtcagtgtcctcagataaggggtcagaggacattcgccaatctggctacaaggggaagtatgaatgagcctgagagggctgccccaaaccaagtaaccatggcagaaacaaagacttcttttctgtcttcctttggagggagtaggggtagagtccttgtctaccagacccaaggcaggtggctgtcactaatatggggtgcaggagctgcttgtgtgggacacagggcacccagcaaatgtaacatttgagctacagcctgcacagggggagcctatggggtccatagcccctccctccctccctccctccctcccttcctccctccctccctccctcgaacctcttctcttgtattgtgcaatgcatacagatgagggaaagcgatggagaggacagccgagccatgcacggtcctggagtctccaggaggtagcactgcccgggctgcaactgctgggcctggcgctttctgtcactgagggggcgttggagggagggcagagcccattctcagctgcatgatgggactggcacatgcagggtgtggcatcttctcagattcccccagtaacctggtctccagttaggtgggctgccctagcctctcctggggcaaagcttagcataggcagtgagcactggatgtggctggtgcccagcaccctggccacttgaaattagagccagcatctacctgtaatgacatatctggctctgaaggtacctgcccactgtagaaatctctgtagtgatgggatgggagtggggtgggatgggtggggtgtggtggggcccctgctgttgcctactttctgatctgtggccctctcaaggcatctgcatatgtggtcagatcagccagagccaaggaccaggtctctgcctttctgctctgaccattgcatcacagtcccttctcggagggtgggaccaggttgcctatggccttgtatcttctgcttacagtggacttgaccagcatcgacagacgcagcaaagaacgggaggtggccaccgtggagaaggcacagtctcttgcagccctgttcctagaaaaagtacaaggctttgatgactttctgtggaaagctgaggcaaaggaactcaacacaagcacccacacagtcaggtacgggaagcccgggcaccgatgggaagctccggtggtgcccccgcccccagcctgatcacataattcacatactgctcccaacagcctgaccctcacacaggacactgactgtgggactgctgttgagctgcccgggatgatagagcagttttccaccctgatccggtaaatctccctccctccttccctccctctcttcctcccttcctccttccctccctcctcctcttcctcttcttcctcctccttccttcttcttcttcctcctccttcctccttcctcctcctcctcctcctcctccttcttcctcctcctcctcctcctcctcctcctcctcctcctcctcctcctccttctcctcctctctctctctctctctctctctctctctctctctctctctcatccctgcctcctatgcctctggatatcaaagcaaagcagtgaaattgtttaaaagctagcacccctaggaccagccgagccctcctgcgtccccctgatgctcttattctgtaaacaagaataaaactgcatcagtggcaagtatcatggaaagagtcacatcagacactcagacccagaaagggcagatggtgattgaaggctccatgcgcctgctgcactcaggcttcctggggggatgcacacatgcagaggcctgggaccagctatttacctaccctaagtgtcatgcccctgcctcctctctgattggagcactctggcttggtcatactttatgtagcctggtctgtttggatggccaccttacatggaggctttctttcagtcgtcagatttccaatgacttccgggacctgcccacgctgctcattcatgggtcggaagcctgcctgatgtccctcatcattggcttcctttactacggccatggggccaagcagctctccttcatggacacagcagccctcctcttcatgataggggcgctcattcctttcaatgtcatcctggatgtcgtctccaaatgtgagtgtcacctgccctcctcaccagactgcggggcagtgggacagcctcgctgtgctgcgctgccctgaggattccgtgcctctgagctctgtgcttcccccagcaccttgagacaatagctttatggaaccatttaatcgtgatggtataatgagtacagcaatcgtttgaaaagtttgcgcacgaatatcaccatacagattatggggtctttgagtttctcgtccacgcagggtttgtgcatgtcagcaactagctgcagtatctggggtacagtggtgtccctgtgcctgtggtttgcacagcatgtgaacaaattcagaaaatagagcactttctcccccagtgccaagggttgaacccatagctttgcgacgagtgagcaagtatcctgccaccaagtaagactcccagcttcatgtccctgctttcaatgacattacaggagatgcagtgcagcatcagtaacactgtaggcgaccatcacacattcatttccttctcctcccccatctttaggtcactcggagaggtcaatgctgtactatgagctggaagacgggctgtacactgctggtccttatttctttgccaaggtcagggctgggagcaagggctgaagggcactgcacacatcgcaggaaagagttttacggaactgctcagccgtgcagtctctagaagaggttcagagacttgctagccattaaactgtccccagagaggccagggctgtgaggcagaaatgatactcttgtgggcagccagaactaagagaggaagaagcaggggataccaaggagtgcttgtgtccctgagcagcctggcaagtgttaccagaacgaggctcaggaggttatgagactcttataaagccacacagccaccaggtctgggcgggcagggtggccatcaggctgggtggtagcagagcgtataccagccgccttcagggagcacagctcaggagcacgccctgcaatggcagcttggtgagaggtcagggtcagaggtcgtccctggcaccccctcatcgagaagaaccattgacatcctaggtgttatcactctttaaaacgtcttcagataacagcaaatgccagtgttggctccataacctagtgaagctgtgctttgcagatcctaggagaattgccggagcactgtgcctacgtcatcatctacgcgatgcccatctactggctgacaaacctgcggcccgtgcctgagctcttccttctacacttcctgctcgtgtggttggtggtcttctgctgcaggaccatggccctggctgcctctgccatgctgcccaccttccacatgtcctccttcttctgcaatgccctctacaactccttctaccttactgccggcttcatgataaacttggacaacctgtggataggtgaggcctgctgccccaccccccgccccccttagccaagcgtctgtaggcctctgtggctgcttaagtctgcaacagttaggtctctccaggcctttgccagatgcacagcaggctatgggacaggacgcacacccagtggtcacctgactcccccaccactttcgccagtgagccaggcctgagtgctccctcagtttcaacccgacccctccctcatcgttgaacccagagccaccataaccacctggtctctcggtggcctttgcaatgttcacctatgcagatcaagctttctcgggaacaagctcttgttcaaagcctctcagagctgctagttcccaatgccccccagtccccagctcttgtaaagcttccagtaccttctcactgtggagcccactaggctgttttctgtatacaccgtttcccggctttgataccctctcctcagccagcctttgctgacatctgacatttgcagctttctcctctcccaacagagtgctccctggggccagggtcctcctcttccagcagaatgctccccagggtcagagtcctcctctcccagcagagtgctccccggggtcagggtcctcctcttccagcagagtgctccccagggccagggtctctggtgtggtgtatcctgtgaagctgggcatatgcagcatataatgaaatgactgtccagagtaagtagcaatccaacatgtaggtcccttgttcttggccctctcagcataggtccccagtcacagctgttactccttgtctcttttgctccttggtccttagaggactcttccggccacagctagcatgagtcctctctccagaggagcagagaccgtgtaagtaacatagctcttgctgtcttcagtgcctgcatggatctccaagctgtcgttcctccggtggtgcttctcggggctgatgcagattcaatttaatggacacctttacaccacacaaatcggcaacttcaccttctccatcctcggagacacggtacgtagcgaaggctgggagttctaaattcaagtgctactgtggggacagcgtccttgggcgctcaccaaatgtctgtccgcagatgatcagtgccatggacctgaactcgcatccactctatgcgatctacctcattgtcatcggcatcagctacggcttcctgttcctgtactatctatccttgaagctcatcaaacagaagtcaattcaagactggtgatactcagccttgctctcactggcgggacccttttcccggggctggccaccccaggaggagccggactggggacaaggctcacacagatctctcaggcagcagccacctcttagtgctgcagtggcacaggtcagccacaggatggcagtagaataaagacagttgagaggtgtttctgctcccaggcccaggcttgtgatgggagagagagaaaccaggtacgttgctcatgcattttatatctttaaataaacaacccagtatggaatgggaaccaattatatatgaattgagtagctaggctatgcagaaatttctggaatcctgagaggatagtggtttatagcaaagtgtttaactttctcttctaccattctcacactgttaagccactcccaatacaaagggcgacctaaaacaaactagcaaaatgtttttcgcttatctctgcgtggattcatggactccaacccccaaagttggacagctgagagttaattgagcatttaatcaacgggtacggtataaaatatgatgtgtggctattgtcatttattcttggagcaacccactgatgtgagcagcatcctgttatttcggtgaggacacggtggcaaagacaaatccagttgtctcagcttacaaagtgttttgtgatggaatcaaaaagacccttgggcgttacagagcaaaacgccaggcccgagatgcctctagaaacagtttgcagagtctgtgtgagctcagccaggcctcagagttgcatccccctagccagggctcaggatcggctttcacagtggccagagatgcgctgcttgctgcacatccagattgcgtgcttcatgcctgtgtcaaggaaccccacccccacccctggccccccaccccgggcccccgacccaaagcatggagctgggaggggcttgctcccagaggaaaactcgtctggaatgaaaagaaccagcggggagagtgtttgaggccaggagaggtgttctccactggttctccaggtcctgattggtccatgacgtcagtgaatgctgatgaggtaggcaaaatcccaggcctgcccagatccgtggactcagcatcctgtgttcagaccccagtgtgagcagcagctccacagcatccactggcctcagggagtccacacagccctgttgccaccatccattgcatagatgtcacacaagagccacagggccctcatgcagagcagagtcaaaagcaccctccgattgcttctttcagtttggaagagctagctcttcagtgcccgctggctttatagggtagcttttaatttggatttatctgggggcatttctcagttaaatcctggctgggtcagaatatccaggaatgaaattggtttttccctagtgtgtcccatcaggcggcacacggttggctcccagttgctgcgtgctgttgactctgattgcctgacagaaggcacgtctgctggacccctccacgttcctcggttccctcttttcataattaataaagcttttggataccatgcctggagaccatggcttgttcattcttcctatgcaataaattatatactcgtggagtcccattttattttagcaagctgtaatccattgccattgttagtttgagtactcagattgtccctgatttagcccgtgaaatactcaagttggcttctacatctttttttttttttttttttttttttttttggctttttttcgagacagggtttctctgtgtatccttggctatgctggaactcactctgtagatcaggctggcctcaaactcagaaatccgcctgcctctgcctcccaagtgctgggattaaaggcgtgcgccaccaccgcctggatgtatcttcttaatcatgttcctttcagtcactgggaactctaacaaaacaaagtatttgaggatcagggatcatcttgaattttccaagctcagccctggggttggatgcttctctgtagaaacctgactttttagtggggaaagatagataggagcccagaagtgaatgagtctgctcggctgctgtgcatcgctacttccggactctcagtgggcagtgagtgaacacgtgtgcaaatgtgcatgtgtgtactcagtcttaactgcgtatgtgttcgtgttcatactctagttcatccagcactcgctttaacagcttccccagtctgtgcatgggagacacctggtttctgtgtccatccctcttctgatgagtcctgtttgtactctccctttggttcattccccatgcatgactctatctgcagagcctccagtctgttctgcagcccctccccaggtcccagctctgttttggtaacccactgtctttaggcctggatggagaagtgtagaagaagcagaaagcagtcatctgactttgtaagcttgtcactcagtatgctgtggtacccagaactcagagcaccaaagatgctgaaactcaggcttgcccacagagcaggagtcctccatcctgtctgagtgcatcatagctggtgttgatgcatcctaggctctaactccaatgttctccagggcacacaaggcccgggaagagaaaggccggggtgctaggaacatccagtactatccagtgccccttatcttcattgcaaaggggcagatttttcttgtgggttgtaaattttttctgctaaggatattttaggctttgatagccatatagcctgccagtaggctgtgctgatgtgaactgttgcaaccacagtagaatgtggaagatgtgggtgtgtttcagtaaaacagcttatagaagcacatagctcctagacttggcctgaggctgcagcttgcagactcttaatccaaagaggaagttataaaatgtacactgtaaactttccaaattcaagttacactattgatggggaactaacaattaaactgaaaataatcatctatgtttttgtaattttttaaaaccgctcttgctcttaaagatacttaaaataatctttccctgggttgacctgtctacaggggtagatatcctgcttttttttttttttttttaatgtagattaaactacatacagagaacatactgaaagtatgtcaaatccaagggtccttccaacactcaaattacttagcagaaaatcgtggcctggcacaggggagcagcttccttagggcacaccagccatgaggcaccgggaggagccggctgcaaaggaagcaagcccttgggtattttgctgcagatataagttatttggacaacagttcagtgtgcgtgcctgaaaatgtccttatgtcggctcccatcttacctccgatgtcacttgtgtttgataaactggtcatctaggacggttcctgtgaacagctagggtaaagagcttggtggcagaagaggtaattaaatcaaaagcctgaggctcaagccccaacacccaaacctaaaacaaatattgccagccatggtccagagcaacgttcagtgtccgtgttagggagggcaggctggtacagagagtggtacagcagtgtgtggggcttccagctcggaatgaaagagaagcgttcaggaagtgggttaggctttctcagcacttgcctgctgtccactggctaggtgacctgcttgtttattgtatatgacagccttgtctgtttgtagagttgaagtgttgtttctccaaactgaaaaacagctctgctgttccttgctagaaaagggaagccttattttctcttcttttcttctgttaacttcattactgcagcacagaatctctaatgtgctaggtctgacttcagaacacagttgaaaggtcgccaacagtgacaagtatctgaggtcatcaacttacagatttcacatcatgatcagctggcctcactgacaaagctttttgttttggaggactccttgggcctcagatccaccctcccaactgagctacattttggggaccaaagaatagcacatggaggggaactgtccagtgtgcacaaaccaggcatttcgtaaacagagcttgcaaggaagcacggcctgaaatccatggggctcaccccatgaggcccactgtgaacccaccaggtaggtctgcagaacattagaagaaccccggggctttggaaagaataaacaggccaagaatggtctccagtggctgcccgggcagggtcagtgaagatgctacagatggatttcagctccagcgactgtgcaaagcagcttgcaagagcaggaagtctggagtctgtcttacctggggctgctgtttctaatccgtatgcaaaagagaactggctgctttcactctgctaatgcagccacgttctctatttgtactcaggctgtataatgtgggctttgtaaagtctgctggcctgaaagcaggatacatttctaatggaaacactcccacgcatgattgtacaacagcaaagcgataaattaccgtgattttggacctcctgtggttatcagttccaccacacttgaagaaatgttgcttttgcttagaaattctacaaatatttttttcagagaggcaaatattaaatgaaaattgtgctgaaagccatgagggaggtgtgcagaatgcatgcactgtggactgcaggcgtgattataccagaaagtgatttgcaacataaagcttgtctataatttgctgcgactcataaatttgattataccaagcactggctattggattaaatagaagaaaaaaacgtttttcagtgtaagatgtccagaaactggtaacactgtatcagtgtgaagggtgttttgttgttttagacttttaattggactgccttagttttgtattctcatggttacttttttctttcttttttttttttttttttgagacagggtctgtatggtcatggttggccttgaattcaacacctacctgcctctgtttctcaaatgctgggattaaaggcatctacaactatgcccagtgggaaagactttgaaaaacacatttttattttaccttcgtttttgcctgcatttaaatgcatatatgtgcgcttaacacgcatgtgcatgcggtgtccaaggagaccataactggacactctggaagtcgagttacacacacagaatgttgtaagcagtcatatgggtgctgggtgggaactgaacccaggtcctttgcaagagcaacaagttcttttaaccactgagccatctctccagctcaagaaaaagactttttaggaagccctagcttatatctgacttattgctgcaaacctacgcaaactgacttaggttttcttatcctgataatcaggcaagaggggtgcctggtatggtaatcagtgcttaggagccatggaactcaatatacctgattcaatttgatgtgatgctgcgggtctgtgggactatgggaccaagagccagagttcacaatctgttcagaaggtaatgagagatgcatgcagccatgggagccttggacaggtaatactgatggccgagtgcttctgaattctgtgaccatctctgcagtgtgtaaaagatgctcctccccttggagtgtcaacacatctgaactcaattgtttctgcctgagacaagagttctagaactaaatatgtaaatcaggttggctttgaactcagagatcttcttcctgcctcagcctctggtgctgggactgaatgtgtgtgccaccacacctagatctacttctcaattcctggcaactttgctcctcagagacccagtttagcacagcaaacagctaactcactcactggctcttcacatcaagccggacatctccacacttctactaaaaattcaagactacgggtctttgagatggcttcaagccatcatataaatatttgataggatctttaaaattggcagttcacaagtactaaaatatactttattcagagaaattctcatttaaatgatattggcctttggtccatgaacgtacacctgcacgctcacgaggttggaaagatggctactgttagaatgaaggactttgcttgcttactttaagagtaattcccaacaaaagcctttctaacatctgctggtcacttcgccatcttaaatctgcttcaaagtcttacatgtaggctctaacaagcattagaataatgctggactactgtctattctcaaatttacaaaccagcatttagtctattctcttatgaatcacagtagcttgtacaaacaaaaccctgaaaccaaaaagggggcgctccagccactacatttcagcaaggacccttggcgctctgagaccttaaagaaaatgtcatcaatttatgtttagaaaaaaggaaataaacaacccccgcaaaaggcccagcgactaaatctatattcttatggcaatacagtggtgaatggtgtattttatatataaaaaaatacataaacacttacattttcattggtttattttcctctcaagtacattttagaaataacatttagacataggcatgtgcgcgcgcatatacacacatagacacacacacacagacacacacacagacacacacacagacacacacacacatagacacacacacagccgcgctgcttctctcatgaagggctttcccttgcttcctttagttgctttatataaaatgcaaagctttcctgttaaggagagagagagagaaatgacagttacgagcaagcagaatgcagactttaaagcagtgagcacggggtccctgccgcttggccgcagccgagtacccaagctttcagcctgggcagtcttctgtgtttgcaaaatgccaagttcaaaagcctcaagctctgcattagagcaccagggctaagtcaggccttatgtagaaaatgcctgagaaagtttgataaagccacagctgaaggtctgtaacacaccttgtgtccaccccaggccaccccaccccagcccacggtcactctcccacggatcctcagacacctacttcttggaaattattcaacctgttttctcttcactctcctagtcatagagtatactcaggcacacataaacccatggggcatctctctcttaacaatactcacagggggctcggggaaggggactggttcgccgacatccttgagcaaagctgcatagcgcttgagaaacaggtcatctagcttcaagttcttggctgtcaaatactcatacagtgctttagccgaggccacatctttgtctaaggctgaaggagaaggagtcagaggagagagatgactcgcaggtgaagagaccctcttctttcccttgcaccctttgctgcccaggcgctccaggatctgagacaaggaactgcaagctcccgtagggggccactcagaacccgcagcctgcctccaccgcgctcactgtgagggtaagggaaagggcgggcaggcacagggagcctgaagaacaccattcatggcactggtgtatctagcggagaaagcaccgtgtaaatgaacgatcacattctcaactgtagagcatgaggctgtgaggagcagggcttagccctgatgctctctcaaggggaggagtggggacctgcgaaagctcagccaggcagcttccctgtgaaagggccacccctgctgcaagggccctcattctgcaggcctgggtctgcatctttatctacctctgccctaatcgtccactttttaaggcatttgatactgtttgctactcacataaggagatctatgatttctgctgtttgtaaatattgcaagactccatgtgggaacgaagaatcgatttactagttctaagtctgctgctccactatacccgagtgtaacgagcaggtctgagggtgggacatggacacatcagcacttcatctgctctgtgacaaaccttccactgcctccttcgcatggactgtctgactgtggacatcgatggctgtgcacttcagctgaggcaggagataagccttggcctcagtggaacgcagaggcaggaggaggccgcacttctgccctgcagggcgggccttgggagggaggagcggcttcctcacagagtctgcccggcccggcacactctggaggtgttcaggaacgtttttcaatgttaaagctctaggaacaatttcatgcttttctatagtttaagaacatattctagagctaagtaaatgagtaattatctgaaattgaggaatattcctttgagctgatctcacagttgactatacttagaaatatttacatcacttgaataacgtagcacgattaaatttattaccatagcttttcatgctgcaagaatatactttatcgttatcacgtaactcaggaatcagttctaacaaagtcttcagaactggtgcctagaaggtaaacagaggtaatactcaaaagcagtctgcagaggtagcagacacacacagtgtcacaaactactacagtcagagcatagccaccgcgtgacttaatggatcatttgacttctgtttatctcagcatttgatattaatttgataaatcatagccagataaaaatcaacatttttaataattaaaggcatctcatttacatatctgagtgctttcaaaaataaatataaaacaaaatcaaaggactgaacacttcttttatcaactgttaacttatcaaaaagttgtaagataaactttacagaaataagttgtattttaatgtaaaaaagaattcaggataaactatgaagataaaggctctgcagcgccccctatctggtacacaagtgcattagggtttcccaggagggtccttcactgcctggaggacttcctgcagagaagactcagtaagtctgcagtgaccttcacgtagttcttacccaagtccagtctagctcagtacccactgcactgccaatgcactgtgctcagcacttaaaggtcctaaccccacagcacagagtcagatccgcccgaggctctcctgaactccttcctgcccatctcctgaggacataagactgagggtcatgtcaggatttggtgcaccctaagaaggttctaccatcaaaccatacaatagcatccaaaacataaaatagggcctgttgtcttttacatacttacacatacacacacacacacacacacacacacacacacacacacacacacacttttaaaaagtagccaaatatagacaggccatgtctccctttctgtggagttgtcagtgaggttctgagccgcaatgggtcaggaccatctgactggacggctctaacaaagctccgtacctttttcggtttctgagaagtcctcagacagaacaccgacagaagcgagctctgctcggcaatggcaccgcatctctgaaaggcagagcagtgtcagtggcggtgttaagtgagccagccagggcaaatctcccaattaaggaagttcccggtgacacagcaacgcaccatgcccaccaggagcccagcatctggccaggtttacttaggcacgaaagggggcgatgggcgagctgtgtcaaccctggtgagtgtggctctctgcatcagggatgaagtttgtttaaagagaaaagggaaaaattaaactaatgcttcaacaagcacagaacaaggctcaggactgcaaagaaagagggaggaaggaccaccactcctcgccaattactctgccaagcattcacaagtgagctagggatcataaggttaattatacatttaataaggtgtcagggagataactgctcgtttctttataaaaattaaaatgtacaaagcaagttctctttaaagtataattacctacacttatgcatacaaaaggactgatttcaatctctgcagttataaaaggctttcactgcaacagacagccagtgctcgagaaagagacaaaagttatactaacaaagtttctatgacagaccagataaatcaagtgtctatccagtcctacatgctttagtcaaatgaaatctggcaagacaatattttagtttacatcatcgcagatgtcatcctccacgtttctgacagcacagtgcttgctcaaagctttacaacactgtcaatgctaagatgaacagcacaaaaaaacggctgggacacacacaacattggcgtcataaacacccgggagccaagcgctcctcactagagaagctcagctcttcattgtgtggcaggcagagatgcggctgctgtcaggtctgcactcagccaccaccaagagctccaaggtgtggtacggctgctggagacagctctgagcatggctgctggcaattctacttctctggaaggcatgaaaatggtggctcacaatgagctggtagagccagcaaggtcctcctctagagaacaattagaagagtgtgttcaaggtgaaagaacaccttcaccagtgtgactaggtatctgcttacagcccagggtaacctgttagcaccaaacccagggagataaagcataaaaggctgcctgagagaacaatgaagattcccagaaaactatctgtccaatttcctacaaaggaagtaaacaaaccaaaccaaacagaagcaatctgttaaagcagaggaaaatgttcagacacgcctctgtaagtggcgtggcttgtgctgtcaagctagacacacttggatcaaacctggagctcaagccagtggctagagcgtgccgtccacatcttcactgactcctcccagctggtaggagcggaagtgaacataacagtatttacaatcagaaattggtcccaggcctcaatttgacacagggagtctacacaaacacagccgctggcgggatcaccgtgactgtttgactgccacctgctgggaaggggcccccggcggtgcctgtttgtgtacattgccagcggcggcggatcacccaccgctccagcgcgcttggcacagctttctatttagagctgttaaaatggcatgaaagcagtcgtctcctctcctccagattgctgatttaactgagtgcgggccacagagagagccacatttgtcatttaatgtgtctgtgacacattagtgaatagaaagcaaattcaactcttaataaaccttgaataaggcactgagaatgtttgagtattcaagtgagaagctgtacgtgaaaagcaaacatttcctacttcttgtttgcaaactgtgttgccatggtgatgcacagtatttagagcattaaagaaattaggaaaccaaaggatttgatgctttgcattagccatctttgcagaaccacttgtctcagtttcctactcgacgcctgtcttaattactaggatttccagttcgacctgacatctttaaaactggcaatagacagcccacagggtcgtcatgcaatctggattgacactgaacttcagggttctagcaggagtttcatccatcccgtgcactccggtctagtcctctcccagttcaattctcatgagctccgagtcccgatgaggagtcattacctctaagagagctctggcctcatccaccttgcctgaatccacaagctgcaggaatagatcagtgacgggcttgtaaagtgcaaactgattcgccattctctcagacatgatgcttactgcaagaaacacaggtaaggaaaagcgttcactaaacgggaatggctcacgggccaaagaagtctgggccaatttcacccaagacaaagatgagcttctacgctcttttaacagcaaggcaactcacacttctctagcgctggttccatctgctcttcgatcacttttctgaatagatacgacaagccaaagtactgaggttctatggcttggttctcggaagcaagcaggtgctcaatgttttctatggcagcatcaagtttattactgtaaatgaaaacaaaatcacaataaagtatttacttgtataaaattgcagtccgttttaactcatgtggatactcatgcaaatacttcagaaaaaagggactatatttataagcagattaataactaataattttcaaagcctatcatgtaacataacctagttatatagatataaaatgctataattttggctttatagatcacagagggcattagaatatgaagcaaagacaacatatgacatttggagatgaaaaaaaataaaaagatcatacaccaaaagttgtactttcatggctaacagagacttcttttcatcgggcaccatatatttggaaaatactcaatactagaatcctcagaaaagggcacttttttggggggggggggggagaaaagaaattctgtggccttcctgaacaaagtaggaaacaatatccttctcactgtcttgtgatgagacaatctatgactgatctgtgcagttataacgtgctgacataaatcaacttcatgttgaaattagtatattaagagtaagaattctgggctggagagatggttcagcggttaagagcactgactgctcttctgaaggtcctgagttcaaatcccagcaaccacatggtggctcacaaccacctgtaatgagatctgacgccctcttctggtgcatctgaagacagctacagtgtacttatgtataatagtaaataaatcttaaaaaaaaaagaattctaattaaaaacaagcgtcttatggacttaggtagaagagttattaagtgaataaaaacattttccacagcataaaaaataatatatcataaatttaaaatattcatctagctcttacatagatcaaattttaaaaatcacattttcttattaaaaatgaagtttgaaactctatttagggaaatagtctaagtctataatggctgtcttgcctgtatgtttgtacagacatcaggggaggtgtcagagcctacatggctgggagctgccatgtgggtgctgggaactgaacctgggtcttctggaagacattgattgactcataaagaaatgagccgttgctctagccccaaggaaacagtttaaagttaaaaccaaaacattttctactaaaagaaacaggaataaacaaacaaaagtacctcttgcaaaatagcattttaatcctgtatctatacatccaagcttaactactaaagaacatttccctcaaaagtgctagcaagaccaattctagactgttcttagactgtttttctgagaaggtttcattacacagctcagactgtcatcaaactcatgatccccctgcagcagtcttctgagctctggggttatgagcctaaaccatcttgttcactctcacaacaccttagtatgtgtaaggcatcagggacatcaaagaaatctggctgcctgcctgtccctctccaagggcgatggatcgagtctgaacacttctcttcttgtggatgtgtactgacggggagagatgcttggaagagaactcagggtcttatgtttgctggccaggttcttatcacaaagctacacatcacaaccatggagacgtgtgtgttcttaacaggcttcctaagtcctgaatcagtactgtagcagtgtgttaagatgctaaaga

SEQ ID NO: 20 - DNA, 41203 bp, Mus musculus
tctttagcatcttaacacactgctacagtactgattcaggacttaggaagcctgttaagaacacacacgtctccatggttgtgatgtgtagctttgtgataagaacctggccagcaaacataagaccctgagttctcttccaagcatctctccccgtcagtacacatccacaagaagagaagtgttcagactcgatccatcgcccttggagagggacaggcaggcagccagatttctttgatgtccctgatgccttacacatactaaggtgttgtgagagtgaacaagatggtttaggctcataaccccagagctcagaagactgctgcagggggatcatgagtttgatgacagtctgagctgtgtaatgaaaccttctcagaaaaacagtctaagaacagtctagaattggtcttgctagcacttttgagggaaatgttctttagtagttaagcttggatgtatagatacaggattaaaatgctattttgcaagaggtacttttgtttgtttattcctgtttcttttagtagaaaatgttttggttttaactttaaactgtttccttggggctagagcaacggctcatttctttatgagtcaatcaatgtcttccagaagacccaggttcagttcccagcacccacatggcagctcccagccatgtaggctctgacacctcccctgatgtctgtacaaacatacaggcaagacagccattatagacttagactatttccctaaatagagtttcaaacttcatttttaataagaaaatgtgatttttaaaatttgatctatgtaagagctagatgaatattttaaatttatgatatattattttttatgctgtggaaaatgtttttattcacttaataactcttctacctaagtccataagacgcttgtttttaattagaattcttttttttttaagatttatttactattatacataagtacactgtagctgtcttcagatgcaccagaagagggcgtcagatctcattacaggtggttgtgagccaccatgtggttgctgggatttgaactcaggaccttcagaagagcagtcagtgctcttaaccgctgaaccatctctccagcccagaattcttactcttaatatactaatttcaacatgaagttgatttatgtcagcacgttataactgcacagatcagtcatagattgtctcatcacaagacagtgagaaggatattgtttcctactttgttcaggaaggccacagaatttcttttctccccccccccccccaaaaaagtgcccttttctgaggattctagtattgagtattttccaaatatatggtgcccgatgaaaagaagtctctgttagccatgaaagtacaacttttggtgtatgatctttttattttttttcatctccaaatgtcatatgttgtctttgcttcatattctaatgccctctgtgatctataaagccaaaattatagcattttatatctatataactaggttatgttacatgataggctttgaaaattattagttattaatctgcttataaatatagtcccttttttctgaagtatttgcatgagtatccacatgagttaaaacggactgcaattttatacaagtaaatactttattgtgattttgttttcatttacagtaataaacttgatgctgccatagaaaacattgagcacctgcttgcttccgagaaccaagccatagaacctcagtactttggcttgtcgtatctattcagaaaagtgatcgaagagcagatggaaccagcgctagagaagtgtgagttgccttgctgttaaaagagcgtagaagctcatctttgtcttgggtgaaattggcccagacttctttggcccgtgagccattcccgtttagtgaacgcttttccttacctgtgtttcttgcagtaagcatcatgtctgagagaatggcgaatcagtttgcactttacaagcccgtcactgatctattcctgcagcttgtggattcaggcaaggtggatgaggccagagctctcttagaggtaatgactcctcatcgggactcggagctcatgagaattgaactgggagaggactagaccggagtgcacgggatggatgaaactcctgctagaaccctgaagttcagtgtcaatccagattgcatgacgaccctgtgggctgtctattgccagttttaaagatgtcaggtcgaactggaaatcctagtaattaagacaggcgtcgagtaggaaactgagacaagtggttctgcaaagatggctaatgcaaagcatcaaatcctttggtttcctaatttctttaatgctctaaatactgtgcatcaccatggcaacacagtttgcaaacaagaagtaggaaatgtttgcttttcacgtacagcttctcacttgaatactcaaacattctcagtgccttattcaaggtttattaagagttgaatttgctttctattcactaatgtgtcacagacacattaaatgacaaatgtggctctctctgtggcccgcactcagttaaatcagcaatctggaggagaggagacgactgctttcatgccattttaacagctctaaatagaaagctgtgccaagcgcgctggagcggtgggtgatccgccgccgctggcaatgtacacaaacaggcaccgccgggggccccttcccagcaggtggcagtcaaacagtcacggtgatcccgccagcggctgtgtttgtgtagactccctgtgtcaaattgaggcctgggaccaatttctgattgtaaatactgttatgttcacttccgctcctaccagctgggaggagtcagtgaagatgtggacggcacgctctagccactggcttgagctccaggtttgatccaagtgtgtctagcttgacagcacaagccacgccacttacagaggcgtgtctgaacattttcctctgctttaacagattgcttctgtttggtttggtttgtttacttcctttgtaggaaattggacagatagttttctgggaatcttcattgttctctcaggcagccttttatgctttatctccctgggtttggtgctaacaggttaccctgggctgtaagcagatacctagtcacactggtgaaggtgttctttcaccttgaacacactcttctaattgttctctagaggaggaccttgctggctctaccagctcattgtgagccaccattttcatgccttccagagaagtagaattgccagcagccatgctcagagctgtctccagcagccgtaccacaccttggagctcttggtggtggctgagtgcagacctgacagcagccgcatctctgcctgccacacaatgaagagctgagcttctctagtgaggagcgcttggctcccgggtgtttatgacgccaatgttgtgtgtgtcccagccgtttttttgtgctgttcatcttagcattgacagtgttgtaaagctttgagcaagcactgtgctgtcagaaacgtggaggatgacatctgcgatgatgtaaactaaaatattgtcttgccagatttcatttgactaaagcatgtaggactggatagacacttgatttatctggtctgtcatagaaactttgttagtataacttttgtctctttctcgagcactggctgtctgttgcagtgaaagccttttataactgcagagattgaaatcagtccttttgtatgcataagtgtaggtaattatactttaaagagaacttgctttgtacattttaatttttataaagaaacgagcagttatctccctgacaccttattaaatgtataattaaccttatgatccctagctcacttgtgaatgcttggcagagtaattggcgaggagtggtggtccttcctccctctttctttgcagtcctgagccttgttctgtgcttgttgaagcattagtttaatttttcccttttctctttaaacaaacttcatccctgatgcagagagccacactcaccagggttgacacagctcgcccatcgccccctttcgtgcctaagtaaacctggccagatgctgggctcctggtgggcatggtgcgttgctgtgtcaccgggaacttccttaattgggagatttgccctggctggctcacttaacaccgccactgacactgctctgcctttcagagatgcggtgccattgccgagcagagctcgcttctgtcggtgttctgtctgaggacttctcagaaaccgaaaaaggtacggagctttgttagagccgtccagtcagatggtcctgacccattgcggctcagaacctcactgacaactccacagaaagggagacatggcctgtctatatttggctactttttaaaagtgtgtgtgtgtgtgtgtgtgtgtgtgtgtgtgtgtgtgtgtgtgtatgtgtaagtatgtaaaagacaacaggccctattttatgttttggatgctattgtatggtttgatggtagaaccttcttagggtgcaccaaatcctgacatgaccctcagtcttatgtcctcaggagatgggcaggaaggagttcaggagagcctcgggcggatctgactctgtgctgtggggttaggacctttaagtgctgagcacagtgcattggcagtgcagtgggtactgagctagactggacttgggtaagaactacgtgaaggtcactgcagacttactgagtcttctctgcaggaagtcctccaggcagtgaaggaccctcctgggaaaccctaatgcacttgtgtaccagatagggggcgctgcagagcctttatcttcatagtttatcctgaattcttttttacattaaaatacaacttatttctgtaaagtttatcttacaactttttgataagttaacagttgataaaagaagtgttcagtcctttgattttgttttatatttatttttgaaagcactcagatatgtaaatgagatgcctttaattattaaaaatgttgatttttatctggctatgatttatcaaattaatatcaaatgctgagataaacagaagtcaaatgatccattaagtcacgcggtggctatgctctgactgtagtagtttgtgacactgtgtgtgtctgctacctctgcagactgcttttgagtattacctctgtttaccttctaggcaccagttctgaagactttgttagaactgattcctgagttacgtgataacgataaagtatattcttgcagcatgaaaagctatggtaataaatttaatcgtgctacgttattcaagtgatgtaaatatttctaagtatagtcaactgtgagatcagctcaaaggaatattcctcaatttcagataattactcatttacttagctctagaatatgttcttaaactatagaaaagcatgaaattgttcctagagctttaacattgaaaaacgttcctgaacacctccagagtgtgccgggccgggcagactctgtgaggaagccgctcctccctcccaaggcccgccctgcagggcagaagtgcggcctcctcctgcctctgcgttccactgaggccaaggcttatctcctgcctcagctgaagtgcacagccatcgatgtccacagtcagacagtccatgcgaaggaggcagtggaaggtttgtcacagagcagatgaagtgctgatgtgtccatgtcccaccctcagacctgctcgttacactcgggtatagtggagcagcagacttagaactagtaaatcgattcttcgttcccacatggagtcttgcaatatttacaaacagcagaaatcatagatctccttatgtgagtagcaaacagtatcaaatgccttaaaaagtggacgattagggcagaggtagataaagatgcagacccaggcctgcagaatgagggcccttgcagcaggggtggccctttcacagggaagctgcctggctgagctttcgcaggtccccactcctccccttgagagagcatcagggctaagccctgctcctcacagcctcatgctctacagttgagaatgtgatcgttcatttacacggtgctttctccgctagatacaccagtgccatgaatggtgttcttcaggctccctgtgcctgcccgccctttcccttaccctcacagtgagcgcggtggaggcaggctgcgggttctgagtggccccctacgggagcttgcagttccttgtctcagatcctggagcgcctgggcagcaaagggtgcaagggaaagaagagggtctcttcacctgcgagtcatctctctcctctgactccttctccttcagccttagacaaagatgtggcctcggctaaagcactgtatgagtatttgacagccaagaacttgaagctagatgacctgtttctcaagcgctatgcagctttgctcaaggatgtcggcgaaccagtccccttccccgagccccctgtgagtattgttaagagagagatgccccatgggtttatgtgtgcctgagtatactctatgactaggagagtgaagagaaaacaggttgaataatttccaagaagtaggtgtctgaggatccgtgggagagtgaccgtgggctggggtggggtggcctggggtggacacaaggtgtgttacagaccttcagctgtggctttatcaaactttctcaggcattttctacataaggcctgacttagccctggtgctctaatgcagagcttgaggcttttgaacttggcattttgcaaacacagaagactgcccaggctgaaagcttgggtactcggctgcggccaagcggcagggaccccgtgctcactgctttaaagtctgcattctgcttgctcgtaactgtcatttctctctctctctccttaacaggaaagctttgcattttatataaagcaactaaaggaagcaagggaaagcccttcatgagagaagcagcgcggctgtgtgtgtgtctatgtgtgtgtgtgtctgtgtgtgtgtctgtgtgtgtgtctgtgtgtgtgtgtctatgtgtgtatatgcgcgcgcacatgcctatgtctaaatgttatttctaaaatgtacttgagaggaaaataaaccaatgaaaatgtaagtgtttatgtatttttttatatataaaatacaccattcaccactgtattgccataagaatatagatttagtcgctgggccttttgcgggggttgtttatttccttttttctaaacataaattgatgacattttctttaaggtctcagagcgccaagggtccttgctgaaatgtagtggctggagcgccccctttttggtttcagggttttgtttgtacaagctactgtgattcataagagaatagactaaatgctggtttgtaaatttgagaatagacagtagtccagcattattctaatgcttgttagagcctacatgtaagactttgaagcagatttaagatggcgaagtgaccagcagatgttagaaaggcttttgttgggaattactcttaaagtaagcaagcaaagtccttcattctaacagtagccatctttccaacctcgtgagcgtgcaggtgtacgttcatggaccaaaggccaatatcatttaaatgagaatttctctgaataaagtatattttagtacttgtgaactgccaattttaaagatcctatcaaatatttatatgatggcttgaagccatctcaaagacccgtagtcttgaatttttagtagaagtgtggagatgtccggcttgatgtgaagagccagtgagtgagttagctgtttgctgtgctaaactgggtctctgaggagcaaagttgccaggaattgagaagtagatctaggtgtggtggcacacacattcagtcccagcaccagaggctgaggcaggaagaagatctctgagttcaaagccaacctgatttacatatttagttctagaactcttgtctcaggcagaaacaattgagttcagatgtgttgacactccaaggggaggagcatcttttacacactgcagagatggtcacagaattcagaagcactcggccatcagtattacctgtccaaggctcccatggctgcatgcatctctcattaccttctgaacagattgtgaactctggctcttggtcccatagtcccacagacccgcagcatcacatcaaattgaatcaggtatattgagttccatggctcctaagcactgattaccataccaggcacccctcttgcctgattatcaggataagaaaacctaagtcagtttgcgtaggtttgcagcaataagtcagatataagctagggcttcctaaaaagtctttttcttgagctggagagatggctcagtggttaaaagaacttgttgctcttgcaaaggacctgggttcagttcccacccagcacccatatgactgcttacaacattctgtgtgtgtaactcgacttccagagtgtccagttatggtctccttggacaccgcatgcacatgcgtgttaagcgcacatatatgcatttaaatgcaggcaaaaacgaaggtaaaataaaaatgtgtttttcaaagtctttcccactgggcatagttgtagatgcctttaatcccagcatttgagaaacagaggcaggtaggtgttgaattcaaggccaaccatgaccatacagaccctgtctcaaaaaaaaaaaaaaaaaagaaagaaaaaagtaaccatgagaatacaaaactaaggcagtccaattaaaagtctaaaacaacaaaacacccttcacactgatacagtgttaccagtttctggacatcttacactgaaaaacgtttttttcttctatttaatccaatagccagtgcttggtataatcaaatttatgagtcgcagcaaattatagacaagctttatgttgcaaatcactttctggtataatcacgcctgcagtccacagtgcatgcattctgcacacctccctcatggctttcagcacaattttcatttaatatttgcctctctgaaaaaaatatttgtagaatttctaagcaaaagcaacatttcttcaagtgtggtggaactgataaccacaggaggtccaaaatcacggtaatttatcgctttgctgttgtacaatcatgcgtgggagtgtttccattagaaatgtatcctgctttcaggccagcagactttacaaagcccacattatacagcctgagtacaaatagagaacgtggctgcattagcagagtgaaagcagccagttctcttttgcatacggattagaaacagcagccccaggtaagacagactccagacttcctgctcttgcaagctgctttgcacagtcgctggagctgaaatccatctgtagcatcttcactgaccctgcccgggcagccactggagaccattcttggcctgtttattctttccaaagccccggggttcttctaatgttctgcagacctacctggtgggttcacagtgggcctcatggggtgagccccatggatttcaggccgtgcttccttgcaagctctgtttacgaaatgcctggtttgtgcacactggacagttcccctccatgtgctattctttggtccccaaaatgtagctcagttgggagggtggatctgaggcccaaggagtcctccaaaacaaaaagctttgtcagtgaggccagctgatcatgatgtgaaatctgtaagttgatgacctcagatacttgtcactgttggcgacctttcaactgtgttctgaagtcagacctagcacattagagattctgtgctgcagtaatgaagttaacagaagaaaagaagagaaaataaggcttcccttttctagcaaggaacagcagagctgtttttcagtttggagaaacaacacttcaactctacaaacagacaaggctgtcatatacaataaacaagcaggtcacctagccagtggacagcaggcaagtgctgagaaagcctaacccacttcctgaacgcttctctttcattccgagctggaagccccacacactgctgtaccactctctgtaccagcctgccctccctaacacggacactgaacgttgctctggaccatggctggcaatatttgttttaggtttgggtgttggggcttgagcctcaggcttttgatttaattacctcttctgccaccaagctctttaccctagctgttcacaggaaccgtcctagatgaccagtttatcaaacacaagtgacatcggaggtaagatgggagccgacataaggacattttcaggcacgcacactgaactgttgtccaaataacttatatctgcagcaaaatacccaagggcttgcttcctttgcagccggctcctcccggtgcctcatggctggtgtgccctaaggaagctgctcccctgtgccaggccacgattttctgctaagtaatttgagtgttggaaggacccttggatttgacatactttcagtatgttctctgtatgtagtttaatctacattaaaaaaaaaaaaaaaaaagcaggatatctacccctgtagacaggtcaacccagggaaagattattttaagtatctttaagagcaagagcggttttaaaaaattacaaaaacatagatgattattttcagtttaattgttagttccccatcaatagtgtaacttgaatttggaaagtttacagtgtacattttataacttcctctttggattaagagtctgcaagctgcagcctcaggccaagtctaggagctatgtgcttctataagctgttttactgaaacacacccacatcttccacattctactgtggttgcaacagttcacatcagcacagcctactggcaggctatatggctatcaaagcctaaaatatccttagcagaaaaaatttacaacccacaagaaaaatctgcccctttgcaatgaagataaggggcactggatagtactggatgttcctagcaccccggcctttctcttcccgggccttgtgtgccctggagaacattggagttagagcctaggatgcatcaacaccagctatgatgcactcagacaggatggaggactcctgctctgtgggcaagcctgagtttcagcatctttggtgctctgagttctgggtaccacagcatactgagtgacaagcttacaaagtcagatgactgctttctgcttcttctacacttctccatccaggcctaaagacagtgggttaccaaaacagagctgggacctggggaggggctgcagaacagactggaggctctgcagatagagtcatgcatggggaatgaaccaaagggagagtacaaacaggactcatcagaagagggatggacacagaaaccaggtgtctcccatgcacagactggggaagctgttaaagcgagtgctggatgaactagagtatgaacacgaacacatacgcagttaagactgagtacacacatgcacatttgcacacgtgttcactcactgcccactgagagtccggaagtagcgatgcacagcagccgagcagactcattcacttctgggctcctatctatctttccccactaaaaagtcaggtttctacagagaagcatccaaccccagggctgagcttggaaaattcaagatgatccctgatcctcaaatactttgttttgttagagttcccagtgactgaaaggaacatgattaagaagatacatccaggcggtggtggcgcacgcctttaatcccagcacttgggaggcagaggcaggcggatttctgagtttgaggccagcctgatctacagagtgagttccagcatagccaaggatacacagagaaaccctgtctcgaaaaaaagccaaaaaaaaaaaaaaaaaaaaaaaaaaaaagatgtagaagccaacttgagtatttcacgggctaaatcagggacaatctgagtactcaaactaacaatggcaatggattacagcttgctaaaataaaatgggactccacgagtatataatttattgcataggaagaatgaacaagccatggtctccaggcatggtatccaaaagctttattaattatgaaaagagggaaccgaggaacgtggaggggtccagcagacgtgccttctgtcaggcaatcagagtcaacagcacgcagcaactgggagccaaccgtgtgccgcctgatgggacacactagggaaaaaccaatttcattcctggatattctgacccagccaggatttaactgagaaatgcccccagataaatccaaattaaaagctaccctataaagccagcgggcactgaagagctagctcttccaaactgaaagaagcaatcggagggtgcttttgactctgctctgcatgagggccctgtggctcttgtgtgacatctatgcaatggatggtggcaacagggctgtgtggactccctgaggccagtggatgctgtggagctgctgctcacactggggtctgaacacaggatgctgagtccacggatctgggcaggcctgggattttgcctacctcatcagcattcactgacgtcatggaccaatcaggacctggagaaccagtggagaacacctctcctggcctcaaacactctccccgctggttcttttcattccagacgagttttcctctgggagcaagcccctcccagctccatgctttgggtcgggggcccggggtggggggccaggggtgggggtggggttccttgacacaggcatgaagcacgcaatctggatgtgcagcaagcagcgcatctctggccactgtgaaagccgatcctgagccctggctagggggatgcaactctgaggcctggctgagctcacacagactctgcaaactgtttctagaggcatctcgggcctggcgttttgctctgtaacgcccaagggtctttttgattccatcacaaaacactttgtaagctgagacaactggatttgtctttgccaccgtgtcctcaccgaaataacaggatgctgctcacatcagtgggttgctccaagaataaatgacaatagccacacatcatattttataccgtacccgttgattaaatgctcaattaactctcagctgtccaactttgggggttggagtccatgaatccacgcagagataagcgaaaaacattttgctagtttgttttaggtcgccctttgtattgggagtggcttaacagtgtgagaatggtagaagagaaagttaaacactttgctataaaccactatcctctcaggattccagaaatttctgcatagcctagctactcaattcatatataattggttcccattccatactgggttgtttatttaaagatataaaatgcatgagcaacgtacctggtttctctctctcccatcacaagcctgggcctgggagcagaaacacctctcaactgtctttattctactgccatcctgtggctgacctgtgccactgcagcactaagaggtggctgctgcctgagagatctgtgtgagccttgtccccagtccggctcctcctggggtggccagccccgggaaaagggtcccgccagtgagagcaaggctgagtatcaccagtcttgaattgacttctgtttgatgagcttcaaggatagatagtacaggaacaggaagccgtagctgatgccgatgacaatgaggtagatcgcatagagtggatgcgagttcaggtccatggcactgatcatctgcggacagacatttggtgagcgcccaaggacgctgtccccacagtagcacttgaatttagaactcccagccttcgctacgtaccgtgtctccgaggatggagaaggtgaagttgccgatttgtgtggtgtaaaggtgtccattaaattgaatctgcatcagccccgagaagcaccaccggaggaacgacagcttggagatccatgcaggcactgaagacagcaagagctatgttacttacacggtctctgctcctctggagagaggactcatgctagctgtggccggaagagtcctctaaggaccaaggagcaaaagagacaaggagtaacagctgtgactggggacctatgctgagagggccaagaacaagggacctacatgttggattgctacttactctggacagtcatttcattatatgctgcatatgcccagcttcacaggatacaccacaccagagaccctggccctggggagcactctgctggaagaggaggaccctgaccccggggagcactctgctgggagaggaggactctgaccctggggagcattctgctggaagaggaggaccctggccccagggagcactctgttgggagaggagaaagctgcaaatgtcagatgtcagcaaaggctggctgaggagagggtatcaaagccgggaaacggtgtatacagaaaacagcctagtgggctccacagtgagaaggtactggaagctttacaagagctggggactggggggcattgggaactagcagctctgagaggctttgaacaagagcttgttcccgagaaagcttgatctgcataggtgaacattgcaaaggccaccgagagaccaggtggttatggtggctctgggttcaacgatgagggaggggtcgggttgaaactgagggagcactcaggcctggctcactggcgaaagtggtgggggagtcaggtgaccactgggtgtgcgtcctgtcccatagcctgctgtgcatctggcaaaggcctggagagacctaactgttgcagacttaagcagccacagaggcctacagacgcttggctaaggggggcggggggtggggcagcaggcctcacctatccacaggttgtccaagtttatcatgaagccggcagtaaggtagaaggagttgtagagggcattgcagaagaaggaggacatgtggaaggtgggcagcatggcagaggcagccagggccatggtcctgcagcagaagaccaccaaccacacgagcaggaagtgtagaaggaagagctcaggcacgggccgcaggtttgtcagccagtagatgggcatcgcgtagatgatgacgtaggcacagtgctccggcaattctcctaggatctgcaaagcacagcttcactaggttatggagccaacactggcatttgctgttatctgaagacgttttaaagagtgataacacctaggatgtcaatggttcttctcgatgagggggtgccagggacgacctctgaccctgacctctcaccaagctgccattgcagggcgtgctcctgagctgtgctccctgaaggcggctggtatacgctctgctaccacccagcctgatggccaccctgcccgcccagacctggtggctgtgtggctttataagagtctcataacctcctgagcctcgttctggtaacacttgccaggctgctcagggacacaagcactccttggtatcccctgcttcttcctctcttagttctggctgcccacaagagtatcatttctgcctcacagccctggcctctctggggacagtttaatggctagcaagtctctgaacctcttctagagactgcacggctgagcagttccgtaaaactctttcctgcgatgtgtgcagtgcccttcagcccttgctcccagccctgaccttggcaaagaaataaggaccagcagtgtacagcccgtcttccagctcatagtacagcattgacctctccgagtgacctaaagatgggggaggagaaggaaatgaatgtgtgatggtcgcctacagtgttactgatgctgcactgcatctcctgtaatgtcattgaaagcagggacatgaagctgggagtcttacttggtggcaggatacttgctcactcgtcgcaaagctatgggttcaacccttggcactgggggagaaagtgctctattttctgaatttgttcacatgctgtgcaaaccacaggcacagggacaccactgtaccccagatactgcagctagttgctgacatgcacaaaccctgcgtggacgagaaactcaaagaccccataatctgtatggtgatattcgtgcgcaaacttttcaaacgattgctgtactcattataccatcacgattaaatggttccataaagctattgtctcaaggtgctgggggaagcacagagctcagaggcacggaatcctcagggcagcgcagcacagcgaggctgtcccactgccccgcagtctggtgaggagggcaggtgacactcacatttggagacgacatccaggatgacattgaaaggaatgagcgcccctatcatgaagaggagggctgctgtgtccatgaaggagagctgcttggccccatggccgtagtaaaggaagccaatgatgagggacatcaggcaggcttccgacccatgaatgagcagcgtgggcaggtcccggaagtcattggaaatctgacgactgaaagaaagcctccatgtaaggtggccatccaaacagaccaggctacataaagtatgaccaagccagagtgctccaatcagagaggaggcaggggcatgacacttagggtaggtaaatagctggtcccaggcctctgcatgtgtgcatccccccaggaagcctgagtgcagcaggcgcatggagccttcaatcaccatctgccctttctgggtctgagtgtctgatgtgactctttccatgatacttgccactgatgcagttttattcttgtttacagaataagagcatcagggggacgcaggagggctcggctggtcctaggggtgctagcttttaaacaatttcactgctttgctttgatatccagaggcataggaggcagggatgagagagagagagagagagagagagagagagagagagagagaggaggagaaggaggaggaggaggaggaggaggaggaggaggaggaggaggaggaggaagaaggaggaggaggaggaggaggaggaaggaggaaggaggaggaagaagaagaaggaaggaggaggaagaagaggaagaggaggagggagggaaggaggaagggaggaagagagggagggaaggagggagggagatttaccggatcagggtggaaaactgctctatcatcccgggcagctcaacagcagtcccacagtcagtgtcctgtgtgagggtcaggctgttgggagcagtatgtgaattatgtgatcaggctgggggcgggggcaccaccggagcttcccatcggtgcccgggcttcccgtacctgactgtgtgggtgcttgtgttgagttcctttgcctcagctttccacagaaagtcatcaaagccttgtactttttctaggaacagggctgcaagagactgtgccttctccacggtggccacctcccgttctttgctgcgtctgtcgatgctggtcaagtccactgtaagcagaagatacaaggccataggcaacctggtcccaccctccgagaagggactgtgatgcaatggtcagagcagaaaggcagagacctggtccttggctctggctgatctgaccacatatgcagatgccttgagagggccacagatcagaaagtaggcaacagcaggggccccaccacaccccacccatcccaccccactcccatcccatcactacagagatttctacagtgggcaggtaccttcagagccagatatgtcattacaggtagatgctggctctaatttcaagtggccagggtgctgggcaccagccacatccagtgctcactgcctatgctaagctttgccccaggagaggctagggcagcccacctaactggagaccaggttactgggggaatctgagaagatgccacaccctgcatgtgccagtcccatcatgcagctgagaatgggctctgccctccctccaacgccccctcagtgacagaaagcgccaggcccagcagttgcagcccgggcagtgctacctcctggagactccaggaccgtgcatggctcggctgtcctctccatcgctttccctcatctgtatgcattgcacaatacaagagaagaggttcgagggagggagggagggaggaagggagggagggagggagggagggaggggctatggaccccataggctccccctgtgcaggctgtagctcaaatgttacatttgctgggtgccctgtgtcccacacaagcagctcctgcaccccatattagtgacagccacctgccttgggtctggtagacaaggactctacccctactccctccaaaggaagacagaaaagaagtctttgtttctgccatggttacttggtttggggcagccctctcaggctcattcatacttccccttgtagccagattggcgaatgtcctctgaccccttatctgaggacactgaccaaagtgtgacacatggaagtcaggatgtcaacctgagcatgaaaggtggcttgtatgggagttcactgagggcatgagttcaaagggcagggaaaggagccaggagcttttcctcctgggacagccaaggatgctggggtgacagtgtgggtggaatggaccagagtcaaggctgagagccaggctcaccaacgggagccctgggcctgttcccacagttgctctagaacacagtaaggcagggatgaggttcctcagctcatctacaaaaacagacctgaccttggcttgatagagaccatggaggttagcacttggctatcctaggaagcttctggggttcctggtcacctagaggaccggctattgcttctgctttcctaggttccagtacactggccacttgttcagcatctggtctactcttcagcactcttgatgggtgtttcatatgcaggtgtcctgaaaagaccactgttccccatgaatgaagtggttcacggtgttcttcatgaaagagtgagtacctgggacaccaccccccccccaaaaaaagctaaggcagtgacctacctatccagcaatctatattaagagactcattggccctgtcctgggccctctacctatgctacctgcctctgaggagcacaaaggcacacacacacgcgcacacacacacacacacacacacacacacacacacacacactcttacagccttcataaagaccacacatggatccaagatctcctggattacgtacctgctcacccatctgcagtcttctaccccttcctgtcctgtccagaagactgcagtactagtgccttgcattcgaccctggcaaactgaccagtttcccgttttgcatgctaccagttggtcctagctcgatctctcatctgggcatgcataacagggacccccctagatctttccagtaaggattttgtgcttgtttttgttttcttttgtttggagggggcgtcagcaaatgtctgtgcaccaggttccaggtccttgcctttaccactcaccgtagaagtccgcagggttgctatagcgaggacaagggtggccaatggatgtgaagtactgcaccatttgctgcgccgcccccaggtagataggggtgccagatgtcatcagaaggaccaggtcaaatagcctgaagatgtcagagcgaggctggtggagggagatgagcaccagcctgttgcccttggccaggcgggacaaggttgtcaccagattgtgggctgtgaagctgtcgaggccagaagtgggttcatccagaatgaggattcctggggatattgcacagggagtccaatgaccacgctgccgctgccggacaggttgtaggctcaggttttcacccctcaggttcccaggcctcacctgggttccacaggagctgcaccccaatgctcactcgtcggcgctcacccccggacaccccacgtacatacgtgttgcccactctggtgttggcgcactgccgcagccgcagctcggcgattacgtcttccacctgaggacaggcggagcgttaagggcatccaggggctgcacaaactctttcacttaatgcaaaggaaggcttctgcagtatattttccagcagcattgtttggcgacccccactctgctccctccgccccccctgccccccccccccgtgtccccaggttctgagcagattcgccctgaagagcacacattgtggactgggaatcagaccagataattggctccccactcacacgaagcaccaggaaaaccttacacaaacaaacacacacacttatcacccacttgacaaggtgggggcggggggcgcgggcggggaagggaacccctggggctaagcgcattggcttgtagggtgggttggtttaactacccagctagactgggtcttctggcaaaccaaggaattctcagacaccagggacaccaaccagccaactggttacccgtttgtcacgctgggcctgggagaaggtcctgggcaggcgcatctgggcaatgaaagccagggtctctctgacggtcaggttgggcagcagttggtcatgctgccgcacatgcgcaacgcacttcctcaccagctgaggcgtactgggttgcccatttatccaaatttgtcctgatttcatcttgccaccgtggcctctgcctgtgatcacgtcgagtagtgaggctctcccgcagcctgcaaatccagagatatccctgagggcagagtttctgccgggcttgcccccaactacttcctccttccctgcccactcgcgaagcgccggaactgctcttcagaagccaccaaattccagggaaaccaacactgttcttagatttgggtgggacagtccagcaggtgcacggtccggctttttttcctaaggccatcttgagtgattggggacacactgataaagaggtttcagataggagacgctgtagtccttactgctacaagcctgctgctgtccctctcccaccactaaccaacggctttctcccaagttggtgctaattacactacaaagtgtagtagctatttctttggctgaaaacacttggccagcgtctcattcatcattgggctcggaagtggctttgtgggaatgactaatttggagcattcatagtctgtctttgaagaactcagaactacaatttagctatttggtggtgacactagcctttaatcccagccagcattcaggaggcagaggtagggggaacctttgagttggaggccagcgtggtctacagagtgagttccaggatggcaagggctacaaagaaaaaccctatctcaaaaaacaaacaaacaaacaaacaaacaaaccaaaccaaccaaccaaccaaaacgaaccaaccaaaaacaaaacaaaacccaaacccaaaaaaaacaaaccaaccaaacaaaaaaaaacttaaaacctattttgagaaaaataattggcttccaaatatctatacccttctctcatttttaaaatcagtgtctttttttcttctgccttgcaaacaaggattatcccgttatccactcctgaacaccaattcatgcctatcgatgcagagaagcgagcattgaatctcctttccaaaagcacgcctgtaatgaatattttttttgttgttttgtgacagggtctcactacccaaccctggctgccctggaactcaccatatagaccaggctggctcacatgcaactgaggttgccctgtcccctgtccctgtctcccaagtactgggattaaaggtgggcaccaccatacctggctcacctataaccagtttaactgtggatgtgaacccgcctcatgcttggagaacaccctcccgtgttccaagatggagacaaaagtctgtttgagtctcccagcaaggtgttggtttcccactctgtagggtttgtggaattaatagcttttttcccccttttgtaaacaaggcaaatgcctatagacagtctgtgacaaattctccttgctatatgtcacatgctgcctgccatgtccacaaacccaaggaccttcatatataatccccttgtttacaatccagggctgcctgctaggcatgagagagagagagacagagagagacctcagccctgtgcctgttcggcctcagacactgactttgcgagtgctggaaactgtgccagccctacaggcaccaggcatccccagtcagagggcagggagatcacatttcctaaacaaaactgtggccaaaagctagaggcagactgcctagcaaagagcgcctggtgcatttgggcaaatgctctctgaagagccatggcacccaagagccttgcaatgtggccaccgtctcctcaccaggaatttcattagcttcgaaatccttgtgtatggccgattctacagaacaagctaaatgcttggagcagatgttttagaataattttttaaattattataatggctactatgcatattcatattctccctgtgtgatagtatttaaaggaatcaacatcacaggacgtatgatgactaaatctctctaaaaaagcttcaaaattttcagtcaagtaatcttgaagccaagcaaagctaagcccgaacctgggcgttagtcagtgtagaccctgctctgcctctcggaacttcactctcttaaaagtcggggtgctgctggccagggggccggatggatacttattcaacagtattcggcatcatggctgaggaatggttcctaggtctccggggtgcccagaaaagacagatccaacaagacaagctatcagacattattagtccaaatatcctttgcctgtttagatcagcatcacggggtcagggccagggactgaatgagtatgcatgttgtttcagttacaaagtacgtttacattttgtagcttatttgctctttggttagacagtaaacaagtctatcagaagagtgtaaaagtttggaacagatgttcaaagtgttgggcaattttcccttctggaaatgattaactaaaaagtataaagttctctaatcttgcataaaggaatcccgggattcataatgagatgtcagtgtaagatctgcgctaggtaaattcctgcccttaggagtctcactcaactcttttggagttagtgttctcacctgtcaagtgtgtgtgtgcatgttctcacaaagaacgttctagaaatatggaggactagataaatgatttaaaaatcttctccctaaaatgcttccagacaggaagggtatgaggtagggtccaatatgggaaaccaaccccgttctccaagcccctctcatctgcaaggttctgtaatttcagatttgacctgtgacagcgactgcctgagacacttcaaggatctacctcttggcaggcggttgaaggttatgctaggactgtgaagggggcagtggcagctcggccctgccgagtcattgtctgaccatgacctgacttgggttgagcaggcacccgtggttgggggaagtctctgaaaagaacgtcacgttctaaagctgcttgtgtatcgtcttagtccagtgtgaactgtaggcacgcacgatagccaaagctgcaggtggactagactctcactcaggggcacaacaacagcaacatctaagagttggtgggtgagggagggggcatttgaacccaggtctatctgactgagaacctgtgctctaagccattttaccatattactttcttagtccagggttctgcatgcaagattcatggctgaaggctgttctgaatcgtaggggagaaaagccattgtcccctgacagcctctgttggtacctgagctccctatgatggccagcatctgtccactcctcactttgaagcttagatttcggatgcccagctcacaggagtcttggctgctatgagacctccagggtatcttgaactgagccagctgctcaaaccaaggcacctgagaggcgatgtccacctgtggggagaggttagcgagcccttgggaaactgaaccattcagagggcttcagcagcgtctactgcattttgtataactcctctcacaggagacaccccgatcgatactgatgcataagagatcttgaggcatcccacaccacagtcctaccaaacatggcagcgagaccccaccatcctgttcaagtctagagctgagagggtgggtggccagaaagcatgtgaaatatcaggaaaaaaaaaagccagcaagtgtttaccagctgcaagccattacaataatcacgttatatcattatccatctactgttcattgcaagcatatggtgtgggtactattgtctgttttactgagcagttcaaagcagttaaggaattctctcaagcttatactgtttacagtgcgtggcagagcagagagaggttacaaagcggctcgttcctttgtttagactcagaggcacaagaaggctggcttgggactctgaagttcaccatcccacttgggcagcatgtggtctgcccctggggaaatggggaatggggaatcattgcattctgacaaaggcattctgggggcccttcctgggtgccttcacattctacatgttttatgggcaatgggacaacatattttataaaaaatagaccataagtaggtacataaatagatagatagatagatagatagatagatgatagacagataggtagatagatgatagatagatagatgatagatagatagatagatagatagatagatgatagatggatgctagataatagatagatggtagatggatggatagatagatgttagatgatatatagatgatagatggatgaatagatgttagataatagatgatagatggatgcatagatagatgttagataatagatgatagatggatgcatagatgttagatagatgacagatagatgataatagatctaagtgaatgaaatctcaacaaactgtcatttacttaagagcatattgttaatttcctagttttgataattactatgtagtttgcaagatgtggacttcaagggaagccaggcaaaaagtgtgtctccacaaacactgtgtgtttgctatgtgtgttttctacaggtatgtacatgcacatttgtgtgtgaatgcaccttgcacatgtgtgttgagagcccagcggtaaatggcactttctactttacttttgagacctggtctcttgctgaacctgtaactcacagattcggccaggctgaatgacatgaaggatcctctagactctaggatcacagacttgtgccacccaggccagattgtcttctgtgggttctggaaatctgagctcaggcactttactgagtgagctgtctccccagcccctttgatatctgtcatctaatacagatatataatacgttcatatatgtcatacattgtatagctacatcatatgtatgtatatataaacacatatattttatgtatatgatatatatataatattacaaacataaaaatatatgtgcataaatgtacacacactatatctatatctagagaaggatttcaaattttaaagttatgagtaccgacatccccacaggccttcacagtgaacactagcatcctcacgaggggttctacccttttccaaacctctagctgcagatagggcttgcgcccaggacagtctgaacttcacccttgggattagagaacctacagagtgggctcacccttccttctcctgaacattttgttagctgcccacccttctcccctgaacccaggcacgtgcccctacctggtaggtgagatctctgacctccagagtgttggactgaccactgtaggtgaagtacagactgttgtcactttccgaggagaacaagctgtcctggaggccctgctgggagacatgtagtcaatgtgtaagggtcacatgcagagagcgccttccccggttctcatttctttgtgttggaaaccatcagattcttctctccgggtcttttgctttgaaagtaaaatttttattttattttgtgtgtatgactgtttgcctgcatgcatgtgcgtgcgccacacacatacctggcaccctcagaggtcaaaagaggtcactgggtcctctggacctggagttatgggtggttgtgaaccatctgtgtgtgatgggaatggggtccaggtattctcaggtgcttttaatgtttgagcatcaccccagctccattctctgatctttactaaaaaataataatagcaatggcttaaactatggtcaccccgctgtgcttcagaacactagaatttatgtctcccatctcattttgatgcccaggatctgactgccaaccatcccctaccctgtaatataattcatctctctgaagtaggaatatattggagatatcttttggggtgtgtgtgtgtgtgtgtgtgtgtgtgtgtgtgtgtgttggggaatcaaatccatagcatcaaatatactaggccaatcatgatactgacagaaccatagcaacacatccggggtccctggggtttcttgttttcaaatcaattatctttaggagagatcttagttacttgcatgggctaggaatttgttcctagacacttgtactgatacaaagtttcttccattggcttcaggagtggaggggctactgagggaggaaagctctcaggttactgcgctaatgtgaagacctgggggggggggggttagacagacagagaggacagagtggaagacagggatgcagttgattagtgcccaggtcgccactctgactcactcaaacccactgaccccgtccacacggagagtctgggtttccaggagcctcacagtcaactcagcttctgaaaggaaaaaaaaaatatatcctgtctggcttgtggatgacttctgttccattttaaaatattttccttggcacccaggaaggattcctgaggttttgacaaattctctctatttttcaaacccttaaatatctattcggctgacacattaatcagcacgactgtcagaacatcatttgaatctgtgacaggtgacaccctaaaaaagtgaaagcgggtttatttgtaggtaactagtgtggctcctgctgggctacaatgtaacgtctccttgtattaacttctggttacattcctgagtcagaagcacagacacatgggaaaatccagagggcacaaaaagggagaaatgtgcagaaaacagtggtgcctggtggggacatatatggtaagtctttggcccaaggcacatacctggccctctgttgacccctgcagacaccatctcatctgcctctgcttagagtccaggctttcctatccctgtctgcagtgcgaggagctgtagaccatgggtcctggcgccctggtactcagtgccagaattccctgtgagatagccctgatctcctccctccttccaggccatcactgagtatgggtagtgccggtctctgtgaagacctgactcgaatatgagtagaaagacggtgtggccgctatgtgagttctttgtagagtgagatgctgggtgggcagaggaggagatggatggccacggcatggagcagaagccagccagctccgcaagaaatgctcagttttctaaatttgcatacagagatgagaggctggaaaccactgggcagtttttagcttgactgacagcttttaagaacggaggcacagggcatatcagtgtcattgtctcccccccaccccaagccctgcagttgtcagtggcgggccatcacagggcacctacaacagtgggacctcacagaaggaacttgtaggtggcaggacctaggcacacttttgaatatagaattctgacagctcattgcctttttagctgtaatctgaagggcaaaagcccccacacccaccactgattttatatcctactcaggaagggagcatcaaagacgtagaaggagttatttccccatagacgtctgcctcatggggattctgacagcagagttgcctgttgctgtggtagtaggattggtcaatctcaggcaatcctgtctcccctagaacaggggactgaggcgtccctgttgaatgtggccatcctgttctggtctttgtctccagaaaagtgggccgggtgtagaagctggggggagggggaggtcgtctttgctctgtcttcccatactgccttctgcttcaaatcctgcccacaactcgagtcaaaggccatttatcaagcaaatgtttctccggttaatgaggaaggaggcctaggagctccacttcctggccacctcgctgctctctgtccactctgcctccctcccagaccataagactgcaagcacacaattctgacgctcccaaacaagcgatcactatcacagccagtgtatttgtaaactgcctgaaaccaatgtgtagccatagaaatattttcttgtaataagagaaaaaaataaatcgtgggctgggggaatggctcagttgtagaacacttggttcaacctcctgttacacacaggggggggggagaagtgggggggcagaggaggaggaaggaagaaggaagagggaagaggagaaagaggaaagtggccctcagagggatttatgacctgacttcccagccgtgagccctgccctttcagtgaggtttctctaagcagagcctcaactctacaaggtagcgagatgcctcaacccctccttggcatttgttcctgacacctgccctttctctctgtctctctgtctattggtctgtctgtccctgcagcttctcagcctcacacagagacctttaggcttccccctggccttctctttcctctggttctcaccaaacaatgccaaggactaacttactacataagtatggcaagcgtagcgatctgttgttacctccccgctgtctcttgactaccactgagattcttggtctgacagtcacatgggtcaacgctctgtgatggaatgtcatttggaaaacatcaatcccggtcattcacaggagcgtgctgtcgtggggaagtgacctcagaggtctcctggctcctgagactgttcccctcagaccatcaacactgaggagacagggccctgccgccccatttccattctacttgaagtccaggtggtacattaggactaatcctgtggtaggaaagaaaagtcagtctgacactgcctcccccctggcagagctcactcaccgaagcatcctgaagtacagtcccattccacagctgggtctcttctttggttttctcagccatgaccagtgctgtttgtgccctttgtgtggcctcccctgctgttgggctctctctgtctttgctccttagagctggggcacctgagccctcctctgtgccagcctttctcccagcattcctctctggcaaacactcctataaacacaccgtgtgttctgcctattgtcgagataaggacactctggctaaaggtacatcagataatggcatcgttggccaaattggtgaactgttatctcacgaggattccagggctgggtaggatcggacagggcactcccattggctcctcagttaaagctgccctggagccggacaggccactagaaaattcacttgcatttgcttcctgctagccatgggtgagctgccctttctgagtccagagggagccagagggcctcacatcaacagagggtctctgagctccctggagcaaggttcggtcacgggcacagaggctcggcacagcttaggtgtcctgcatgtgtcctacagcgtcaggtaaggggacctccacagcaaaaagctaggctctctgattgccttttctgaatgggtgggtgggcctgtgggctttgggttgtctgtccagcagatcagggtgaaagtggacagtctgtaacaacagtgagtcgttcctcctcctcctcctgcgcagggcagagcctggacattaaaacatgccctgcctgaagccgcttgctgcttctcactgatttctgctctccccttccttgactcgcccaccacctgtcctgtgtagatggagaaggctcggagagtgggggtgctgggggcacaaaatggaatgaacactgctgaaggaatgcagggttcacttcaagaagaaagcagtgtgcaggtgtaccatctcccagtcagagacccagtaatcagagcagctaatgggaggcatgctccttgggtggtggccaacttgtcattatacctccaaggacaacagagtggtacataaggctaaaacagagttgtcaacctgtccaggggcaactgggatggggtagggctgggagcaggggtctggcaccttccaggaccctactctgcctttgcccttgtgggatttcctttaaagcaaccgtgtcgggccttggtggaacatcaaatcatgccagcagaagtgggacaggcaaatcctcaaagatgtctccttgtacatcgagagtggccagattatgtgcatcttaggcagctcaggtaagtgcctgggggggccggggctcctgtacttctaaggcaggctctgggaggctttggctctgtctaagcacaatgtttaagaagtaagtttaagttgtagagaggcagccatgcatttggcatttgaatacaatctggtgacttgtctggctgccaatagaacctagtaccaaagtgaaatcttgaggaaaatccctggaaagagtggaaagtcctgcctaacacgtaagtgccttctttgcttgtttgattgactgtgatgctagagagcaaacccagagccttgggcatgctcagtaaaccttctgccccagcaccccagccccaaatgtatttccctcccttcctccttcccttcctttcccttcctcccttctctccctttttttctttcttccttctatatttctttcttttctttccttcctttcttcctttcttcctttcttttcttttgtttctttgtttctttctttctttcttccttactttctttctcactttgcattctgctcactgaccttctcctggccacccctcctgattgtttgattgactgtggtgcagggaggcctaggagagctaagagcccaggtcagttgactctgttggtcttcctgtggagttccttcgaaggcccccaattctactttcaactgatattcccacatctggaaagtttttgtcaaggagttgttaggcaggacttaacttctattcctgaccctacttgtcttttcattatgatggtcatcagacacacagttgagaacagataccactaaaaaagacctcatgttaatatagtctcaccgagcacaccaagcacaccaggctttctttgggcctctctcttcaggagttaagcatcacacacactgcgctgagcccacctgtgtgtattccccgtgtctcactattctttccaggtgagattttaacctttgaatgtgacttccatgtttgttttgtgttcttccactaactgtcattatcctctgaggggtttcctcctctgcccctgcaaaacctatagctgtaaattttcctatctgcagcagctggggaggggtacactggcccagaagaggggctctgggtagcatgccgcagtgttcgcaacactgggttattctgaatgcctctgcttaaggattctggcatattcgactcacagaccgttcttgactgagcagccccttgtaaactgtcagcatttaactgtccccttgccttgtgctctcttagaaacaggcagtgtaaggctgtggggagagtcaggtatgacactgttgggtgtagctgagagtgagtcccaaagctctgtgacaggagcttgtccttcctgtggaaatgagaggcctggtgctctagggaggatgaagggccacggggtgtagccctctgaatgtagctcatgcagtgtccaaagtggttctcaccagagaaagttgctatgaaagaagggctgacacgtgggtccctctggcttctgtctcatcatgccgcagctcggaacctgttgactcacaatgacacctaccgtggtgccatgcagccagaaggccagacacatgaggctagcccatttgaatgttaagtctccaagactgtgggtcaacacacacagaccacacacacaccacagacacacacacacacacagatagacagactgatagacacacacagatagacagatatacacacacacacagatacacaaactgacacacactgagatagacagactaacagacacatacacagatagagacagacagacagacagacacacacacacacacacacatactctctcttctatgatttctctgccttgagcgtctagtctcgggagttttcctatagcaatacaaaacagatttctagcctcagattaaatccatgagcattcatccaagcacagctatatgacaatagatgaagaataaatgaaataataacagcaacagttaatttgctaattagtctaattaggttactgtaagaaaagaatcatggtggaaagaatcactaggtgacttatgagcaagagtgtggattcctcagacttcaagagactgacagccaagaccaaaggcctgacagagctgtctgtggtgagggctgggtactagctgtttgtcaatgtgggcaaaacacttggcataaatggtttaaagaaggagagatgtgttttggctcacgctttctaagagttcagcccatcacagtgagaggcaagcaggacgcttatatcatgatggatgataagctgagagaggagtcaggaagggtgggaacaagatacaccagaggaacacccctgaggagcacccctgaggagcactacagtgatctacttcttccagctagtcaccccctcctaaagttccccaggagcaccccctaggagcacccctgaggagcactacagtgatctacttcttccagctagtcaccccctcctaaagttcccagaatctccacaagtagtaccagcaactggggatctaggaggctgagggtggggggtgaggggggtggggggcattttatattcaagttacagcagctggcttttccagaagtggtattttctagctctaatctcaaataatggaagggttgtgggatttctcccaagtctcttacatttttagttaattaattaaattactttgtgtgtgtatatgtgcaggggcttgtgtttgtgaaggcctgcaatcaacctaggtgtcttttttgtgcttgtattttgtttgtgggtagatgtgtgtgtgtgtgtgtgtgtgtggttttttgttttgtttcctttcctcttctttctttctttctttctttctttctttctttctttctttctttctttctttctctctttctttctctctctctctctttctctctctctttctttctttctttctttctttctttctttctttctttctttctttctttctttccagccctggctggtctggaagttgctatgtagacccaacctgctctcaaactcagagctctgcctgtttctgcctccagatttctgggcttaaagttatgtgccaccactattggcttcccatcttgttttctgagacaaggtctatgagttagttctacctggaacttactgattcgtcgaggctgctgggaagccagcgagccctagagaccctcctgtttctgcctctgtggtgccaggattacaagtgtcactatgctggctttgtttactggggttttaacgctcatcttcacgcttggacaatgaacagttttccaactgaaccatcttcctgaccctcaggctctttcctaagtacactaactccagttgtgagggcaatgtcttatcagcttccaatatacttcgtaattctgcttcagtcaccttgtgtgtgactaaggatctacctcctacgctgccagacttatgtagtaagttagtccttggcgttgtttggtgagaaccagaggaaagagaaggctagggggaagcctaaaggtctctgtgtgaggctgagaagctgcagggacagacagaccaacagacagagagacagagagaaagggcaggtgtcaggaacaaatgccaaggaggggttgaggcatctcgctaccttgtagagttgaggctctgcttagagaaacctcactgaaagggcagggctcacggctgggaaatcaggtcataaatccctctgagggccactttcctctttctcctcttccttcttccttcttccttcctctgctcccctcctctccccccacctctctgtgtgtaacaggaggttgaaccaagtgttctacaactgagccattcccccagcccacgatttatttttctcttattacaagaaaatatttctatgcctacacgttggtttcaggcagtttacaaatacactgactgtgataatgagccttttctgcagtgaggcagttgagctaacacccataaatacaggtggggagacgacaactgctaaagtttctccacatgaactacactcttaatgtcactggaaaacaattgcaaacagcctccacaatatgcgtgggcagaagagccacggagtgagtctcgtgaacagcgaagtgtaataaacagcgtattatcaacatttacaggttacaaaccaccactgaagacatctggaagcccattcctttaaaggaggctcttgttcccctttctgctccacactgcccgaacatgcgtgctaactccgagttctgtcagacatggtttagacacaatggtcgttgctgtagggacttatctttggacccctcatagcaaaagcagtttctacaaaactcttggatgggagatcttctgtctggccctgtgtgagcggctcagtctggcagaattcccttgctctcgaaggtggttcagagcctcctgcctgtgtccttgttagtaagtctggttagctagcaggaatcaccaggaaaagtctgtcctgtctccaggggttctggaacccaggctaacctgtgtatgatgtgaccttggggaaacaaaacaaaacagagatgcatgttcctctgtcacctcaaggttcaggcagttgcttttctagaactctgcaggagcatttggggtagtaactggctagctgtagccaaggctcttggtacaggctgaggttgctttccccaaaggctgctaagccagtgtccctcacactctaatactcatgggaacttgttaaaaatcagagtcacattcaataggtctgtgagtctccgtttcagggtctcagaccacgagtcagaagagtcagaaggctctagcaaggccatctagattcatgcagagctggacaggcttaggggatcacaaaaaggaatttatgtcctaggcaccagatgcttccaacagccctccctgggatctctctctttctctctctcacacacacacgttttttttgtttgtttgttttgttttgttttgtttgtttttctgtttgtttttttgtttggttggttggtttttttttttttttttttttttttgatagggcttctctgtgtagccttggctgtccaagaactcactctgtagaccaggctggcttcacactcacagagatccacctgcctctgcctccctagcgctgggattcagaccctgggccaccacttcccagcaacctgcatttttctcaacccaaaattcccccactatttatttatgcatgtgtgtatgtgcacgggcaaatgcatgccatggtgtatgtggaaagtcagaggacaatttttgataattcaggatctcctttcacctctgggactgaaataaggtcctcaggtttggctgcaagcaccctgccatctgagccctcttttatacattttatctaaatacaaaacttcttcagacctgggttccagttctgtcattaccaagggcaagagaactgctttcctgtcaccaaatccatgtggtgtttggcctctttactaggcgtgtcccagttcattcagaggataaactggaaagatttatttagaccctgggattttgaccaggggccatggtgcagtcagggtcccattgaaacacaaaaggtctggagaagtgcccccattctcaccgtgcagaggctcctccagggccttctcttgtcgccccctaggctcagggaagaccacgctgctggacgccatctccgggaggctgcggcgcactgggaccctggaaggggaggtgtttgtgaatggctgcgagctgcgcagggaccagttccaagactgcttctcctacgtcctgcaggtgggcgtgtccctggccctagcctgcccgggctctggcccctagccccgggatttcgacgaccctgatgtcccctttcctgcagagcgacgtttttctgagcagcctcactgtgcgcgagacgttgcgatacacagcgatgctggccctctgccgcagctccgcggacttctacaacaagaaggtacttgaaagttaaagctgagtgaaggccagttccccaagggacaagaccaggtgcctcaccagctcctcctctggccacccctggtcccctggtcctcctggttttttgtttcgggtttttttttgtttgtttgtttttttaatctttgcttcacgcttgtattcacctctacctctgccatcctaagcggcagctacatgagctgtctgaagatctgaaacgtgaccactccaatccaagtctggttatgcctctggtttagtccttccatcacgtggctttaggggatccaattcaggtggtcggtgctgttacccgcttatctatcttgtctttaacggggcttcatgcatgcaaaggagactaagtttcttccattaaggaagaaactatggagtcatttttcatctaggtttgattgttggccacacccattttgcaagtagctgtaaataaattcaccttgatcttagttagaaacattgcttccttcagtctgaactatgaaggcctgggaaacttgggaaaaaaatagcaccaggcagggctgtcacctgcaacaggaacagctccctaggaagtaggtgggcgtcttaccgagctcttgggaaagtgagcagactgcttatacttaagaatcctggacagctgagggaggcagttggcgggaggtgcccagcccccacagagcgatgcctcagccatctatctctcccactaaggttacccagagagctcaggggtgttacatgggtcctgtctctggtgccttctctggctggcattcagcaggcttgtacaaatacagtatctcactgatattaatattatctcactgatatctaatattagctgggggagggaacttcatctccaccccatggggaaaacccacaccctctgactccatgctttcttgagaaccatacagtctgagaggaggacatgtatactctcctgggaggtggttgtgcagaaacatgttcacgtggcttggtgggtctagccgggcgacagaggaagagacaagccatgtagtccctctgcagctgtctctctgcttgctttagtaatttctttaaatctaaaatgataggagaaagttttttgagaagggagctggagagatggctctgtagataagtggctaagagcactggctgtttcttcagaggaccaagcagggttccattcagagcacccacgagtcaggcaaagctccgttctgggatccttccatctgactctaagaggagactctgtgttttttttccagatcagatcttactggctttctgatagcctcgtttctccttcgcatcgtctgtaggccagggcttcatttacgctggtgactctggctgctcttccctggaactctgctccaaaagctactacatctctttgcctgcagtcatattgcggctctttttcgaagaaatgtgcccgtttctttctttctttctttctctctctctctctttttttttttttcattttgaaagggacacaatctcattaaaggcagctaggaacaaattcttggctatattatttcattcctgcccctgcttcccccagggcttcctgcagactcagggatcgaggaaggagagaggtagagatttcccaaaggtctctgggggctgcagtaaaccgaagcagtggagggagaaagggcagccttcttagcaagccagtgagcactgttttggaatgttatggtgtggagagtcggaataagaagcggactgcagggagccgcagggtaggagaatggagaggattggtggggaattagaagcctggacaagcacagagctgcggattatatgttggggactctttgaagtttcccggagagatttgagtaaagattagaatggcttttaattacttttggaggttggattatattcctttgatgtaaaaccacattgtgattggccacttgagcctccaggacttacttcgttacaaaggggataagggggccacttcaaaccaaattgtttttttttaaagcacagaaaatgtttatgataataaaatttcaaaacccaaatacttaacataatctatgtcataatgatgcctttgggacatttttctgttgcaagaataagcaatttttttttttgtctcccagggacttaaaacttttatttaaatctgaccggtgtattatgtattaaactaaggtggattttactaatggacttttctccccagggtatggtgggtctgaaagtagcccttgtactttagagcagtgttatctctctggggccatcacagcccagaaactgaagtgtcagccatagatacaggtggcagccctggggtattgtgtctcttacaggtagaggcagtcatgacagagctgagcctgagccacgtggcggaccaaatgattggcagctataattttgggggaatttccagtggcgagcggcgccgagtttccatcgcagcccaactccttcaggaccccagtaagtgggacacaaaccggtcaccagatgctaaaggggtccttgtgcgcttgaggctctgtcctcacagttcccaggtaaaaatgatttgtataggattgggattccccagggtttcgaaaattcgagatcccaatgttagaaagtgtcatgtagttcatttcctggtgagggtttgtaattgggagacagtcccttaacttatcacaggtcagctttacagaaacgtgaaagtgatacatgcgcaactgaactgtgaccgttgatcctctctcagactaatgataaatggtagcacatcccctcatgatgctaggtagcagcagtgagcccgtgagaggaaatgactggccctgcagtgcactgttacccagctaagatgctcggtaggttgggtgtattaaatgcaccttcagcttatggttgccatggttaccaggttattcagagttagggctaccaccacaaaaaccattcaccctgaacatctcttaagagtatcctgtttgtgtatctgtggtccactagggaagaggttatgaaggtgaggtagccagtcctctgcctcccccagcctggtttgctcattctcccaacttgaccaaccttaccactcacgtgctccttcaagaggtcattttgcacctggattctttctttactctgcattagaataaacctgcctcttctgacggcgcttggtcaggagacgataaaaaaacccttgtcacttcttgggcagacatgggatatagttaaagcgtctaaggagctcagccaattcctgtccagctactggcacttcagaccttgtttcttccttctgctgtgcaaagaccagacctcattaatattgcaaagtgccctggtatgaatcagggttgggctaggtaaacgttagctacttccttaccctccctaagcctgcctgctagccctggtctctgtcagtgtcccaggcatggagcccaagtagtccaaagtacaaagaggcctgatacggtctctctcctatctccaggtgtgctccagagctgagagctgggtcgtcccaggtcaggttctttctcctgggctcaggttgaaagccagtttccatgtggctacttctcaccacgcagtttggatggggtacggcgtctcaatgaaggactggtcagaaacactgaggtttaagtacagagcatgctgggcagtggttcagatacctgacccttctttgccggcagaggtcatgatgctagatgagccaaccacaggactggactgcatgactgcaaatcaaattgtccttctcttggctgagctggctcgcagggaccgaattgtgattgtcaccatccaccagcctcgctctgagctcttccaagtaagggaatgcactgaacccaatggtaggagcatggtgtcttgaaccgggaatggcagggcagggtaaagagcacacgccagtaatgagagaacacaggctgatttacacagtaccaaaggcatgccaagcatagtctatacactagctcattcaggccaccatcatttagtccacaaagcaatcctggggttaagcatccacatacacacttgaagggagaaaaggggacaagttagaaatgacttgaaatggagccagaatcacacagttggtaaaatgctgccagtggcagcttggagagatggctcagttggtaatgtgcttgctctgagtttggactccccatgactgtaaaagctgggcactgaggtgttggtacccagggcaagggaggcagaggcaggaaggtctctggggcttgctggccattttgtctagctgaatccctaagttcagtaagggacactgtctcaaacaagatggagagtaattaagcaagacacatgatgttgatgcgtgcatgtacacacacacacacacacacacacacacacacacacacacacacggggaggggaggcacctggcagtggcatcatgacttagttagccaccaaagccccatttcatcaccacattatagactttaccccaaagaaatttcatttgatacccatggcatccttttagttagccagtatttgtttgtttgtcaattgataatgatttaatatttcaaaaccaagcaacacacaaaacactactctggttgcttatggccactctctcagtggcccaagtgtgattgattctgggactcagaggcatataacaacacccatatatgggagtaacccaggctttggagcacacactaacaccatctattgtccaagcagcacttcgacaaaattgccatcctgacttacggagagttggtgttctgtggcaccccagaggagatgcttggcttcttcaataactgtggttacccctgtcctgaacattccaatccctttg

SEQ ID NO: 21 - DNA, 41158 bp, Homo sapiens
ttatattttaatctgtaaaacaaagggaatgaaaccaatgatctctaaggacttttctaggcctaagattcttttctattctcttaatactggattggtttgaataatgaggatagcaaaatgtccaagttgtacccattttctaagacctagttaagtcacatctctaaccacttggacccatagatctttcttccttcctgcgtgaacaaccatagagtctctgtgggttagttcatggctagccaaatacctttgccttattagttaagtgcgcttgcatgcatatttgtaattgcaatttcacttgaacacttttgaagtaagaccctgtgcttgtcccccctgctttttcttatagcattaatgataacactagttaaaattcactgagtgtcaatatgaggcaggcaatgtttatacttgatgagcattaactaatttaatttttacagctaccccataaattaagattattatttattctcaagagagaaaatcaaggcatagcatgttgaagtaccttacccacacaactagtaagaagtggagctggtattcaaacttgagaagtctaattccaaactagtgctcttaatcaatacacgataatatttcatgtggtacctagctcagacactagaaatatgtgggaaatagaacagacactagatattcatttgagtgagctcggtgaataaataagaaatagataaaaatgtgcagcggtagttctatgaagtgactgtatatctcacccagaaaatctctaggtaattactggaaagactctcattctcatgaatacctggttttattctgactgctgccttcacatggcttgcatttttgtatttatcattccacttcactctgcttctgcttaatccagcagttttgtatctgagcaaccatctgtctttaaacaaattccacagatgtaatcatcagtacagctaaaccaaaaacaaattcaaacctaatcttcccagaagagcagaacttggtgtaggttagaaagactttaagtgttttaaagagtattctttttacctgttttctagcagtgatgaagtaataagtaaaaagaatgtcagttaaaatataaaataaagctttgtgtggctgtttaaaaaattgtagaataggccagatgcggtggcttacgcctgtaatcccagcactttggaaggctaaggtgtgtggaccacctgaggtcaggagttcaagactagcctggccaacatggtgaaacccccgtctctactaaaaatacaaaaattagcggggcctgtcatcccagctgctcaggaggctgaggcaggagaatcgcttgaacctgggaggccgaggttgcagggagccggaatcacaccattgcactccagcctgggtgacaagagcaagactcagtctcaagaaaaaagaaatggtagaataaagcaatatgaaatagtagatttcatcttggatttattgtgagactctgaaattagaactagtcatggatgtttctcattcccaacatggttgccagtgtctgttttcttcttcggcatgtactgccccatgtactaatgatctgttttgctgctgtgggttacaggaaaggtacaaagaagcccttatgacacttagaaagcctatttaagataagcaaataataaagcaccagacaaaaagggtacaccctcatctcaggtcgcaattcaatttccctcctctcccaaattttctattgccaatagcaatgaatgtagctttgtcaacataataatagttttgagggactatcagagaatagttgtcctaattttttgaaaggcattataggatatatatatcttgaatgcctctttgctgttttgttcactagctattgaccttgggcaagttacttaatcttagctactttatgttaacctcagtttcctcaattgtaaaatgcaataatgacaatgctattctagtaagagtaccagagaagcaaatatgccactgctggtaaagcgctgctgagaacagggactggcatgtttgaaggcattttataagtgcttgttaaacaaacagggcatcccctgctgtcctctttcccctcacacactcagggattcagtagagttaatatagttctaatacaaaataaatacacttaagattttagtgtttgcagctttataatgaataaatgcaaaatttctattattgttattttcaactactattggcaacaaactcatggacttttactgtactttcatggatatcaaggagttgatggacatcagactggaagtggcttatttgttcatttatttattcatttattcattcagtcaacaaatatttatagagcacttgctacatgctgggaatgtatgtgattacttatgtgaatcttaaatttgctagagatggggatatagcaatctttgttttttcataatacaatcacttggaaattttttactcactgaatttaattcataggtttaattactatctactgtctagtactgaactgagattttgtaaagaatacagtgaatagggaaaatgtttactcttataaaatgattacaatttaataaaatcttataaattcaagagatgtaactaagaatgaaaacaaagtaatacaggtcatcagaagacagtgagaagaatgtaagcctgggaaaagagaaggtctggaggtgtgctctggagatgggaagatttagatagatacaaagcaggggaaatcatcatggtgggagaaagcccaataagcagagatttgtgtctgaaaatgaacatgaccccctgggaaaaaggaagatggcctcatagcaccttgcacatcttctcatctagtatggcatttaataccttgtaggcttgcaaaaaatgttacagggagtataactgagttaatgggaaaatttattcatgaaagagaataacagattatattatggagatcatttcttcacatatttgttcatttgtctactcacctgtttaacagacattgaacacacatgcgccagtcatctgctagccactggggatactgctgtgatggagaaagacagagcttctgctttcagggacattataaactagtggaatcagattacagagtatgttgcttttttttttttttttaaatttggagacagggtcttgctttgttgccaggctggagtgcagtggcatgattatagctcaccgcagacttaaactcctgggctcaagaaatctcccacctcaggcttctgagcagctgagactacaggtgtgcaccaccacatctgggcaatttatttatttatttatttttgtacagacaggatctcactttattgtccaggctagtatcaatctcctgggctcaagcaatcctcccagtttggcctttcacagtgttgggattacaggtctgagccaccttgtccagatggattacagaacattttgaataccaaagcaagaagcttggcatttatttaaaatgtaatggggaaccaataaaatatcttaaggagaggaaagttttggtattaatcagagtagatagggactagaaatatgatcattaattcagagtttattgtaataactcaggtgtgatttggtgagagcctgaaccaaactggcctcagtgccctggtgagtaagaataaatgtgaaaatgggtcaaaacaatttaactaacagatagatcaaaactgtttagggacatattggatacttgaagttaaagagaagaaattattaaaggcactccgaagctatcaaatgctatggcatgaaaacttacagtatcataagccaaatgggtaaatttgggaaaaaaaattagatgggggttgtggagggaaattggccaattgactaagaacatactgacatgctgaggtgatgtcaaatgggtttcatgaagaggaatggatttccaagtttttttgacagtgacctgagtaaaacacagattttacatgatgacctgatatacatatgtatagcaaaacttttacaaaatggtgctaatcccactacaggcaatttaccctgatcaattctattctattaattttattttactaaacaatactggccatgacatcctaaatttatttcatgaccctgtttgaaagttgttctaaagatagttgaaaattaggaactttctatagtaggtgtgttgtagaaatttttggcaatgaggcccttacggaagaaaggtcaaggctaatccagattttggggttgtgccatatggcattaggaaataagcttgagttcacagggtatagaaatttttcctagatgatcatgactacaaacagaacagtttctaacccatgaataaattagttacatataccccaggatgtggatgacaaagaatattagaaatagcatgaaatatcatcactattttttttactataaaatatatgttttagtttaaaaataaaggtagctgtgttaatatttaactacactggatttttcctagtgagtaatgtccccaatatcctcccctccctatgcttgtagatacatttcatatttgatgttttccaggattatgaacaattttaaggtacagtaagagtgaacaaaagaacaacccctgaatggacagatttgtggctgttagtttaatttggctaatcaagaagcaactgcaccaatgtagtaagtggccatgagcaagtttctctacaacaaaaaacattgcttcacagggtggttgagtcactggaaagattttcatatttaaactcctttagcatcccctttgtctactcacctaaaccaaatacaaaataatatcaatgggaattagtactggtttgggacttggatttgagtggggaggccaaagaagagccagccataacagcacattgtaagtattgagtaacattctgggcaatgactgtggtgtggctgctgggccaataggatatatcattgggccatttaaatagaccctgttttgactagtggctagaatatttttaacctcttcagttggtcaggattgaagtaaggcagcttctgctagcctgtttaccttcacggtatacctttaactacactaatttctggattgcgttctaatgagaaaagaaaaatgtagaggatgcacggtatcaagtgctcatggccatttaccatatggctacagttgactcgatctgacaaattaaattgacaatcaatgaaagttttgaatgacttctgtatctagtctgtatctatctgtatctaggcatgagctggatctagtgttagatacagtgaggatgaaccatggttagtgctttcaggaaacttattatcttggggatgtaggatataaattgtagcatttctgttgtctgcaacattaatctaaaaacctcaatgacccaaatagaaaaggaaaaaagctttctgaacagccaaacagagattccaaagttcaggcaccaaagttcagaccctaacagttatttacaagggtcagttaaccttttgttctagtgggataggattcccatggtgagatttgaagaactgtggaaccactgtttcaggttctttttccactttgccacccgtttgaaattccatccattaggaattaactggcatgatgggagtcccttttataataaaatgcctctattctagaaaggttaggtatgggggaggaaatagagtgttgatgagattaggagcatgaggttcagataaggagaggttttgtgagattttgtagaattagcttagtaagatttttaatatttaagacctacccgaatttgccaacaggttaagaaagggaagttttggtatggggtttatgttagaaaggaggcacatggaacttagaggctgggtaatggttggaaaggtgggacccctaaaagatagatgtttgaggtatacagaaggcagtggaatgggagagagaaatgatcattttcatgcttagttttgcctgaaaacccagataattgcgaactcggctttttttttttctgcttgccagcctgcatttcttttctttcttaaggttctgcaggaagtttcattgtctttgaagctgggatctaattctttgctttgatattttatgaaacatttagaaattacacatcatcatatcctccttactttcttcagtcctctgcctactcattccatttctccaggaaaactgtcttcacaagcaaaaataaacacagtgaatacaaatttgaaatttgaagtctgttggattgtataggtagctaaggaggttagagcccacacagcttatttacacgtgagattgtccttggatgtagagcttctcctccactgcttctttattatcccaggagtaccttgtattctacatgcatagtaatttataatgtttcactataattatcttcttattttcctgcatcccttgttacattgtgagctccttgaaatcagctccttaaaataattatgaaacactgtcttatgggttgtgccctgtcaacaagaatgctattgttaaataattagcatgtttgttgatgctggccaatatttacttttaggtatcatcacttctgatgtggattttttgtcaattttccacataactgcagatataagtttggactcatcaacacagccatttgctttcaagacattaaatgctttaaacacagccatttgctttcaatacattaataactgaataaataaacagtatacatttaaaaattaaaattgaatcaaaataataattatctgtattttatctagtaacttaagttattgctgttaaatacatagactatgtcactgctgtaaatcagaagcattttggaaaaagagttccattgtcaacatcatatgttactaaaattagttctttgttttatttaaatgcatgtttttgttgcaatatattattgttaactgaatgattttagcaaaccaaattttcaaagtattattctaacaaaagaattttattgttttcaatatctatataatgaaaaactaatactgaacaattcaatgcttatatacccaaaaatattttacaattatttttgaaagcatttatattatgtagtttattataatttggctagagatgaatttctctcaaaaaagtgaacatctgccaattatttatatgatatatttcttaaaacttacacttttttggatcaaataattcatttattgatgtcagcgcacacataccttcttggaaaactcctgagaatttcaaggcttaaattccaagcttcagctgggttacgggttgagaaagttttagctaagaactggcactaaaagattacaaaacatctcgcaaagcttaaagctatagaagacatcaagaagaaaaaataccttttaataaaaacattctaaactctatccactaaaatttcaacatgagactattttagctatacaatcttagttgttttatagaagattgataaagttcaattttataactttaaacttaagtaacaagtttcttgaatttcatgtttaaaatatagaatatgaatagattcaaagtgcattcatttctgtttaatttccatctgtggctatccttatgagacaggattagtattaatttcaatttatatgtttatagattctattagttgttaatttattaagaatggataaacatggattgcagacattaactatatttttcttgcacttgaaaaacttgataaaaaaatatgagaaagtctcattaatatagtttaaataagtttaaatgaactttttattctttaaaaatattaagctgaactagctagagcgtaatacttgaggagcaattgtgaggcttaggaatgaacaagctctcaaacttgaatcctaattgcctaacttgatatattctttcctaccactcaggtccttttctcatttgataaggctgtcacattgaaaacatggaattgcagaatgttcaaggtagaaggatcgttaaagataatttagtccaacttgacccatatggcatagagatatatgcagatctgcatgtccagttctgcagctagaaactgacactgagctgaattaaaccacacggagaagaactgagaaatttaaagtaaaaggttaggaaattcgaatgtatatatattccagaggcccagtgtaacatgaagaaagtcaaggagagggactctttcatcatggaagatctgggggcagagggacttaaaaggtgggacaagccaaagatggtgacctagggtggtttttatgatataaccttttttctcctcattccctatgaaatcttcagccaattccatatttctcactaattcaagtgaatatctggggggatggcttatggagggaaataagggagcaattgtttggattatattccaattttttatttgcattagaatacctatatgtttatacatttttatttgcattagaaatacttatataagtttatacactttcattctaactttttttgagggaaatgtatctccataagtgaataagaagttaaattactgattatgtttcaattggttagtttgatgcttaacagtctttcacttttccactcttgcatattttgtagagagtaatacaagctcttcatgataggaaggatctgcatatgtttattttatagtagaaaaatggtaagattttcctgtccccaattttctctccaaacaaatccaaatttcttgtattttggaatgactctgggtaaagtggttgtttatagaaagtctcttataaaatattgaggatattattagatattattacatttccatgaatatgtttccctttatctttaagagaagaagagtcagaaatataacctatcagagtgggagatggcataaaagctggactaaatggattgctagatggagggcaaacctggtgtgaatgactcagtgagaagcttcgggagtcctgagggtagcagaagggtgcggatttaaagttactgttagagtggctggaaaatgggagaccggttcagagacattttatctacttaaaaactgtgccttttgtatcacgtcaaagtgaatgcaaaacaaagaacaaaagggttaaaggctcaggtttaaatcccaggtatatgtacatttcaattgaggtattttttttttcttttctaaatgatcagtacacttattctttctaaagaaaatacttttcttaactactctctatttttaaacttctcccacaaagatgagaaaacatttaaaaatcattggggctatttttctgtttaccgagtaaagagaatctctaaaccatatttataactcttactctaaatatttgcatttaccctcatgccagagcccgttgatgactgactaaacagagtttcaaagtttgaagaacaggaaatttagaaatgactaacaattatgtaggtttatttctctcagtatagaatgttcatatagaattaatgccagaggttttcagagaaaaatgcagaaatttttactttgcaaatccagaagatgcaattgttcaagtatttcttaagaaacattaattttaagtatgcagatatcattgagaattaaatattttaatttctaaactattaatcttttagtaggatgcacatatgcaaaatgcctcattagtactgtaagaaaagattcttggccgggcgcggtggctcatgactgtaatcccagcactttgggaggccgaggtgggcggatgacgaggtcaggagatcgagaccaccctggcacacggtgaaaccccgtctctactaaagatacaaaaaattagccgggcgtgatggcgggcgcctgtagtcccagctactcgggaggctgaggcagaagaatggcgtgaactcgggaggcggagcttgcaagtgagccgagatagtgccactgcactccagtctgggcgaaagagcgagactccatctcaaaaaaaaaaaaaaaaaaagaaaagattcttttaggtttcatcaattttgttttaaagctagggctcttcattagatataggaaaatcaattcaaagtttctattcagtcatgatgaatttgagatttttttaggtttctttgtatttaacaatatattacattataatgttgtggtgaaaactaaatggactaatattattcttttcatttgttaaatgaaaaagtatgcacaaagtatatgtgagagtgacaaaggcctgaatttgtcaattagtaacaattgtattcaacagtaaggattttatgtttgggtaggcctttcccagggacttctacaaggaaaaagctagagttggttactgacttctaataaataatgcctacaatttctaggaagttaaaagttgacataatttatccaagaaagaattattttcttaacttagaatagtttcttttttcttttcagatgtaggtttttctggctttagaaaaaatgcttgtttttcttcaatggaaaataggcacacttgttttatgtctgttcatctgtagtcagaaagacaagtctggtatttcctttcaggactcccttgagtcattaaaaaaaatcttcctatctatctatgtatctatcatccatctagctttgattttttcctcttctgtgctttattagttaattagtacccatttctgaagaagaaataacataagattatagaaaataatttctttcattgtaagactgaatagaaaaaattttctttcattataagactgagtagaaaaaataatactttgttagtctctgtgcctctatgtgccatgaggaaatttgactactggttttgactgactgagttatttaattaagtaaaataactggcttagtactaattattgttctgtagtatcagagaaagttgttcttcctactggttgagctcagtagttcttcatattctgagcaaaagggcagaggtaggatagcttttctgaggtagagataagaaccttgggtagggaaggaagatttatgaaatatttaaaaaattattcttccttcgctttgtttttagacataatgttaaatttattttgaaatttaaagcaacataaaagaacatgtgatttttctacttattgaaagagagaaaggaaaaaaatatgaaacagggatggaaagaatcctatgcctggtgaaggtcaagggttctcataacctacagagaatttggggtcagcctgtcctattgtatattatggcaaagataatcatcatctcatttgggtccattttcctctccatctctgcttaactgaagatcccatgagatatactcacactgaatctaaatagcctatctcagggcttgaatcacatgtgggccacagcaggaatgggaacatggaatttctaagtcctatcttacttgttattgttgctatgtctttttcttagtttgcatctgaggcaacatcagctttttcagacagaatggctttggaatagtaaaaaagacacagaagccctaaaatatgtatgtatgtatatgtgtgtgtgcatgcgtgagtacttgtgtgtaaatttttcattatctataggtaaaagcacacttggaattagcaatagatgcaatttgggacttaactctttcagtatgtcttatttctaagcaaagtatttagtttggttagtaattactaaacactgagaactaaattgcaaacaccaagaactaaaatgttcaagtgggaaattacagttaaataccatggtaatgaataaaaggtacaaatcgtttaaactcttatgtaaaatttgataagatgttttacacaactttaatacattgacaaggtcttgtggagaaaacagttccagatggtaaatatacacaagggatttagtcaaacaattttttggcaagaatattatgaattttgtaatcggttggcagccaatgaaatacaaagatgagtctagttaataatctacaattattggttaaagaagtatattagtgctaatttccctccgtttgtcctagcttttctcttctgtcaaccccacacgcctttggcacaatgaagtgggtaacctttatttcccttctttttctctttagctcggcttattccaggggtgtgtttcgtcgagatgcacgtaagaaatccatttttctattgttcaacttttattctattttcccagtaaaataaagttttagtaaactctgcatctttaaagaattattttggcatttatttctaaaatggcatagtattttgtatttgtgaagtcttacaaggttatcttattaataaaattcaaacatcctaggtaaaaaaaaaaaaaggtcagaattgtttagtgactgtaattttcttttgcgcactaaggaaagtgcaaagtaacttagagtgactgaaacttcacagaatagggttgaagattgaattcataactatcccaaagacctatccattgcactatgctttatttaaaaaccacaaaacctgtgctgttgatctcataaatagaacttgtatttatatttattttcattttagtctgtcttcttggttgctgttgatagacactaaaagagtattagatattatctaagtttgaatataaggctataaatatttaataatttttaaaatagtattcttggtaattgaattattcttctgtttaaaggcagaagaaataattgaacatcatcctgagtttttctgtaggaatcagagcccaatattttgaaacaaatgcataatctaagtcaaatggaaagaaatataaaaagtaacattattacttcttgttttcttcagtatttaacaatccttttttttcttcccttgcccagacaagagtgaggttgctcatcggtttaaagatttgggagaagaaaatttcaaagccttgtaagttaaaatattgatgaatcaaatttaatgtttctaatagtgttgtttattattctaaagtgcttatatttccttgtcatcagggttcagattctaaaacagtgctgcctcgtagagttttctgcgttgaggaagatattctgtatctgggctatccaataaggtagtcactggtcacatggctattgagtacttcaaatatgacaagtgcaactgagaaacaaaaacttaaattgtatttaattgtagttaatttgaatgtatatagtcacatgtggctaatggctactgtattggacagtacagctctggaacttgcttggtggaaaggactttaatataggtttcctttggtggcttacccactaaatcttctttacatagcaagcattcctgtgcttagttgggaatatttaatttttttttttttttaagacagggtctcgctctgtcgcccaggctggagtgcagtggcgcaatctcggctcactgcaaactccgcctcccgggttcacgccattctcctgcctcagcctcccgagtagctgggactacaggcgcccgccatcacgcccggctaatcttttgtatttttagtagagatggggtttcaccgtgtgccaggatggtctcaatctcctgacatcgtgatctgcccacctcggcctcccaaagtgctgggattacaggagtgagccaccgcgcccggcctatttaaatgttttttaatctagtaaaaaatgagaaaattgtttttttaaaagtctacctaatcctacaggctaattaaagacgtgtgtggggatcaggtgcggtggttcacacctgtaatcccagcactttggaaggctgatgcaggaggattgcttgagcccaggagttcaagaccagcctgggcaagtctctttaaaaaaaacaaaacaaacaaacaaaaaaattaggcatggtggcacatgcctgtagtcctagctacttaggaggctgacgtaggaggatcgtttggacctgagaggtcaaggctacagtgagccatgattgtgccactgcactccagcctgggtgacagagtgagactctgtctcaaaaaagaaaaaggaaatctgtggggtttgttttagttttaagtaattctaaggactttaaaaatgcctagtcttgacaattagatctatttggcatacaatttgcttgcttaatctatgtgtgtgcatagatctactgacacacgcatacatataaacattagggaactaccattctctttgcgtaggaagccacatatgcctatctaggcctcagatcatacctgatatgaataggctttctggataatggtgaagaagatgtataaaagatagaacctatacccatacatgatttgttctctagcgtagcaacctgttacatattaaagttttattatactacatttttctacatcctttgtttcagggtgttgattgcctttgctcagtatcttcagcagtgtccatttgaagatcatgtaaaattagtgaatgaagtaactgaatttgcaaaaacatgtgttgctgatgagtcagctgaaaattgtgacaaatcacttgtaagtacattctaattgtggagattctttcttctgtttgaagtaatcccaagcatttcaaaggaattttttttaagttttctcaattattattaagtgtcctgatttgtaagaaacactaaaaagttgctcatagactgataagccattgtttcttttgtgatagagatgctttagctatgtccacagttttaaaatcatttctttattgagaccaaacacaacagtcatggtgtatttaaatggcaatttgtcatttataaacacctctttttaaaatttgaggtttggtttctttttgtagaggctaatagggatatgatagcatgtatttatttatttatttatcttattttattatagtaagaacccttaacatgagatctaccctgttatatttttaagtgtacaatccattattgttaactacgggtacactgttgtatagcttactcatcttgctgtattaaaactttgtgcccattgattagtaacccctcgtttcgtcctcccccagccactggcaaccagcattatactctttgattctatgagtttgactactttagctaccttatataagtggtattatgtactgtttatctttttatgactgacttatttcccttagcatagtgcattcaaagtccaaccatgttgttgcctattgcagaatttccttcttttcaaggctgaataatattccagtgcatgtgtgtaccacattttctttatccattaatttgttgattgatagacatttaggttggttttctacatcttgactatcatgaatagtgttgcaatgaacacaggagagctactatctcttagagatgatatcatggtttttatcatcagaaaacacccactgatttctatgctaattttgttacctgggtggaataatagtacagctatatattcctcattttagatatctttgtatttctacatacaataaaaaagcagagtacttagtcatgttgaagaactttaaacttttagtatttccagatcaatcttcaaaacaaggacaggtttatctttctctcaccactcaatctatatatacctcttgtgggcaaggccagtttttatcactggagcctttcccctttttattatgtacctctccctcacagcagagtcaggactttaactttacacaatactatggctctacatatgaaatcttaaaaatacataaaaattaataaattctgtctagagtagtatattttccctggggttacagttactttcataataaaaattagagataaggaaaggactcatttattggaaagtgattttaggtaacatttctggaagaaaaatgtctatatcttaatagtcacttaatatatgatggattgtgttactcctcagttttcaatggcatatactaaaacatggccctctaaaaagggggcaaatgaaatgagaaactctctgaatgtttttctcccctaggtgaattcacctgctgcttagaagcttattttctcttgatttctgttataatgattgctcttaccctttagttttaagtttcaaaataggagtcatataactttccttaaagctattgactgtctttttgtcctgttttattcaccatgagttatagtgtgacagttaattcttatgaaaattatatagagatggttaaatcatcagaaactgtaaacctcgattgggaggggaagcggatttttaaatgatttcctgaccaagcttaaccagtatattaaatcctttgtactgttctttggctataaagaaaaaaggtactgtccagcaactgaaacctgctttcttccatttagcataccctttttggagacaaattatgcacagttgcaactcttcgtgaaacctatggtgaaatggctgactgctgtgcaaaacaagaacctgagagaaatgaatgcttcttgcaacacaaagatgacaacccaaacctcccccgattggtgagaccagaggttgatgtgatgtgcactgcttttcatgacaatgaagagacatttttgaaaaagtaagtaatcagatgtttatagttcaaaattaaaaagcatggagtaactccataggccaacactctataaaaattaccataacaaaaatattttcaacattaagacttggaagttttgttatgatgattttttaaagaagtagtatttgataccacaaaattctacacagcaaaaaatatgatcaaagatattttgaagtttattgaaacaggatacaatctttctgaaaaatttaagatagacaaattatttaatgtattacgaagatatgtatatatggttgttataattgatttcgttttagtcagcaacattatattgccaaaatttaaccatttatgcacacacacacacacacacacacacttaacccttttttccacatacttaaagaatgacagagacaagaccatcatgtgcaaattgagcttaattggttaattagatatctttggaatttggaggttctggggagaatgtcgattacaattatttctgtaatattgtctgctatagaaaagtgactgtttttctttttcaaaatttagatacttatatgaaattgccagaagacatccttacttttatgccccggaactccttttctttgctaaaaggtataaagctgcttttacagaatgttgccaagctgctgataaagctgcctgcctgttgccaaaggtattatgcaaaagaatagaaaaaaagagttcattatccaacctgattttgtccattttgtggctagatttagggaacctgagtgtctgatacaaactttccgacatggtcaaaaaagccttccttttatctgtcttgaaaatctttcatctttgaaggcctacactctcgtttcttcttttaagatttgccaatgatgatctgtcagaggtaatcactgtgcatgtgtttaaagatttcaccactttttatggtggtgatcactatagtgaaatactgaaacttgtttgtcaaattgcacagcaaggggccacagttcttgtttatcttttcatgataatttttagtagggagggaattcaaagtagagaattttactgcatctagatgcctgagttcatgcattcattccataaatatatattatggaatgctttattttcttttctgaggagtttactgatgttggtggaggagagactgaaatgaattatacacaaaatttaaaaattagcaaaattgcagcccctgggatattagcgtactctttctctgacttttctcccacttttaaggctctttttcctggcaatgtttccagttggtttctaactacatagggaattccgctgtgaccagaatgatcgaatgatctttccttttcttagagagcaaaatcattattcgctaaagggagtacttgggaatttaggcataaattatgccttcaaaatttaatttggcacagtctcatctgagcttatggaggggtgtttcatgtagaatttttcttctaattttcatcaaattattcctttttgtagctcgatgaacttcgggatgaagggaaggcttcgtctgccaaacagagactcaagtgtgccagtctccaaaaatttggagaaagagctttcaaagcatggtaaatacttttaaacatagttggcatctttataacgatgtaaatgataatgcttcagtgacaaattgtacatttttatgtattttgcaaagtgctgtcaaatacatttctttggttgtctaacaggtagaactctaatagaggtaaaaatcagaatatcaatgacaatttgacattatttttaatcttttcttttctaaatagttgaataatttagaggacgctgtcctttttgtcctaaaaaaagggacagatatttaagttctatttatttataaaatcttggactcttattctaatggttcattatttttatagagctgtaggcatggttctttatttaattttttaaagttatttttaatttttgtggatacagagtaggtatacatatttacggggtatatgagatattttgatataagtatacaacatatataatccctttatttaattttatcttccccccaatgatctaaaactatttgcttgtccttttatgtcttatagttaaattcagtcaccaactaagttgaagttacttcttatttttgcatagctccagctctgatcttcatctcatgtttttgcctgagcctctgttttcatattacttagttggttctgggagcatactttaatagccgagtcaagaaaaatactagctgccccgtcacccacactcctcacctgctagtcaacagcaaatcaacacaacaggaaataaaatgaaaataatagacattatgcatgctctctagaaactgtcaattgaactgtatttgctcatcattcctaccatctacaccaccaaaatcaaccaaatttatgaaaaaaaacagccccaacataaaattatacacagataaacaggctatgattggttttgggaaagaagtcacctttacctgatttaggcaactgtgaaatgactagagaatgaagaaaattagacgtttacatcttgtcatagagtttgaagatagtgctggatctttctttttataagtaagatcaataaaaactccctcattctgtagaagttatgatttcttttctaagagacctttagaagtcagaaaaaatgtgtttcaattgagaaaaaagataactggagtttgtgtagtacttcccagattataaaatgcttttgtatgtattatctaatttaatcctcaaaacttcttcaatttagcatgttgtcatgacactgcagaggctgaagctcagagaggctgagccctctgctaacaagtcctactgctaacaagtgataaagccagagctggaagtcacatctggactccaaacctgatgcttctcagcctgttgccccttttagagttcctttttaatttctgcttttatgacttgctagatttctacctaccacacacactcttaaatggataattctgccctaaggataagtgattaccatttggttcagaactagaactaatgaattttaaaaattatttctgtatgtccattttgaattttcttatgagaaatagtatttgcctagtgttttcatataaaatatcgcatgataataccattttgattggcgattttctttttagggcagtagctcgcctgagccagagatttcccaaagctgagtttgcagaagtttccaagttagtgacagatcttaccaaagtccacacggaatgctgccatggagatctgcttgaatgtgctgatgacagggtaaagagtcgtcgatatgctttttggtagcttgcatgctcaagttggtagaatggatgcgtttggtatcattggtgatagctgacagtgggttgagattgtcttctgtgctttcgtctgtcctatcttcaatctttccctgcctatggtggtggtacctttctgtttttaacctggctataaattaccagataaacccattcactgatttgtaactcctttcagtcatgctctaactgtaaatgaaggcttaaactgaagtagaacagttacaaggttttacttggcagaacatcttgcaaggtagatgtctaagaagatttttttttctttttttaagacagagtttcgctcttgtttcccaggctggggtgcaatggtgtgatcttggctcagcgcaacctctgcctcctgggttcaagtgattctcatgcctcagcctcccaagtagctgggattacaggcatgcgccaccacacctggctaattttgtatttttagtagaggcggggtttcaccatattgtccagactggtctcgaactcctgacctcaggtgatccacccgccttggcctcccaaagtgctgggattacaggcatgagccaccttgcccagcctaagaagattttttgagggaggtaggtggacttggagaaggtcactacttgaagagatttttggaaatgatgtatttttcttctctatattccttcccttaattaactctgtttgttagatgtgcaaatatttggaatgatatctcttttctcaaaacttataatattttctttctccctttcttcaagattaaacttatgggcaaatactagaatcctaatctctcatggcactttctggaaaatttaaggcggttattttatatatgtaagcagggcctatgactatgatcttgactcatttttcaaaaatcttctatattttatttagttatttggtttcaaaaggcctgcacttaattttgggggattatttggaaaaacagcattgagttttaatgaaaaaaacttaaatgccctaacagtagaaacataaaattaataaataactgagctgagcacctgctactgattagtctattttaattaagtgggaatgtttttgtagtcctatctacatctccaggtttaggagcaaacagagtatgttcatagaaggaatatgtgtatggtcttagaatacaatgaatatgttctgccaacttaataaaggtctgaggagaaagtgtagcaatgtcaattcgtgttgaacaatttccaccaacttacttataggcggaccttgccaagtatatctgtgaaaatcaagattcgatctccagtaaactgaaggaatgctgtgaaaaacctctgttggaaaaatcccactgcattgccgaagtggaaaatgatgagatgcctgctgacttgccttcattagctgctgattttgttgaaagtaaggatgtttgcaaaaactatgctgaggcaaaggatgtcttcctgggcatgtaagtagataagaaattattcttttatagctttggcatgacctcacaacttaggaggatagcctaggcttttctgtggagttgctacaatttccctgctgcccagaatgtttcttcatccttccctttcccaggctttaacaatttttgaaatagttaattagttgaatacattgtcataaaataatacatgttcatggcaaagctcaacattccttactccttaggggtatttctgaaaatacgtctagaaacattttgtgtatatataaattatgtatacttcagtcattcattccaagtgtatttcttgaacatctataatatatgtgtgtgactatgtattgcctgtctatctaactaatctaatctaatctagtctatctatctaatctatgcaatgatagcaaagaagtataaaaagaaatatagagtctgacaccaggtgctttatatttggtgaaaagaccagaagttcagtataatggcaatatggtaggcaactcaattacaaaataaatgtttacatattgtcagaagttgtggtgataaactgcatttttgttgttggattatgataatgcactaaataatatttcctaaaattatgtaccctacaagatttcactcatacagagaagaaagagaatattttaagaacatatctctgcccatctatttatcagaatccttttgagatgtagtttaaatcaaacaaaatgttaataaaaataacaagtatcattcatcaaagacttcatatgtgccaagcagtgtgtgctttgtgtagattatgtcatatagttctcataatccaccttccgagacagatactatttattttttgagacagagttttactcttgttgcccaggctggagtgcaatggtgccatctcggctcaccacaacctccgcctcccaggttcaagcgattctcctgcctcagcctcctgggattacaggcatgcaccaccatgcctggctaattttgtatttttagtagagatggggtttcaccatgttggtcagactggtctcaaactcctgacctctggtgatatgcctgcctcagcctcctaaagtgctgggattacaggcatgagccactgtgcccagccgacagatactattattatttccattctaccgagaaggagactaaggctctgatcatttaaataagttgcctaaggtgatgcagtgatataagtagcagagctaggaattgagccttggtaactttaactctggaccccaagtccttagctactaagctttactgcatggggtttagtcaaattaagacttttggaatatgagttacttttgagattagctttgtgatattttttgtgctcatttgtccaacaaagtctattttattttcatcttaattaggtttttgtatgaatatgcaagaaggcatcctgattactctgtcgtgctgctgctgagacttgccaagacatatgaaaccactctagagaagtgctgtgccgctgcagatcctcatgaatgctatgccaaagtggtaggtttattgttggaaaaaaatgtagttctttgactgatgattccaataatgagaaagaaaaataatgcaagaatgtaaaatgatatacagtgcaatttagatcttttcttgagatggtttcaattctggaatcttaaacatgaaagaaaaagtagccttagaatgattaacaaaatttagactagttagaatagaaagatctgaatagagcaatctctaaaaaattttgatctttttttctctttttcacaatcctgagaacaaaaaaaaattaaatttaaatgttaattagaagatatttaacttagatgtaaagtgagttaacctgattccaggattaatcaagtactagaattagtatcttatggcaaattatagaacctatccctttagaatattttcaaatctttttgaggatgtttaggaatagttttacaagaaattaagttaggagaggaaatctgttctggaggatttttagggttcccactagcatatgtaatggtttctgaactattcagaatcagagaaaactcatttttcctgctttcaagaagctactgtatgccaggcaccatgcacaaacaatgaccaacgtaaaatctctcattttggagagcctggaatctaactggaaaggtgaactaataataataatatgtacaatcatagccatcatttattaaacttttattatatgcaaggcactgtttaatttcattagcttacctggtttacagagcagctctatgagatgagtgccatctttgcccctattttagggataaggattctgaaatgtggagatggtaagtaaaattgcacaactgaagaatgagttacatgacttggctcaaatactggtcattgaactccagagcctgaatattcttaaccacttacatgatgcaagctcaccaaataaatagttcgaatgtattgtgacagagcggcattgatattcatctattcatgtggctttgagtaggaagaagaaaggatatcattctgaccagaggggtgaaaaacaacctgcatctgatcctgaggcataatactattaacacaattcttttatgtttcagttcgatgaatttaaacctcttgtggaagagcctcagaatttaatcaaacaaaattgtgagctttttgagcagcttggagagtacaaattccagaatgcgtaagtaatttttattgactgattttttttatcaatttgtaattatttaagacttaatatatgagccacctagcatagaacttttaagaatgaaaatacattgcatatttctaatcactctttgtcaagaaagataggagaggagagataaaatagttgatggggtggagaggtctatatttgaatgtagtctaaaaattgttctcttaagattggaagtatgtaggctgggagggtaaataccaaatcttggtatatcagaactgagcatgtcccttgaaggttaagaaatagttaatgggcaaatagagcatggcaatattttgtagagcagcaagtagtaggccttgaatagatgtcgctcaaaaagtaatatgtaagctgaacacaaaaatgtaacaaatgaatttagatacatatttgaatattaaattcaggttgtttgggagatgcacctagtctttgatggttaaacctttccctccatagaagagacagagacagaatggcttgctggactaatgtcccaattcaatagagtcttatctatgaaggttaaaaacaagaagagacatattatacagtagatatttattgtgtggctcatacacatggtgctcttctgattatggattttagagataataacagtgaacaagacatagtttctttcctcgagtagattaaagtcatacattgacttttaatggtgactggcattcttaatacatgattattatatattaggtaccatgtcagattaattataatactttactacttttaatttaacccttgaactatccctattgagtcagatatatttccttccattttctacttgtatctttcaagtttagcatatgctgatacatatgaagctctctccaggttttattgaaagaagaaattaataaatttattaatgtcactgaattaggcaactcactttcccaagattatgcaagtggtacaggtggaactcaaagccaagtttaactagttgttcaggagaatgttttctaccctccactaacccactactctgcagatggagataatatgatgaatggaacatagcaacatcttagttgattccggccaagtgttctctgttttatctactatgttagacagtttcttgccttgctgaaaacacatgacttctttttttcaggctattagttcgttacaccaagaaagtaccccaagtgtcaactccaactcttgtagaggtctcaagaaacctaggaaaagtgggcagcaaatgttgtaaacatcctgaagcaaaaagaatgccctgtgcagaagactatgtgagtctttaaaaaaatataataaattaataatgaaaaaattttacctttagatattgataatgctagctttcataagcagaaggaagtaatgtgtgtgtgtgcatgtttgtgtgcatgtgtgtgtgcatgcacgtgtgtgtatgtgtgatattggcagtcaaggccccgaggatgataattttttttttttttttgagacggagtctcgctttgttgtccaggctggagtgcagtggtgccatctcggctcactgcaacctccgcctcccaggttcaagccattctcctgcctcagcctcccaagtagctgggactacaggtgcatgccaccatgcctggctaattttttgtatttttagtagaaaattttcagcttcacctcttttgaatttctgctctcctgcctgttctttagctatccgtggtcctgaaccagttatgtgtgttgcatgagaaaacgccagtaagtgacagagtcaccaaatgctgcacagaatccttggtgaacaggcgaccatgcttttcagctctggaagtcgatgaaacatacgttcccaaagagtttaatgctgaaacattcaccttccatgcagatatatgcacactttctgagaaggagagacaaatcaagaaacaaacgtgaggagtatttcattactgcatgtgtttgtagtcttgatagcaagaactgtcaattcaagctagcaactttttcctgaagtagtgattatatttcttagaggaaagtattggagtgttgcccttattatgctgataagagtacccagaataaaatgaataactttttaaagacaaaatcctctgttataatattgctaaaattattcagagtaatattgtggattaaagccacaatagaataacatgttaggccatattcagtagaaaaagatgaacaattaactgataaatttgtgcacatggcaaattagttaatgggaaccataggagaatttatttctagatgtaaataattattttaagtttgccctatggtggccccacacatgagacaaacccccaagatgtgacttttgagaatgagacttggataaaaaacatgtagaaatgcaagccctgaagctcaactccctattgctatcacaggggttataattgcataaaatttagctatagaaagttgctgtcatctcttgtgggctgtaatcatcgtctaggcttaagagtaatattgcaaaacctgtcatgcccacacaaatctctccctggcattgttgtctttgcagatgtcagtgaaagagaaccagcagctcccatgagtttggatagccttattttctatagcctccccactattagctttgaagggagcaaagtttaagaaccaaatataaagtttctcatctttatagatgagaaaaattttaaataaagtccaagataattaaatttttaaggatcatttttagctctttaatagcaataaaactcaatatgacataatatggcacttccaaaatctgaataatatataattgcaatgacatacttcttttcagagatttactgaaaagaaatttgttgacactacataacgtgatgagtggtttatactgattgtttcagttggtcttcccaccaactccatgaaagtggattttattatcctcatcatgcagatgagaatattgagacttatagcggtatgcctgagccccaaagtactcagagttgcctggctccaagatttataatcttaaatgatgggactaccatccttactctctccatttttctatacgtgagtaatgttttttctgttttttttttttctttttccattcaaactcagtgcacttgttgagctcgtgaaacacaagcccaaggcaacaaaagagcaactgaaagctgttatggatgatttcgcagcttttgtagagaagtgctgcaaggctgacgataaggagacctgctttgccgaggaggtactacagttctcttcattttaatatgtccagtattcatttttgcatgtttggttaggctagggcttagggatttatatatcaaaggaggctttgtacatgtgggacagggatcttattttacaaacaattgtcttacaaaatgaataaaacagcactttgtttttatctcctgctctattgtgccatactgttaaatgtttataatgcctgttctgtttccaaatttgtgatgcttatgaatattaataggaatatttgtaaggcctgaaatattttgatcatgaaatcaaaacattaatttatttaaacatttacttgaaatgtggtggtttgtgatttagttgattttataggctagtgggagaatttacattcaaatgtctaaatcacttaaaattgccctttatggcctgacagtaacttttttttattcatttggggacaactatgtccgtgagcttccgtccagagattatagtagtaaattgtaattaaaggatatgatgcacgtgaaatcactttgcaatcatcaatagcttcataaatgttaattttgtatcctaatagtaatgctaatattttcctaacatctgtcatgtctttgtgttcagggtaaaaaacttgttgctgcaagtcaagctgccttaggcttataacatcacatttaaaagcatctcaggtaactatattttgaattttttaaaaaagtaactataatagttattattaaaatagcaaagattgaccatttccaagagccatatagaccagcaccgaccactattctaaactatttatgtatgtaaatattagcttttaaaattctcaaaatagttgctgagttgggaaccactattatttctattttgtagatgagaaaatgaagataaacatcaaagcatagattaagtaattttccaaagggtcaaaattcaaaattgaaaccaaagtttcagtgttgcccattgtcctgttctgacttatatgatgcggtacacagagccatccaagtaagtgatggctcagcagtggaatactctgggaattaggctgaaccacatgaaagagtgctttatagggcaaaaacagttgaatatcagtgatttcacatggttcaacctaatagttcaactcatcctttccattggagaatatgatggatctaccttctgtgaactttatagtgaagaatctgctattacatttccaatttgtcaacatgctgagctttaataggacttatcttcttatgacaacatttattggtgtgtccccttgcctagcccaacagaagaattcagcagccgtaagtctaggacaggcttaaattgttttcactggtgtaaattgcagaaagatgatctaagtaatttggcatttattttaataggtttgaaaaacacatgccattttacaaataagacttatatttgtccttttgtttttcagcctaccatgagaataagagaaagaaaatgaagatcaaaagcttattcatctgtttttctttttcgttggtgtaaagccaacaccctgtctaaaaaacataaatttctttaatcattttgcctcttttctctgtgcttcaattaataaaaaatggaaagaatctaatagagtggtacagcactgttatttttcaaagatgtgttgctatcctgaaaattctgtaggttctgtggaagttccagtgttctctcttattccacttcggtagaggatttctagtttcttgtgggctaattaaataaatcattaatactcttctaagttatggattataaacattcaaaataatattttgacattatgataattctgaataaaagaacaaaaaccatggtataggtaaggaatataaaacatggcttttaccttagaaaaaacaattctaaaattcatatggaatcaaaaaagagcctgcagaaccaaagtaagactaagcaaaaagaacaaattacctgatttcaaactacactataaggccatagtcaccgaaacagcaaggtactggtataaaaataggcacacagaccaatggaatagaacagaatagagaacccagaaataaatccacatacttacagctaactgattttagacaaagaaaacaaaaacataaggtggggaaaggacaactttttcaacaaatggtgctaggataattggcaagcacatgtaggagactgaagctagatcctcatctctcaccttatacaaacatcaactcaagatggattaggaacttaaatctaaggcctaaaactataaaaattctagaagataacattgggaaaaacccttctacatataggcttaggcaaggatttcatgaccaagaacccaaaacaaatacaatgaaaacaaagataaattgctgggacttcattaaactaaagagcttttgcatggcatggcaaaagaaacagtcagctgagtaaacagacaacccacagagtgagaaaaaaatcttcacaatctatacttctgacaaaggactaatatccagactctacaatgaactcaaatcaacaagaaaaaaaaaatcccatcaaaaagtgggctaaggacatgaatagacaattctcaaaagaaaatatacaaattgaaaacaaacatgaaaaaatgctcatcatcactaataatcatggaaatgcaaatcaaaaccacactgtgataccaccttacctctgcaagaatggccataattaaaaaaataaaaaaatagtagatgttggcatggatgcaatgaacaggaaacacttctacactgatggtgggaatgtaaactggtacaattactatggaaaacagtgtgaagattcctcaaagaactgaaataaaactaccatttgattcaataatcccactactgggtatctatccagaggaaaaaaagtcattatacaaaaaagatacttgcacacgcatgtttatagcagcacaatttgcgattgcaaaaatgtgggaccaacccaaatgcccatcaatcaacgagtagataaagaaacagtatatatcactgtttctttatccactcgttgattgatatacatcatatatattgatatacatgatgatatatatacacatatatatagatatacatatatatatgtagtatttcattgtgtgtatggatatatgtatatatcaatggaatactactcagccataaaaaggaatgaattaatgacatttgcagcgacctggatgagactggagactattattctaagtgaagtaactcaggaatggaaaagcaaacgttatatgttctcacttataagtgggagctaagctatgaggatgcaaaggcataagaatgacacaatggactttggggactcataaaagactacaaacatggtacagtgtatactgctcgggtgatgggttatgggtgatgggtgcaccaaaatctcacagatcaccactaaagaatttactcatgtaactaaacacgacctcttccccaataacctatggaaattaaaaaattttaaaaaataaaatagctagtaatattacaaaacacccatatgatgcaatgttataccatcactcaatagcattttcagggccatttgtcctgtaggtgttaaatttattaaatacttattatatgccaaaatgtaaaacatggcttttctttactattcagacactataagaaattttgaggaacaaaggagatagagatgatgataagtgtggttgacagaattgggggaaaaaagtgatcttagaagaaatttaagacagtttagaataacagcactcaaagagtgtaagaagtttggagaagccttattggaagaggaattagaacacctggagaaacatacagtaagaagtgatgaaggtctactgaactgatgagctggaggagttggagggtgaatgtttcttgtaaaacactaaaatattattctgggcctctttttcctgttcccagaggtaagtcatatcatacctttgtctataaatgtacaagtctatcagacctttgtttatgaatttacaggcctcttagatctttgtctattaattcacatacttattttatccttattagtttgtgtttttaaaatttttatcaaattggtttcatactgtacatgctattccacaacttgttcttaacaacactgcttaatagtttcattttaagtgtggtgcttacgaaaggttctagtacaaagttacaaaaagtttctttctattgctggaatgttctgcgctccccaccattccactcccctgtccctaagcagcccccactttggtccgtgttgaatgtatcgaacatattttttttcacatttgttgcaatcatcacaaaagtcagagagtgctcagaaaaagagaaatggagatggtgggccctggctggtcaaaggccccagagacggacctagaaaatgttcaataaagcgctgtcactgaactggacctacacaggaccgggtctgggcaccctgtatcaatagcaatgccaccctgaccagtctcaggcaccaaagacgaacttaaaacttttggaaaaagattcccccatatatggtaacctgagctccagcttccccacttcccatggagtcgaccagaatcccagaggaactcaacagttaagcctatagagccagactcactgctctagtttcagagagtggtctggcaagctcatcactctggctagctggcttttttgtttgtttgtttttttcctgcacagtgtggaagattggtacacccgaatgtaccaatggtgcaggcacatcgatgtgcgtgcacgtgtgtgtgtgtgtgtgtgtaaaatgttgttttcatataatattggagggcacatggtatgatatcaacatgatttatcatggggatattaggattgatcacttggttaaggtggtgtttgccaggtttctctaccgtgaagttatcacttttccctttccatactctatttttggaagcaaatcatgaaatccagcccacactgaaagagagggagagggataagcttctgaaaatgggagtagctacatgtcttatttatattttcataagaaagacttgttatttaattgttcatttatgtcagtataaactcatatatattatatactttgggttataattcaatgccacattatttagttgctcaaagtatctcagctttggggcctctttttggttggctcccctatgcctttgacaggtctctatactttgttttctttctggcattgcaagctgcctcaggctcatcttatatttccctttcccagccctagaaatggccatttcttaaggaaggcctggttctctttattagagaatggttttacaaagatctgagtgctgggtattctcattgctaatgggatatcactgcttctagaccatttcagggaatggagctaagaaaggtaggtatgaatactaatattcatatcttcatttgaatacacacacacaaacataactgtaattatttctgtacgtatgtagctatctttctggttaatgatgagttcatactgatgtctctgactctaatccagaaccacaggacttattctagccttcctccttgcctctatgacagcaagaaacttctcttccactatctagcctccatctacccatttgttccacctcaggatgcatgtaaaggagtttcagagttataaacccatttctccatgaaaatcaaatttactaactagagtgcagtgtttacatacagttccttttgtctttagccatacgatttccagtcaaaacattattctccaaagtcatgtaggtcagctccatttttgcattaccatcttctgtgaagtcatgacaggtgactttgggtggctcattcacactgaacacaaaataagtttagggcactggcctttgacttgcctttgggcttgagctgtatgtgtgggccacccagcagctctttccacctaagtaggctttgcctacaatacataaaggtagcagcagtggtgacaggtatcctttacccagtgcattctctgccacaggtacccagggtggtcactccatttctctatagattccacatcaattgtcaggcagtctttgagggtgaccatgcctatctcttccaagggctttgaagaccatgggtctgcaataccagtggacccttccagtggatgtcctctcttgcctccatcgacatggttacattatgcttccctgggttggttttaaagtcctgccaaacatttcttggaggaatgtgaacactctttttgtttcaccttaggcccctcacctattcttactgttggtggttgtgtgtggaaggcaggggtgtaagtaacattaaaataggtcacattgtagaaatgctgtgatcatgtcctaagaatttaggagaaaacgtggtcgaaagatgtgttgttctctttatgttaagaaagtctgagtagtaaatttaacatgacagagatttgcatttgtgcttattatcagtgaaacacaagagtcactggaagccagaattgagggtgacgtgatggatgatgcaggatcataagtaatgatgtaaccagctttaaattaaatcaatggtaatcgagaactgtagaggcaagaagatttatttgtttcaatacgaacaacctccaaagagacattgtgtcttgagtaataacagcattgctactttttttttttgagatgggagatataaagttagcccggaatgaaatgcatttgacaataaagaacgtagttccacctcaggatggtaccaataggtaccatcagggtaccaacagggtaccaacagggtagacctgaacaggaagagatggtgcctgaacattaagaagaatcttcatgtgcaccaattggacagtaagaaactatgtcagtctggcttctatactcgttattctaaatctcaataaattaatacagtttacatgagtgcatgctggtgttgcataaatcagagggcactattaatgtaaaataaaatgcgaagggtgcctcctggaatttagcaacgtgggctatttttattactattgttaacattttagggatttggtttatgaaagggcagctgagattgtgataaggcagctattttgtgacagatgagctggatacatggaaagtacacatggaagcccatcattcctacccttccctgctgacctaacaagtctctttgctcttcttaactactttacaaagtccagacctgactacccttccaatctctttttcttcctgccttcaatgccctaatcagtttgaacttcatactattcattagcacaccatgcttttcatgcctcccttacatggattcctattatctggaatgtctttctttgtcttttttatccgtttaatccagctgaaatgttacgttctttgaggaaatttttctgaatagagctggtcatttctttcctgatggtccttgactctttgaacctgacttattacagcactcacattctttttaaaaacttcatgttaatatccacatttatattttattataataattgtagattttatatctactttaaatatatatgatctgagtcccagggcttgaatttgaacacacaaggttctgacccctgaaagctgactcatttaatggtgtcagttcattacatatctctctcttcaactagatagtgtttctcatcagaagggatcatgaattagaagtccatgtatctctcctggtacttagtgtaacctggtacatagtaagtatgcaattaaaattagatgaataaattaatttataccatgggctttaaatattctaaactacaaatcacagaatcctgacttacaataatttcctggacttccaaaatagcatatatagtatattgaattttataaatatttgaatcatgagaatttgtgctttaagaaaataaccatgattcattttatttttcaactttgaataataacaatttctccacattaagaagtatcaagaactgcgtgtccgaaggtggcagacatagtaatgtctcatatggtggtgtcacttttgtatcactttaattggtttagaattatccaaattatctctctcgtgtgagtaactgatgaataaatacatgaatacatggatggcaccaaaaaaagaactttggcattttgatatttatcttttggggaaggtagaatcttctgaccagtgaaatattttatgttaataaaatgttatgtgtgatggttgatgtacagggggagtaatagtcatttgcccattttacttaattcatgtgtatgctgtgtaatttcttcaacactagagtgtgaagcagttacttggacaatatctgaaaaatactgcatacaaatgaacaaattacttttccatatttactctctatctccattcacgtctcactcagttctttttgttgcaaaaatctttattcatttggtcaattgatatctgtgccctggagactggtttcttaaaaccccagcaaagagtctcaagggaagaattgaaataaggagctatttgaaataagaattgaaataaggggtgttgtaaataccaaatagaggaagtccatcctgtttgtgtggggagaggtcctcatctacctcaggtggagtaatttggttggtgacttgaagagccatccagatgagtattaggagtcataaatatcttcaagtgatggaagaggacgcctgcaaggcagacacatgctcccaagcttccaatgaggttatcccatgtctttgggcttggcactgggacattagagcagaggctacaaaggagcagagcacagagtttagctccaatggctgccaagaagactacgtgccaaaattaggatgcttctgcactataggaaagatgatctcttggttttaaaaactgtaatagaaaaaaaattgtagaacaccacaaacaacacccaaatactagctctacttattctttccactgcctgaaggattggctcttctatactcagaacagtcttggatgacacagctggcctccctaactttgtgatggggcagacaacagatgccatgtttggacaatactgactcagtgcaaagatgaccaggaggcattgggaatggcaatggagatttcttctgacctagcttctgactttttttaatgacagaaattgtgaggccacagtaaaatccactcacaaatttcttacatcccgcagaatacaagagagcacatatgttcttattcttttttaggaacatcaaaaataagagcatttctctaaataaaacagagcttgtttagaaataggtagtctatcttctgggaagtggcatgacttgcttaagaataataaataataattctagtttttattctatatattttctatgataagaatatatattgacaattctctctctctctctctttccctgtgtgtgtgtgtgtgtgtgtgtgtgtgtgtgtgtgtcttagtcttctcaagctgtcaaaacaaaataccatagcctgggtgacttaaacaacagaatttattttctcatagttctggaggctagaaagtttatgatcaagattctggcaaagtttagtttctggtgagggctctgttccaggcctatagttgaccaccttcttgctacgtccttatatggcagagaaagcaagcaagctctttgacattataggggtagcaatctcatcatgaggctcctgcttgcatgatctcatcgaaccctaattacctcctaaagactccatctccaagtgtcatcacattgggggttaggacttcaacatatgaatttgctaaggggaagagagagacacaaacatctagtccataacagacagtgaaatctcttgactaagtaaggaattttttctgaaacttctataacaatgagccatcactgaaccttgtgaaatgctatagtttaaatgcatgtgttgctccaaaattcacaagtaagaacataatatccagtgtgatagcaataagagatagagccttttgggacgtgattaatccaccctcatggttgcattaatgctcttataaaagaagctgaagggtgccctagtgcccttttggcattccctttcttctgacttgtggggacacctaaatgagaaacagtcctcacccggcacagaacctgttggtgccttaatcttggacttcctggtctctggaactgtgagaaaaacatttctgttgttttcaacttacccagtttcaagtgttttgttatggtatcacaaatgatctaatggactaagacattaagaaaagggagtattagtattcagcaatgatgctgatgatggcagatggccatggacaccctttgttatttctaataccctgtcattgctatagaagctgggaagagaaggagtccatatgaaaaagtcattacaaaaaaagatttaggaagtgttattttctgtgcaagttattgttctaggagatgctttaaaagtgtttttctctcaagcagttgacagtctctttgagcatgtggaccagttctgctgttttaaggagctatgcccagcctagcataggcaaccaacttacagaataagaaatgctgttaatggaacatagatttttgtaaaatgtattttcagttggcccttgacttactttgctctatctctgcatgacccgtattgatgtcttagttcaccttgctgaccttgaggcacttctatccttttaagtttggcaggcaagattggttgcctaatctgactgactcctttgaatttgttcccgtgtgggagggagaaaaaaatgtattttttttccctttacaaaccagggacaagatccctttgatgaagtgaaatagtcttctttttttaagcaaatactttatttataagtataatagcttttggggggcagcaaatgggaaaggtgaagtcttgtactctagagcatgattcaaatagataggctcaaattaaacaaatggagggatagtttgttctgcctaaaagcagtaataggaggggaatctagaagctgggtctggatgggaagacattaagaaaggagagggagagagagcaagcaagaaggaggtcggtcagggctctacaagaagagagtcaggtggtattgatacgagtggaaaagatctttttatgttttatgcctagttccttgatacaaacttgtggtggggggttcttgaaaaagtgattggggactatctgatctggggtttagggcagggaagaaacagcatgtaaaggagaaaagacagagcatttgttaaagagaatttaacagcaagaggaaataagaaccaatgataccaaggataaacgcagtccttaactcccctatcactgaattcttagaaatatgggggtaggggtggtggtggtaattctgttttctccccataggtgagataagcattgggttaaatgtgctttctctctctccctctcctttcttaagaattaagggacagactatgggctggaggactttgaggatgtctgtctcataacacttgggttgtatctgttctatggggcttgttttaagcttggcaacttgcaacagggttcactgactttctccccaggcccaaggtactgtcctcttttcatatctgttttggggcctctggggcttgaatatctgagaaaatataaacatttcaataatgttctgtggtgagatgagtatgagagatgtgtcattcatttgtatcaatgaatgaatgaggacaattagtgtataaatccttagtacaacaatctgagggtaggggtggtactattcaatttctatttataaagatacttatttctatttatttatgcttgtgacaaatgttttgttcgggaccacaggaatcacaaagatgagtctttgaatttaagaagttaatggtccaggaataattacatagcttacaaatgactatgatataccatcaaacaagaggttccatgagaaaataatctgaaaggtttaataagttgtcaaaggtgagagggctcttctctagctagagactaatcagaaatacattcagggataattatttgaatagaccttaagggttgggtacattttgttcaagcattgatggagaaggagagtgaatatttgaaaacattttcaactaaccaaccacccaatccaacaaacaaaaaatgaaaagaatctcagaaacagtgagataagagaaggaattttctcacaacccacacgtatagctcaactgctctgaagaagtatatatctaatatttaacactaacatcatgctaataatgataataattactgtcattttttaatgtctataagtaccaggcatttagaagatattattccatttatatatcaaaataaacttgaggggatagatcattttcatgatatatgagaaaaattaaaaatcagattgaattatttgcctgtcatacagctaataattgaccataagacaattagatttaaattagttttgaatctttctaataccaaagttcagtttactgttccatgttgcttctgagtggcttcacagacttatgaaaaagtaaacggaatcagaattacatcaatgcaaaagcattgctgtgaactctgtacttaggactaaactttgagcaataacacatatagattgaggattgtttgctgttagtatacaaactctggttcaaagctcctctttattgcttgtcttggaaaatttgctgttcttcatggtttctcttttcactgctatctatttttctcaaccactcacatggctacaataactgtctgcaagcttatgattcccaaatatctatctctagcctcaatcttgttccagaagataaaaagtagtattcaaatgcacatcaacgtctccacttggagggcttaaagacgtttcaacatacaaaccggggagttttgcctggaatgtttcctaaaatgtgtcctgtagcacatagggtcctcttgttccttaaaatctaattacttttagcccagtgctcatcccacctatggggagatgagagtgaaaagggagcctgattaataattacactaagtcaataggcatagagccaggactgtttgggtaaactggtcactttatcttaaactaaatatatccaaaactgaacatgtacttagttactaagtctttgactttatctcattcataccactcagctttatccaggccacttatttgacagtattattgcgaaaacttcctaactggtctccttatcatagtcttatccccttttgaaacaaaagagacagtttcaaaatacaaatatgatttttattagctcccttttgttgtctataatagtcccagaaggagttataaactccatttaaaaagtctttgagatgtggcccttgccaactttgccaggaattcccaatatctagtattttctactattaaactttgtgcctcttcaaaactgcattttctctcattccctaagtgtgcattgttttcccttaccggttggtttttccaccaccttttacattttcctggaacactataccctccctcttcatttggcccacctctaattttctttcagatctccatgaagatgttacttcctccaggaagccttatctgacccctccaaagatgtcatgagttcctcttttcattctactaatcacagcatccatcacaccatgttgtgattactgatactattgtctgtttctctgat

SEQ ID NO: 22 - DNA, 41158 bp, Homo sapiens
atcagagaaacagacaatagtatcagtaatcacaacatggtgtgatggatgctgtgattagtagaatgaaaagaggaactcatgacatctttggaggggtcagataaggcttcctggaggaagtaacatcttcatggagatctgaaagaaaattagaggtgggccaaatgaagagggagggtatagtgttccaggaaaatgtaaaaggtggtggaaaaaccaaccggtaagggaaaacaatgcacacttagggaatgagagaaaatgcagttttgaagaggcacaaagtttaatagtagaaaatactagatattgggaattcctggcaaagttggcaagggccacatctcaaagactttttaaatggagtttataactccttctgggactattatagacaacaaaagggagctaataaaaatcatatttgtattttgaaactgtctcttttgtttcaaaaggggataagactatgataaggagaccagttaggaagttttcgcaataatactgtcaaataagtggcctggataaagctgagtggtatgaatgagataaagtcaaagacttagtaactaagtacatgttcagttttggatatatttagtttaagataaagtgaccagtttacccaaacagtcctggctctatgcctattgacttagtgtaattattaatcaggctcccttttcactctcatctccccataggtgggatgagcactgggctaaaagtaattagattttaaggaacaagaggaccctatgtgctacaggacacattttaggaaacattccaggcaaaactccccggtttgtatgttgaaacgtctttaagccctccaagtggagacgttgatgtgcatttgaatactactttttatcttctggaacaagattgaggctagagatagatatttgggaatcataagcttgcagacagttattgtagccatgtgagtggttgagaaaaatagatagcagtgaaaagagaaaccatgaagaacagcaaattttccaagacaagcaataaagaggagctttgaaccagagtttgtatactaacagcaaacaatcctcaatctatatgtgttattgctcaaagtttagtcctaagtacagagttcacagcaatgcttttgcattgatgtaattctgattccgtttactttttcataagtctgtgaagccactcagaagcaacatggaacagtaaactgaactttggtattagaaagattcaaaactaatttaaatctaattgtcttatggtcaattattagctgtatgacaggcaaataattcaatctgatttttaatttttctcatatatcatgaaaatgatctatcccctcaagtttattttgatatataaatggaataatatcttctaaatgcctggtacttatagacattaaaaaatgacagtaattattatcattattagcatgatgttagtgttaaatattagatatatacttcttcagagcagttgagctatacgtgtgggttgtgagaaaattccttctcttatctcactgtttctgagattcttttcattttttgtttgttggattgggtggttggttagttgaaaatgttttcaaatattcactctccttctccatcaatgcttgaacaaaatgtacccaacccttaaggtctattcaaataattatccctgaatgtatttctgattagtctctagctagagaagagccctctcacctttgacaacttattaaacctttcagattattttctcatggaacctcttgtttgatggtatatcatagtcatttgtaagctatgtaattattcctggaccattaacttcttaaattcaaagactcatctttgtgattcctgtggtcccgaacaaaacatttgtcacaagcataaataaatagaaataagtatctttataaatagaaattgaatagtaccacccctaccctcagattgttgtactaaggatttatacactaattgtcctcattcattcattgatacaaatgaatgacacatctctcatactcatctcaccacagaacattattgaaatgtttatattttctcagatattcaagccccagaggccccaaaacagatatgaaaagaggacagtaccttgggcctggggagaaagtcagtgaaccctgttgcaagttgccaagcttaaaacaagccccatagaacagatacaacccaagtgttatgagacagacatcctcaaagtcctccagcccatagtctgtcccttaattcttaagaaaggagagggagagagagaaagcacatttaacccaatgcttatctcacctatggggagaaaacagaattaccaccaccacccctacccccatatttctaagaattcagtgataggggagttaaggactgcgtttatccttggtatcattggttcttatttcctcttgctgttaaattctctttaacaaatgctctgtcttttctcctttacatgctgtttcttccctgccctaaaccccagatcagatagtccccaatcactttttcaagaaccccccaccacaagtttgtatcaaggaactaggcataaaacataaaaagatcttttccactcgtatcaataccacctgactctcttcttgtagagccctgaccgacctccttcttgcttgctctctctccctctcctttcttaatgtcttcccatccagacccagcttctagattcccctcctattactgcttttaggcagaacaaactatccctccatttgtttaatttgagcctatctatttgaatcatgctctagagtacaagacttcacctttcccatttgctgccccccaaaagctattatacttataaataaagtatttgcttaaaaaaagaagactatttcacttcatcaaagggatcttgtccctggtttgtaaagggaaaaaaaatacatttttttctccctcccacacgggaacaaattcaaaggagtcagtcagattaggcaaccaatcttgcctgccaaacttaaaaggatagaagtgcctcaaggtcagcaaggtgaactaagacatcaatacgggtcatgcagagatagagcaaagtaagtcaagggccaactgaaaatacattttacaaaaatctatgttccattaacagcatttcttattctgtaagttggttgcctatgctaggctgggcatagctccttaaaacagcagaactggtccacatgctcaaagagactgtcaactgcttgagagaaaaacacttttaaagcatctcctagaacaataacttgcacagaaaataacacttcctaaatctttttttgtaatgactttttcatatggactccttctcttcccagcttctatagcaatgacagggtattagaaataacaaagggtgtccatggccatctgccatcatcagcatcattgctgaatactaatactcccttttcttaatgtcttagtccattagatcatttgtgataccataacaaaacacttgaaactgggtaagttgaaaacaacagaaatgtttttctcacagttccagagaccaggaagtccaagattaaggcaccaacaggttctgtgccgggtgaggactgtttctcatttaggtgtccccacaagtcagaagaaagggaatgccaaaagggcactagggcacccttcagcttcttttataagagcattaatgcaaccatgagggtggattaatcacgtcccaaaaggctctatctcttattgctatcacactggatattatgttcttacttgtgaattttggagcaacacatgcatttaaactatagcatttcacaaggttcagtgatggctcattgttatagaagtttcagaaaaaattccttacttagtcaagagatttcactgtctgttatggactagatgtttgtgtctctctcttccccttagcaaattcatatgttgaagtcctaacccccaatgtgatgacacttggagatggagtctttaggaggtaattagggttcgatgagatcatgcaagcaggagcctcatgatgagattgctacccctataatgtcaaagagcttgcttgctttctctgccatataaggacgtagcaagaaggtggtcaactataggcctggaacagagccctcaccagaaactaaactttgccagaatcttgatcataaactttctagcctccagaactatgagaaaataaattctgttgtttaagtcacccaggctatggtattttgttttgacagcttgagaagactaagacacacacacacacacacacacacacacacacacacagggaaagagagagagagagagaattgtcaatatatattcttatcatagaaaatatatagaataaaaactagaattattatttattattcttaagcaagtcatgccacttcccagaagatagactacctatttctaaacaagctctgttttatttagagaaatgctcttatttttgatgttcctaaaaaagaataagaacatatgtgctctcttgtattctgcgggatgtaagaaatttgtgagtggattttactgtggcctcacaatttctgtcattaaaaaaagtcagaagctaggtcagaagaaatctccattgccattcccaatgcctcctggtcatctttgcactgagtcagtattgtccaaacatggcatctgttgtctgccccatcacaaagttagggaggccagctgtgtcatccaagactgttctgagtatagaagagccaatccttcaggcagtggaaagaataagtagagctagtatttgggtgttgtttgtggtgttctacaattttttttctattacagtttttaaaaccaagagatcatctttcctatagtgcagaagcatcctaattttggcacgtagtcttcttggcagccattggagctaaactctgtgctctgctcctttgtagcctctgctctaatgtcccagtgccaagcccaaagacatgggataacctcattggaagcttgggagcatgtgtctgccttgcaggcgtcctcttccatcacttgaagatatttatgactcctaatactcatctggatggctcttcaagtcaccaaccaaattactccacctgaggtagatgaggacctctccccacacaaacaggatggacttcctctatttggtatttacaacaccccttatttcaattcttatttcaaatagctccttatttcaattcttcccttgagactctttgctggggttttaagaaaccagtctccagggcacagatatcaattgaccaaatgaataaagatttttgcaacaaaaagaactgagtgagacgtgaatggagatagagagtaaatatggaaaagtaatttgttcatttgtatgcagtatttttcagatattgtccaagtaactgcttcacactctagtgttgaagaaattacacagcatacacatgaattaagtaaaatgggcaaatgactattactccccctgtacatcaaccatcacacataacattttattaacataaaatatttcactggtcagaagattctaccttccccaaaagataaatatcaaaatgccaaagttctttttttggtgccatccatgtattcatgtatttattcatcagttactcacacgagagagataatttggataattctaaaccaattaaagtgatacaaaagtgacaccaccatatgagacattactatgtctgccaccttcggacacgcagttcttgatacttcttaatgtggagaaattgttattattcaaagttgaaaaataaaatgaatcatggttattttcttaaagcacaaattctcatgattcaaatatttataaaattcaatatactatatatgctattttggaagtccaggaaattattgtaagtcaggattctgtgatttgtagtttagaatatttaaagcccatggtataaattaatttattcatctaattttaattgcatacttactatgtaccaggttacactaagtaccaggagagatacatggacttctaattcatgatcccttctgatgagaaacactatctagttgaagagagagatatgtaatgaactgacaccattaaatgagtcagctttcaggggtcagaaccttgtgtgttcaaattcaagccctgggactcagatcatatatatttaaagtagatataaaatctacaattattataataaaatataaatgtggatattaacatgaagtttttaaaaagaatgtgagtgctgtaataagtcaggttcaaagagtcaaggaccatcaggaaagaaatgaccagctctattcagaaaaatttcctcaaagaacgtaacatttcagctggattaaacggataaaaaagacaaagaaagacattccagataataggaatccatgtaagggaggcatgaaaagcatggtgtgctaatgaatagtatgaagttcaaactgattagggcattgaaggcaggaagaaaaagagattggaagggtagtcaggtctggactttgtaaagtagttaagaagagcaaagagacttgttaggtcagcagggaagggtaggaatgatgggcttccatgtgtactttccatgtatccagctcatctgtcacaaaatagctgccttatcacaatctcagctgccctttcataaaccaaatccctaaaatgttaacaatagtaataaaaatagcccacgttgctaaattccaggaggcacccttcgcattttattttacattaatagtgccctctgatttatgcaacaccagcatgcactcatgtaaactgtattaatttattgagatttagaataacgagtatagaagccagactgacatagtttcttactgtccaattggtgcacatgaagattcttcttaatgttcaggcaccatctcttcctgttcaggtctaccctgttggtaccctgttggtaccctgatggtacctattggtaccatcctgaggtggaactacgttctttattgtcaaatgcatttcattccgggctaactttatatctcccatctcaaaaaaaaaaagtagcaatgctgttattactcaagacacaatgtctctttggaggttgttcgtattgaaacaaataaatcttcttgcctctacagttctcgattaccattgatttaatttaaagctggttacatcattacttatgatcctgcatcatccatcacgtcaccctcaattctggcttccagtgactcttgtgtttcactgataataagcacaaatgcaaatctctgtcatgttaaatttactactcagactttcttaacataaagagaacaacacatctttcgaccacgttttctcctaaattcttaggacatgatcacagcatttctacaatgtgacctattttaatgttacttacacccctgccttccacacacaaccaccaacagtaagaataggtgaggggcctaaggtgaaacaaaaagagtgttcacattcctccaagaaatgtttggcaggactttaaaaccaacccagggaagcataatgtaaccatgtcgatggaggcaagagaggacatccactggaagggtccactggtattgcagacccatggtcttcaaagcccttggaagagataggcatggtcaccctcaaagactgcctgacaattgatgtggaatctatagagaaatggagtgaccaccctgggtacctgtggcagagaatgcactgggtaaaggatacctgtcaccactgctgctacctttatgtattgtaggcaaagcctacttaggtggaaagagctgctgggtggcccacacatacagctcaagcccaaaggcaagtcaaaggccagtgccctaaacttattttgtgttcagtgtgaatgagccacccaaagtcacctgtcatgacttcacagaagatggtaatgcaaaaatggagctgacctacatgactttggagaataatgttttgactggaaatcgtatggctaaagacaaaaggaactgtatgtaaacactgcactctagttagtaaatttgattttcatggagaaatgggtttataactctgaaactcctttacatgcatcctgaggtggaacaaatgggtagatggaggctagatagtggaagagaagtttcttgctgtcatagaggcaaggaggaaggctagaataagtcctgtggttctggattagagtcagagacatcagtatgaactcatcattaaccagaaagatagctacatacgtacagaaataattacagttatgtttgtgtgtgtgtattcaaatgaagatatgaatattagtattcatacctacctttcttagctccattccctgaaatggtctagaagcagtgatatcccattagcaatgagaatacccagcactcagatctttgtaaaaccattctctaataaagagaaccaggccttccttaagaaatggccatttctagggctgggaaagggaaatataagatgagcctgaggcagcttgcaatgccagaaagaaaacaaagtatagagacctgtcaaaggcataggggagccaaccaaaaagaggccccaaagctgagatactttgagcaactaaataatgtggcattgaattataacccaaagtatataatatatatgagtttatactgacataaatgaacaattaaataacaagtctttcttatgaaaatataaataagacatgtagctactcccattttcagaagcttatccctctccctctctttcagtgtgggctggatttcatgatttgcttccaaaaatagagtatggaaagggaaaagtgataacttcacggtagagaaacctggcaaacaccaccttaaccaagtgatcaatcctaatatccccatgataaatcatgttgatatcataccatgtgccctccaatattatatgaaaacaacattttacacacacacacacacacacgtgcacgcacatcgatgtgcctgcaccattggtacattcgggtgtaccaatcttccacactgtgcaggaaaaaaacaaacaaacaaaaaagccagctagccagagtgatgagcttgccagaccactctctgaaactagagcagtgagtctggctctataggcttaactgttgagttcctctgggattctggtcgactccatgggaagtggggaagctggagctcaggttaccatatatgggggaatctttttccaaaagttttaagttcgtctttggtgcctgagactggtcagggtggcattgctattgatacagggtgcccagacccggtcctgtgtaggtccagttcagtgacagcgctttattgaacattttctaggtccgtctctggggcctttgaccagccagggcccaccatctccatttctctttttctgagcactctctgacttttgtgatgattgcaacaaatgtgaaaaaaaatatgttcgatacattcaacacggaccaaagtgggggctgcttagggacaggggagtggaatggtggggagcgcagaacattccagcaatagaaagaaactttttgtaactttgtactagaacctttcgtaagcaccacacttaaaatgaaactattaagcagtgttgttaagaacaagttgtggaatagcatgtacagtatgaaaccaatttgataaaaattttaaaaacacaaactaataaggataaaataagtatgtgaattaatagacaaagatctaagaggcctgtaaattcataaacaaaggtctgatagacttgtacatttatagacaaaggtatgatatgacttacctctgggaacaggaaaaagaggcccagaataatattttagtgttttacaagaaacattcaccctccaactcctccagctcatcagttcagtagaccttcatcacttcttactgtatgtttctccaggtgttctaattcctcttccaataaggcttctccaaacttcttacactctttgagtgctgttattctaaactgtcttaaatttcttctaagatcacttttttcccccaattctgtcaaccacacttatcatcatctctatctcctttgttcctcaaaatttcttatagtgtctgaatagtaaagaaaagccatgttttacattttggcatataataagtatttaataaatttaacacctacaggacaaatggccctgaaaatgctattgagtgatggtataacattgcatcatatgggtgttttgtaatattactagctattttattttttaaaattttttaatttccataggttattggggaagaggtcgtgtttagttacatgagtaaattctttagtggtgatctgtgagattttggtgcacccatcacccataacccatcacccgagcagtatacactgtaccatgtttgtagtcttttatgagtccccaaagtccattgtgtcattcttatgcctttgcatcctcatagcttagctcccacttataagtgagaacatataacgtttgcttttccattcctgagttacttcacttagaataatagtctccagtctcatccaggtcgctgcaaatgtcattaattcattcctttttatggctgagtagtattccattgatatatacatatatccatacacacaatgaaatactacatatatatatgtatatctatatatatgtgtatatatatcatcatgtatatcaatatatatgatgtatatcaatcaacgagtggataaagaaacagtgatatatactgtttctttatctactcgttgattgatgggcatttgggttggtcccacatttttgcaatcgcaaattgtgctgctataaacatgcgtgtgcaagtatcttttttgtataatgactttttttcctctggatagatacccagtagtgggattattgaatcaaatggtagttttatttcagttctttgaggaatcttcacactgttttccatagtaattgtaccagtttacattcccaccatcagtgtagaagtgtttcctgttcattgcatccatgccaacatctactatttttttatttttttaattatggccattcttgcagaggtaaggtggtatcacagtgtggttttgatttgcatttccatgattattagtgatgatgagcattttttcatgtttgttttcaatttgtatattttcttttgagaattgtctattcatgtccttagcccactttttgatgggattttttttttcttgttgatttgagttcattgtagagtctggatattagtcctttgtcagaagtatagattgtgaagatttttttctcactctgtgggttgtctgtttactcagctgactgtttcttttgccatgccatgcaaaagctctttagtttaatgaagtcccagcaatttatctttgttttcattgtatttgttttgggttcttggtcatgaaatccttgcctaagcctatatgtagaagggtttttcccaatgttatcttctagaatttttatagttttaggccttagatttaagttcctaatccatcttgagttgatgtttgtataaggtgagagatgaggatctagcttcagtctcctacatgtgcttgccaattatcctagcaccatttgttgaaaaagttgtcctttccccaccttatgtttttgttttctttgtctaaaatcagttagctgtaagtatgtggatttatttctgggttctctattctgttctattccattggtctgtgtgcctatttttataccagtaccttgctgtttcggtgactatggccttatagtgtagtttgaaatcaggtaatttgttctttttgcttagtcttactttggttctgcaggctcttttttgattccatatgaattttagaattgttttttctaaggtaaaagccatgttttatattccttacctataccatggtttttgttcttttattcagaattatcataatgtcaaaatattattttgaatgtttataatccataacttagaagagtattaatgatttatttaattagcccacaagaaactagaaatcctctaccgaagtggaataagagagaacactggaacttccacagaacctacagaattttcaggatagcaacacatctttgaaaaataacagtgctgtaccactctattagattctttccattttttattaattgaagcacagagaaaagaggcaaaatgattaaagaaatttatgttttttagacagggtgttggctttacaccaacgaaaaagaaaaacagatgaataagcttttgatcttcattttctttctcttattctcatggtaggctgaaaaacaaaaggacaaatataagtcttatttgtaaaatggcatgtgtttttcaaacctattaaaataaatgccaaattacttagatcatctttctgcaatttacaccagtgaaaacaatttaagcctgtcctagacttacggctgctgaattcttctgttgggctaggcaaggggacacaccaataaatgttgtcataagaagataagtcctattaaagctcagcatgttgacaaattggaaatgtaatagcagattcttcactataaagttcacagaaggtagatccatcatattctccaatggaaaggatgagttgaactattaggttgaaccatgtgaaatcactgatattcaactgtttttgccctataaagcactctttcatgtggttcagcctaattcccagagtattccactgctgagccatcacttacttggatggctctgtgtaccgcatcatataagtcagaacaggacaatgggcaacactgaaactttggtttcaattttgaattttgaccctttggaaaattacttaatctatgctttgatgtttatcttcattttctcatctacaaaatagaaataatagtggttcccaactcagcaactattttgagaattttaaaagctaatatttacatacataaatagtttagaatagtggtcggtgctggtctatatggctcttggaaatggtcaatctttgctattttaataataactattatagttacttttttaaaaaattcaaaatatagttacctgagatgcttttaaatgtgatgttataagcctaaggcagcttgacttgcagcaacaagttttttaccctgaacacaaagacatgacagatgttaggaaaatattagcattactattaggatacaaaattaacatttatgaagctattgatgattgcaaagtgatttcacgtgcatcatatcctttaattacaatttactactataatctctggacggaagctcacggacatagttgtccccaaatgaataaaaaaaagttactgtcaggccataaagggcaattttaagtgatttagacatttgaatgtaaattctcccactagcctataaaatcaactaaatcacaaaccaccacatttcaagtaaatgtttaaataaattaatgttttgatttcatgatcaaaatatttcaggccttacaaatattcctattaatattcataagcatcacaaatttggaaacagaacaggcattataaacatttaacagtatggcacaatagagcaggagataaaaacaaagtgctgttttattcattttgtaagacaattgtttgtaaaataagatccctgtcccacatgtacaaagcctcctttgatatataaatccctaagccctagcctaaccaaacatgcaaaaatgaatactggacatattaaaatgaagagaactgtagtacctcctcggcaaagcaggtctccttatcgtcagccttgcagcacttctctacaaaagctgcgaaatcatccataacagctttcagttgctcttttgttgccttgggcttgtgtttcacgagctcaacaagtgcactgagtttgaatggaaaaagaaaaaaaaaaaacagaaaaaacattactcacgtatagaaaaatggagagagtaaggatggtagtcccatcatttaagattataaatcttggagccaggcaactctgagtactttggggctcaggcataccgctataagtctcaatattctcatctgcatgatgaggataataaaatccactttcatggagttggtgggaagaccaactgaaacaatcagtataaaccactcatcacgttatgtagtgtcaacaaatttcttttcagtaaatctctgaaaagaagtatgtcattgcaattatatattattcagattttggaagtgccatattatgtcatattgagttttattgctattaaagagctaaaaatgatccttaaaaatttaattatcttggactttatttaaaatttttctcatctataaagatgagaaactttatatttggttcttaaactttgctcccttcaaagctaatagtggggaggctatagaaaataaggctatccaaactcatgggagctgctggttctctttcactgacatctgcaaagacaacaatgccagggagagatttgtgtgggcatgacaggttttgcaatattactcttaagcctagacgatgattacagcccacaagagatgacagcaactttctatagctaaattttatgcaattataacccctgtgatagcaatagggagttgagcttcagggcttgcatttctacatgttttttatccaagtctcattctcaaaagtcacatcttgggggtttgtctcatgtgtggggccaccatagggcaaacttaaaataattatttacatctagaaataaattctcctatggttcccattaactaatttgccatgtgcacaaatttatcagttaattgttcatctttttctactgaatatggcctaacatgttattctattgtggctttaatccacaatattactctgaataattttagcaatattataacagaggattttgtctttaaaaagttattcattttattctgggtactcttatcagcataataagggcaacactccaatactttcctctaagaaatataatcactacttcaggaaaaagttgctagcttgaattgacagttcttgctatcaagactacaaacacatgcagtaatgaaatactcctcacgtttgtttcttgatttgtctctccttctcagaaagtgtgcatatatctgcatggaaggtgaatgtttcagcattaaactctttgggaacgtatgtttcatcgacttccagagctgaaaagcatggtcgcctgttcaccaaggattctgtgcagcatttggtgactctgtcacttactggcgttttctcatgcaacacacataactggttcaggaccacggatagctaaagaacaggcaggagagcagaaattcaaaagaggtgaagctgaaaattttctactaaaaatacaaaaaattagccaggcatggtggcatgcacctgtagtcccagctacttgggaggctgaggcaggagaatggcttgaacctgggaggcggaggttgcagtgagccgagatggcaccactgcactccagcctggacaacaaagcgagactccgtctcaaaaaaaaaaaaaaaattatcatcctcggggccttgactgccaatatcacacatacacacacgtgcatgcacacacacatgcacacaaacatgcacacacacacattacttccttctgcttatgaaagctagcattatcaatatctaaaggtaaaattttttcattattaatttattatatttttttaaagactcacatagtcttctgcacagggcattctttttgcttcaggatgtttacaacatttgctgcccacttttcctaggtttcttgagacctctacaagagttggagttgacacttggggtactttcttggtgtaacgaactaatagcctgaaaaaaagaagtcatgtgttttcagcaaggcaagaaactgtctaacatagtagataaaacagagaacacttggccggaatcaactaagatgttgctatgttccattcatcatattatctccatctgcagagtagtgggttagtggagggtagaaaacattctcctgaacaactagttaaacttggctttgagttccacctgtaccacttgcataatcttgggaaagtgagttgcctaattcagtgacattaataaatttattaatttcttctttcaataaaacctggagagagcttcatatgtatcagcatatgctaaacttgaaagatacaagtagaaaatggaaggaaatatatctgactcaatagggatagttcaagggttaaattaaaagtagtaaagtattataattaatctgacatggtacctaatatataataatcatgtattaagaatgccagtcaccattaaaagtcaatgtatgactttaatctactcgaggaaagaaactatgtcttgttcactgttattatctctaaaatccataatcagaagagcaccatgtgtatgagccacacaataaatatctactgtataatatgtctcttcttgtttttaaccttcatagataagactctattgaattgggacattagtccagcaagccattctgtctctgtctcttctatggagggaaaggtttaaccatcaaagactaggtgcatctcccaaacaacctgaatttaatattcaaatatgtatctaaattcatttgttacatttttgtgttcagcttacatattactttttgagcgacatctattcaaggcctactacttgctgctctacaaaatattgccatgctctatttgcccattaactatttcttaaccttcaagggacatgctcagttctgatataccaagatttggtatttaccctcccagcctacatacttccaatcttaagagaacaatttttagactacattcaaatatagacctctccaccccatcaactattttatctctcctctcctatctttcttgacaaagagtgattagaaatatgcaatgtattttcattcttaaaagttctatgctaggtggctcatatattaagtcttaaataattacaaattgataaaaaaaatcagtcaataaaaattacttacgcattctggaatttgtactctccaagctgctcaaaaagctcacaattttgtttgattaaattctgaggctcttccacaagaggtttaaattcatcgaactgaaacataaaagaattgtgttaatagtattatgcctcaggatcagatgcaggttgtttttcacccctctggtcagaatgatatcctttcttcttcctactcaaagccacatgaatagatgaatatcaatgccgctctgtcacaatacattcgaactatttatttggtgagcttgcatcatgtaagtggttaagaatattcaggctctggagttcaatgaccagtatttgagccaagtcatgtaactcattcttcagttgtgcaattttacttaccatctccacatttcagaatccttatccctaaaataggggcaaagatggcactcatctcatagagctgctctgtaaaccaggtaagctaatgaaattaaacagtgccttgcatataataaaagtttaataaatgatggctatgattgtacatattattattattagttcacctttccagttagattccaggctctccaaaatgagagattttacgttggtcattgtttgtgcatggtgcctggcatacagtagcttcttgaaagcaggaaaaatgagttttctctgattctgaatagttcagaaaccattacatatgctagtgggaaccctaaaaatcctccagaacagatttcctctcctaacttaatttcttgtaaaactattcctaaacatcctcaaaaagatttgaaaatattctaaagggataggttctataatttgccataagatactaattctagtacttgattaatcctggaatcaggttaactcactttacatctaagttaaatatcttctaattaacatttaaatttaatttttttttgttctcaggattgtgaaaaagagaaaaaaagatcaaaattttttagagattgctctattcagatctttctattctaactagtctaaattttgttaatcattctaaggctactttttctttcatgtttaagattccagaattgaaaccatctcaagaaaagatctaaattgcactgtatatcattttacattcttgcattatttttctttctcattattggaatcatcagtcaaagaactacatttttttccaacaataaacctaccactttggcatagcattcatgaggatctgcagcggcacagcacttctctagagtggtttcatatgtcttggcaagtctcagcagcagcacgacagagtaatcaggatgccttcttgcatattcatacaaaaacctaattaagatgaaaataaaatagactttgttggacaaatgagcacaaaaaatatcacaaagctaatctcaaaagtaactcatattccaaaagtcttaatttgactaaaccccatgcagtaaagcttagtagctaaggacttggggtccagagttaaagttaccaaggctcaattcctagctctgctacttatatcactgcatcaccttaggcaacttatttaaatgatcagagccttagtctccttctcggtagaatggaaataataatagtatctgtcggctgggcacagtggctcatgcctgtaatcccagcactttaggaggctgaggcaggcatatcaccagaggtcaggagtttgagaccagtctgaccaacatggtgaaaccccatctctactaaaaatacaaaattagccaggcatggtggtgcatgcctgtaatcccaggaggctgaggcaggagaatcgcttgaacctgggaggcggaggttgtggtgagccgagatggcaccattgcactccagcctgggcaacaagagtaaaactctgtctcaaaaaataaatagtatctgtctcggaaggtggattatgagaactatatgacataatctacacaaagcacacactgcttggcacatatgaagtctttgatgaatgatacttgttatttttattaacattttgtttgatttaaactacatctcaaaaggattctgataaatagatgggcagagatatgttcttaaaatattctctttcttctctgtatgagtgaaatcttgtagggtacataattttaggaaatattatttagtgcattatcataatccaacaacaaaaatgcagtttatcaccacaacttctgacaatatgtaaacatttattttgtaattgagttgcctaccatattgccattatactgaacttctggtcttttcaccaaatataaagcacctggtgtcagactctatatttctttttatacttctttgctatcattgcatagattagatagatagactagattagattagattagttagatagacaggcaatacatagtcacacacatatattatagatgttcaagaaatacacttggaatgaatgactgaagtatacataatttatatatacacaaaatgtttctagacgtattttcagaaatacccctaaggagtaaggaatgttgagctttgccatgaacatgtattattttatgacaatgtattcaactaattaactatttcaaaaattgttaaagcctgggaaagggaaggatgaagaaacattctgggcagcagggaaattgtagcaactccacagaaaagcctaggctatcctcctaagttgtgaggtcatgccaaagctataaaagaataatttcttatctacttacatgcccaggaagacatcctttgcctcagcatagtttttgcaaacatccttactttcaacaaaatcagcagctaatgaaggcaagtcagcaggcatctcatcattttccacttcggcaatgcagtgggatttttccaacagaggtttttcacagcattccttcagtttactggagatcgaatcttgattttcacagatatacttggcaaggtccgcctataagtaagttggtggaaattgttcaacacgaattgacattgctacactttctcctcagacctttattaagttggcagaacatattcattgtattctaagaccatacacatattccttctatgaacatactctgtttgctcctaaacctggagatgtagataggactacaaaaacattcccacttaattaaaatagactaatcagtagcaggtgctcagctcagttatttattaattttatgtttctactgttagggcatttaagtttttttcattaaaactcaatgctgtttttccaaataatcccccaaaattaagtgcaggccttttgaaaccaaataactaaataaaatatagaagatttttgaaaaatgagtcaagatcatagtcataggccctgcttacatatataaaataaccgccttaaattttccagaaagtgccatgagagattaggattctagtatttgcccataagtttaatcttgaagaaagggagaaagaaaatattataagttttgagaaaagagatatcattccaaatatttgcacatctaacaaacagagttaattaagggaaggaatatagagaagaaaaatacatcatttccaaaaatctcttcaagtagtgaccttctccaagtccacctacctccctcaaaaaatcttcttaggctgggcaaggtggctcatgcctgtaatcccagcactttgggaggccaaggcgggtggatcacctgaggtcaggagttcgagaccagtctggacaatatggtgaaaccccgcctctactaaaaatacaaaattagccaggtgtggtggcgcatgcctgtaatcccagctacttgggaggctgaggcatgagaatcacttgaacccaggaggcagaggttgcgctgagccaagatcacaccattgcaccccagcctgggaaacaagagcgaaactctgtcttaaaaaaagaaaaaaaaatcttcttagacatctaccttgcaagatgttctgccaagtaaaaccttgtaactgttctacttcagtttaagccttcatttacagttagagcatgactgaaaggagttacaaatcagtgaatgggtttatctggtaatttatagccaggttaaaaacagaaaggtaccaccaccataggcagggaaagattgaagataggacagacgaaagcacagaagacaatctcaacccactgtcagctatcaccaatgataccaaacgcatccattctaccaacttgagcatgcaagctaccaaaaagcatatcgacgactctttaccctgtcatcagcacattcaagcagatctccatggcagcattccgtgtggactttggtaagatctgtcactaacttggaaacttctgcaaactcagctttgggaaatctctggctcaggcgagctactgccctaaaaagaaaatcgccaatcaaaatggtattatcatgcgatattttatatgaaaacactaggcaaatactatttctcataagaaaattcaaaatggacatacagaaataatttttaaaattcattagttctagttctgaaccaaatggtaatcacttatccttagggcagaattatccatttaagagtgtgtgtggtaggtagaaatctagcaagtcataaaagcagaaattaaaaaggaactctaaaaggggcaacaggctgagaagcatcaggtttggagtccagatgtgacttccagctctggctttatcacttgttagcagtaggacttgttagcagagggctcagcctctctgagcttcagcctctgcagtgtcatgacaacatgctaaattgaagaagttttgaggattaaattagataatacatacaaaagcattttataatctgggaagtactacacaaactccagttatcttttttctcaattgaaacacattttttctgacttctaaaggtctcttagaaaagaaatcataacttctacagaatgagggagtttttattgatcttacttataaaaagaaagatccagcactatcttcaaactctatgacaagatgtaaacgtctaattttcttcattctctagtcatttcacagttgcctaaatcaggtaaaggtgacttctttcccaaaaccaatcatagcctgtttatctgtgtataattttatgttggggctgttttttttcataaatttggttgattttggtggtgtagatggtaggaatgatgagcaaatacagttcaattgacagtttctagagagcatgcataatgtctattattttcattttatttcctgttgtgttgatttgctgttgactagcaggtgaggagtgtgggtgacggggcagctagtatttttcttgactcggctattaaagtatgctcccagaaccaactaagtaatatgaaaacagaggctcaggcaaaaacatgagatgaagatcagagctggagctatgcaaaaataagaagtaacttcaacttagttggtgactgaatttaactataagacataaaaggacaagcaaatagttttagatcattggggggaagataaaattaaataaagggattatatatgttgtatacttatatcaaaatatctcatataccccgtaaatatgtatacctactctgtatccacaaaaattaaaaataactttaaaaaattaaataaagaaccatgcctacagctctataaaaataatgaaccattagaataagagtccaagattttataaataaatagaacttaaatatctgtccctttttttaggacaaaaaggacagcgtcctctaaattattcaactatttagaaaagaaaagattaaaaataatgtcaaattgtcattgatattctgatttttacctctattagagttctacctgttagacaaccaaagaaatgtatttgacagcactttgcaaaatacataaaaatgtacaatttgtcactgaagcattatcatttacatcgttataaagatgccaactatgtttaaaagtatttaccatgctttgaaagctctttctccaaatttttggagactggcacacttgagtctctgtttggcagacgaagccttcccttcatcccgaagttcatcgagctacaaaaaggaataatttgatgaaaattagaagaaaaattctacatgaaacacccctccataagctcagatgagactgtgccaaattaaattttgaaggcataatttatgcctaaattcccaagtactccctttagcgaataatgattttgctctctaagaaaaggaaagatcattcgatcattctggtcacagcggaattccctatgtagttagaaaccaactggaaacattgccaggaaaaagagccttaaaagtgggagaaaagtcagagaaagagtacgctaatatcccaggggctgcaattttgctaatttttaaattttgtgtataattcatttcagtctctcctccaccaacatcagtaaactcctcagaaaagaaaataaagcattccataatatatatttatggaatgaatgcatgaactcaggcatctagatgcagtaaaattctctactttgaattccctccctactaaaaattatcatgaaaagataaacaagaactgtggccccttgctgtgcaatttgacaaacaagtttcagtatttcactatagtgatcaccaccataaaaagtggtgaaatctttaaacacatgcacagtgattacctctgacagatcatcattggcaaatcttaaaagaagaaacgagagtgtaggccttcaaagatgaaagattttcaagacagataaaaggaaggcttttttgaccatgtcggaaagtttgtatcagacactcaggttccctaaatctagccacaaaatggacaaaatcaggttggataatgaactctttttttctattcttttgcataatacctttggcaacaggcaggcagctttatcagcagcttggcaacattctgtaaaagcagctttataccttttagcaaagaaaaggagttccggggcataaaagtaaggatgtcttctggcaatttcatataagtatctaaattttgaaaaagaaaaacagtcacttttctatagcagacaatattacagaaataattgtaatcgacattctccccagaacctccaaattccaaagatatctaattaaccaattaagctcaatttgcacatgatggtcttgtctctgtcattctttaagtatgtggaaaaaagggttaagtgtgtgtgtgtgtgtgtgtgtgtgcataaatggttaaattttggcaatataatgttgctgactaaaacgaaatcaattataacaaccatatatacatatcttcgtaatacattaaataatttgtctatcttaaatttttcagaaagattgtatcctgtttcaataaacttcaaaatatctttgatcatattttttgctgtgtagaattttgtggtatcaaatactacttctttaaaaaatcatcataacaaaacttccaagtcttaatgttgaaaatatttttgttatggtaatttttatagagtgttggcctatggagttactccatgctttttaattttgaactataaacatctgattacttactttttcaaaaatgtctcttcattgtcatgaaaagcagtgcacatcacatcaacctctggtctcaccaatcgggggaggtttgggttgtcatctttgtgttgcaagaagcattcatttctctcaggttcttgttttgcacagcagtcagccatttcaccataggtttcacgaagagttgcaactgtgcataatttgtctccaaaaagggtatgctaaatggaagaaagcaggtttcagttgctggacagtaccttttttctttatagccaaagaacagtacaaaggatttaatatactggttaagcttggtcaggaaatcatttaaaaatccgcttcccctcccaatcgaggtttacagtttctgatgatttaaccatctctatataattttcataagaattaactgtcacactataactcatggtgaataaaacaggacaaaaagacagtcaatagctttaaggaaagttatatgactcctattttgaaacttaaaactaaagggtaagagcaatcattataacagaaatcaagagaaaataagcttctaagcagcaggtgaattcacctaggggagaaaaacattcagagagtttctcatttcatttgccccctttttagagggccatgttttagtatatgccattgaaaactgaggagtaacacaatccatcatatattaagtgactattaagatatagacatttttcttccagaaatgttacctaaaatcactttccaataaatgagtcctttccttatctctaatttttattatgaaagtaactgtaaccccagggaaaatatactactctagacagaatttattaatttttatgtatttttaagatttcatatgtagagccatagtattgtgtaaagttaaagtcctgactctgctgtgagggagaggtacataataaaaaggggaaaggctccagtgataaaaactggccttgcccacaagaggtatatatagattgagtggtgagagaaagataaacctgtccttgttttgaagattgatctggaaatactaaaagtttaaagttcttcaacatgactaagtactctgcttttttattgtatgtagaaatacaaagatatctaaaatgaggaatatatagctgtactattattccacccaggtaacaaaattagcatagaaatcagtgggtgttttctgatgataaaaaccatgatatcatctctaagagatagtagctctcctgtgttcattgcaacactattcatgatagtcaagatgtagaaaaccaacctaaatgtctatcaatcaacaaattaatggataaagaaaatgtggtacacacatgcactggaatattattcagccttgaaaagaaggaaattctgcaataggcaacaacatggttggactttgaatgcactatgctaagggaaataagtcagtcataaaaagataaacagtacataataccacttatataaggtagctaaagtagtcaaactcatagaatcaaagagtataatgctggttgccagtggctgggggaggacgaaacgaggggttactaatcaatgggcacaaagttttaatacagcaagatgagtaagctatacaacagtgtacccgtagttaacaataatggattgtacacttaaaaatataacagggtagatctcatgttaagggttcttactataataaaataagataaataaataaataaatacatgctatcatatccctattagcctctacaaaaagaaaccaaacctcaaattttaaaaagaggtgtttataaatgacaaattgccatttaaatacaccatgactgttgtgtttggtctcaataaagaaatgattttaaaactgtggacatagctaaagcatctctatcacaaaagaaacaatggcttatcagtctatgagcaactttttagtgtttcttacaaatcaggacacttaataataattgagaaaacttaaaaaaaattcctttgaaatgcttgggattacttcaaacagaagaaagaatctccacaattagaatgtacttacaagtgatttgtcacaattttcagctgactcatcagcaacacatgtttttgcaaattcagttacttcattcactaattttacatgatcttcaaatggacactgctgaagatactgagcaaaggcaatcaacaccctgaaacaaaggatgtagaaaaatgtagtataataaaactttaatatgtaacaggttgctacgctagagaacaaatcatgtatgggtataggttctatcttttatacatcttcttcaccattatccagaaagcctattcatatcaggtatgatctgaggcctagataggcatatgtggcttcctacgcaaagagaatggtagttccctaatgtttatatgtatgcgtgtgtcagtagatctatgcacacacatagattaagcaagcaaattgtatgccaaatagatctaattgtcaagactaggcatttttaaagtccttagaattacttaaaactaaaacaaaccccacagatttcctttttcttttttgagacagagtctcactctgtcacccaggctggagtgcagtggcacaatcatggctcactgtagccttgacctctcaggtccaaacgatcctcctacgtcagcctcctaagtagctaggactacaggcatgtgccaccatgcctaatttttttgtttgtttgttttgttttttttaaagagacttgcccaggctggtcttgaactcctgggctcaagcaatcctcctgcatcagccttccaaagtgctgggattacaggtgtgaaccaccgcacctgatccccacacacgtctttaattagcctgtaggattaggtagacttttaaaaaaacaattttctcattttttactagattaaaaaacatttaaataggccgggcgcggtggctcactcctgtaatcccagcactttgggaggccgaggtgggcagatcacgatgtcaggagattgagaccatcctggcacacggtgaaaccccatctctactaaaaatacaaaagattagccgggcgtgatggcgggcgcctgtagtcccagctactcgggaggctgaggcaggagaatggcgtgaacccgggaggcggagtttgcagtgagccgagattgcgccactgcactccagcctgggcgacagagcgagaccctgtcttaaaaaaaaaaaaaaattaaatattcccaactaagcacaggaatgcttgctatgtaaagaagatttagtgggtaagccaccaaaggaaacctatattaaagtcctttccaccaagcaagttccagagctgtactgtccaatacagtagccattagccacatgtgactatatacattcaaattaactacaattaaatacaatttaagtttttgtttctcagttgcacttgtcatatttgaagtactcaatagccatgtgaccagtgactaccttattggatagcccagatacagaatatcttcctcaacgcagaaaactctacgaggcagcactgttttagaatctgaaccctgatgacaaggaaatataagcactttagaataataaacaacactattagaaacattaaatttgattcatcaatattttaacttacaaggctttgaaattttcttctcccaaatctttaaaccgatgagcaacctcactcttgtctgggcaagggaagaaaaaaaaggattgttaaatactgaagaaaacaagaagtaataatgttactttttatatttctttccatttgacttagattatgcatttgtttcaaaatattgggctctgattcctacagaaaaactcaggatgatgttcaattatttcttctgcctttaaacagaagaataattcaattaccaagaatactattttaaaaattattaaatatttatagccttatattcaaacttagataatatctaatactcttttagtgtctatcaacagcaaccaagaagacagactaaaatgaaaataaatataaatacaagttctatttatgagatcaacagcacaggttttgtggtttttaaataaagcatagtgcaatggataggtctttgggatagttatgaattcaatcttcaaccctattctgtgaagtttcagtcactctaagttactttgcactttccttagtgcgcaaaagaaaattacagtcactaaacaattctgacctttttttttttttacctaggatgtttgaattttattaataagataaccttgtaagacttcacaaatacaaaatactatgccattttagaaataaatgccaaaataattctttaaagatgcagagtttactaaaactttattttactgggaaaatagaataaaagttgaacaatagaaaaatggatttcttacgtgcatctcgacgaaacacacccctggaataagccgagctaaagagaaaaagaagggaaataaaggttacccacttcattgtgccaaaggcgtgtggggttgacagaagagaaaagctaggacaaacggagggaaattagcactaatatacttctttaaccaataattgtagattattaactagactcatctttgtatttcattggctgccaaccgattacaaaattcataatattcttgccaaaaaattgtttgactaaatcccttgtgtatatttaccatctggaactgttttctccacaagaccttgtcaatgtattaaagttgtgtaaaacatcttatcaaattttacataagagtttaaacgatttgtaccttttattcattaccatggtatttaactgtaatttcccacttgaacattttagttcttggtgtttgcaatttagttctcagtgtttagtaattactaaccaaactaaatactttgcttagaaataagacatactgaaagagttaagtcccaaattgcatctattgctaattccaagtgtgcttttacctatagataatgaaaaatttacacacaagtactcacgcatgcacacacacatatacatacatacatattttagggcttctgtgtcttttttactattccaaagccattctgtctgaaaaagctgatgttgcctcagatgcaaactaagaaaaagacatagcaacaataacaagtaagataggacttagaaattccatgttcccattcctgctgtggcccacatgtgattcaagccctgagataggctatttagattcagtgtgagtatatctcatgggatcttcagttaagcagagatggagaggaaaatggacccaaatgagatgatgattatctttgccataatatacaataggacaggctgaccccaaattctctgtaggttatgagaacccttgaccttcaccaggcataggattctttccatccctgtttcatatttttttcctttctctctttcaataagtagaaaaatcacatgttcttttatgttgctttaaatttcaaaataaatttaacattatgtctaaaaacaaagcgaaggaagaataattttttaaatatttcataaatcttccttccctacccaaggttcttatctctacctcagaaaagctatcctacctctgcccttttgctcagaatatgaagaactactgagctcaaccagtaggaagaacaactttctctgatactacagaacaataattagtactaagccagttattttacttaattaaataactcagtcagtcaaaaccagtagtcaaatttcctcatggcacatagaggcacagagactaacaaagtattattttttctactcagtcttataatgaaagaaaattttttctattcagtcttacaatgaaagaaattattttctataatcttatgttatttcttcttcagaaatgggtactaattaactaataaagcacagaagaggaaaaaatcaaagctagatggatgatagatacatagatagataggaagattttttttaatgactcaagggagtcctgaaaggaaataccagacttgtctttctgactacagatgaacagacataaaacaagtgtgcctattttccattgaagaaaaacaagcattttttctaaagccagaaaaacctacatctgaaaagaaaaaagaaactattctaagttaagaaaataattctttcttggataaattatgtcaacttttaacttcctagaaattgtaggcattatttattagaagtcagtaaccaactctagctttttccttgtagaagtccctgggaaaggcctacccaaacataaaatccttactgttgaatacaattgttactaattgacaaattcaggcctttgtcactctcacatatactttgtgcatactttttcatttaacaaatgaaaagaataatattagtccatttagttttcaccacaacattataatgtaatatattgttaaatacaaagaaacctaaaaaaatctcaaattcatcatgactgaatagaaactttgaattgattttcctatatctaatgaagagccctagctttaaaacaaaattgatgaaacctaaaagaatcttttctttttttttttttttttttgagatggagtctcgctctttcgcccagactggagtgcagtggcactatctcggctcacttgcaagctccgcctcccgagttcacgccattcttctgcctcagcctcccgagtagctgggactacaggcgcccgccatcacgcccggctaattttttgtatctttagtagagacggggtttcaccgtgtgccagggtggtctcgatctcctgacctcgtcatccgcccacctcggcctcccaaagtgctgggattacagtcatgagccaccgcgcccggccaagaatcttttcttacagtactaatgaggcattttgcatatgtgcatcctactaaaagattaatagtttagaaattaaaatatttaattctcaatgatatctgcatacttaaaattaatgtttcttaagaaatacttgaacaattgcatcttctggatttgcaaagtaaaaatttctgcatttttctctgaaaacctctggcattaattctatatgaacattctatactgagagaaataaacctacataattgttagtcatttctaaatttcctgttcttcaaactttgaaactctgtttagtcagtcatcaacgggctctggcatgagggtaaatgcaaatatttagagtaagagttataaatatggtttagagattctctttactcggtaaacagaaaaatagccccaatgatttttaaatgttttctcatctttgtgggagaagtttaaaaatagagagtagttaagaaaagtattttctttagaaagaataagtgtactgatcatttagaaaagaaaaaaaaaatacctcaattgaaatgtacatatacctgggatttaaacctgagcctttaacccttttgttctttgttttgcattcactttgacgtgatacaaaaggcacagtttttaagtagataaaatgtctctgaaccggtctcccattttccagccactctaacagtaactttaaatccgcacccttctgctaccctcaggactcccgaagcttctcactgagtcattcacaccaggtttgccctccatctagcaatccatttagtccagcttttatgccatctcccactctgataggttatatttctgactcttcttctcttaaagataaagggaaacatattcatggaaatgtaataatatctaataatatcctcaatattttataagagactttctataaacaaccactttacccagagtcattccaaaatacaagaaatttggatttgtttggagagaaaattggggacaggaaaatcttaccatttttctactataaaataaacatatgcagatccttcctatcatgaagagcttgtattactctctacaaaatatgcaagagtggaaaagtgaaagactgttaagcatcaaactaaccaattgaaacataatcagtaatttaacttcttattcacttatggagatacatttccctcaaaaaaagttagaatgaaagtgtataaacttatataagtatttctaatgcaaataaaaatgtataaacatataggtattctaatgcaaataaaaaattggaatataatccaaacaattgctcccttatttccctccataagccatccccccagatattcacttgaattagtgagaaatatggaattggctgaagatttcatagggaatgaggagaaaaaaggttatatcataaaaaccaccctaggtcaccatctttggcttgtcccaccttttaagtccctctgcccccagatcttccatgatgaaagagtccctctccttgactttcttcatgttacactgggcctctggaatatatatacattcgaatttcctaaccttttactttaaatttctcagttcttctccgtgtggtttaattcagctcagtgtcagtttctagctgcagaactggacatgcagatctgcatatatctctatgccatatgggtcaagttggactaaattatctttaacgatccttctaccttgaacattctgcaattccatgttttcaatgtgacagccttatcaaatgagaaaaggacctgagtggtaggaaagaatatatcaagttaggcaattaggattcaagtttgagagcttgttcattcctaagcctcacaattgctcctcaagtattacgctctagctagttcagcttaatatttttaaagaataaaaagttcatttaaacttatttaaactatattaatgagactttctcatatttttttatcaagtttttcaagtgcaagaaaaatatagttaatgtctgcaatccatgtttatccattcttaataaattaacaactaatagaatctataaacatataaattgaaattaatactaatcctgtctcataaggatagccacagatggaaattaaacagaaatgaatgcactttgaatctattcatattctatattttaaacatgaaattcaagaaacttgttacttaagtttaaagttataaaattgaactttatcaatcttctataaaacaactaagattgtatagctaaaatagtctcatgttgaaattttagtggatagagtttagaatgtttttattaaaaggtattttttcttcttgatgtcttctatagctttaagctttgcgagatgttttgtaatcttttagtgccagttcttagctaaaactttctcaacccgtaacccagctgaagcttggaatttaagccttgaaattctcaggagttttccaagaaggtatgtgtgcgctgacatcaataaatgaattatttgatccaaaaaagtgtaagttttaagaaatatatcatataaataattggcagatgttcacttttttgagagaaattcatctctagccaaattataataaactacataatataaatgctttcaaaaataattgtaaaatatttttgggtatataagcattgaattgttcagtattagtttttcattatatagatattgaaaacaataaaattcttttgttagaataatactttgaaaatttggtttgctaaaatcattcagttaacaataatatattgcaacaaaaacatgcatttaaataaaacaaagaactaattttagtaacatatgatgttgacaatggaactctttttccaaaatgcttctgatttacagcagtgacatagtctatgtatttaacagcaataacttaagttactagataaaatacagataattattattttgattcaattttaatttttaaatgtatactgtttatttattcagttattaatgtattgaaagcaaatggctgtgtttaaagcatttaatgtcttgaaagcaaatggctgtgttgatgagtccaaacttatatctgcagttatgtggaaaattgacaaaaaatccacatcagaagtgatgatacctaaaagtaaatattggccagcatcaacaaacatgctaattatttaacaatagcattcttgttgacagggcacaacccataagacagtgtttcataattattttaaggagctgatttcaaggagctcacaatgtaacaagggatgcaggaaaataagaagataattatagtgaaacattataaattactatgcatgtagaatacaaggtactcctgggataataaagaagcagtggaggagaagctctacatccaaggacaatctcacgtgtaaataagctgtgtgggctctaacctccttagctacctatacaatccaacagacttcaaatttcaaatttgtattcactgtgtttatttttgcttgtgaagacagttttcctggagaaatggaatgagtaggcagaggactgaagaaagtaaggaggatatgatgatgtgtaatttctaaatgtttcataaaatatcaaagcaaagaattagatcccagcttcaaagacaatgaaacttcctgcagaaccttaagaaagaaaagaaatgcaggctggcaagcagaaaaaaaaaaagccgagttcgcaattatctgggttttcaggcaaaactaagcatgaaaatgatcatttctctctcccattccactgccttctgtatacctcaaacatctatcttttaggggtcccacctttccaaccattacccagcctctaagttccatgtgcctcctttctaacataaaccccataccaaaacttccctttcttaacctgttggcaaattcgggtaggtcttaaatattaaaaatcttactaagctaattctacaaaatctcacaaaacctctccttatctgaacctcatgctcctaatctcatcaacactctatttcctcccccatacctaacctttctagaatagaggcattttattataaaagggactcccatcatgccagttaattcctaatggatggaatttcaaacgggtggcaaagtggaaaaagaacctgaaacagtggttccacagttcttcaaatctcaccatgggaatcctatcccactagaacaaaaggttaactgacccttgtaaataactgttagggtctgaactttggtgcctgaactttggaatctctgtttggctgttcagaaagcttttttccttttctatttgggtcattgaggtttttagattaatgttgcagacaacagaaatgctacaatttatatcctacatccccaagataataagtttcctgaaagcactaaccatggttcatcctcactgtatctaacactagatccagctcatgcctagatacagatagatacagactagatacagaagtcattcaaaactttcattgattgtcaatttaatttgtcagatcgagtcaactgtagccatatggtaaatggccatgagcacttgataccgtgcatcctctacatttttcttttctcattagaacgcaatccagaaattagtgtagttaaaggtataccgtgaaggtaaacaggctagcagaagctgccttacttcaatcctgaccaactgaagaggttaaaaatattctagccactagtcaaaacagggtctatttaaatggcccaatgatatatcctattggcccagcagccacaccacagtcattgcccagaatgttactcaatacttacaatgtgctgttatggctggctcttctttggcctccccactcaaatccaagtcccaaaccagtactaattcccattgatattattttgtatttggtttaggtgagtagacaaaggggatgctaaaggagtttaaatatgaaaatctttccagtgactcaaccaccctgtgaagcaatgttttttgttgtagagaaacttgctcatggccacttactacattggtgcagttgcttcttgattagccaaattaaactaacagccacaaatctgtccattcaggggttgttcttttgttcactcttactgtaccttaaaattgttcataatcctggaaaacatcaaatatgaaatgtatctacaagcatagggaggggaggatattggggacattactcactaggaaaaatccagtgtagttaaatattaacacagctacctttatttttaaactaaaacatatattttatagtaaaaaaaatagtgatgatatttcatgctatttctaatattctttgtcatccacatcctggggtatatgtaactaatttattcatgggttagaaactgttctgtttgtagtcatgatcatctaggaaaaatttctataccctgtgaactcaagcttatttcctaatgccatatggcacaaccccaaaatctggattagccttgacctttcttccgtaagggcctcattgccaaaaatttctacaacacacctactatagaaagttcctaattttcaactatctttagaacaactttcaaacagggtcatgaaataaatttaggatgtcatggccagtattgtttagtaaaataaaattaatagaatagaattgatcagggtaaattgcctgtagtgggattagcaccattttgtaaaagttttgctatacatatgtatatcaggtcatcatgtaaaatctgtgttttactcaggtcactgtcaaaaaaacttggaaatccattcctcttcatgaaacccatttgacatcacctcagcatgtcagtatgttcttagtcaattggccaatttccctccacaacccccatctaattttttttcccaaatttacccatttggcttatgatactgtaagttttcatgccatagcatttgatagcttcggagtgcctttaataatttcttctctttaacttcaagtatccaatatgtccctaaacagttttgatctatctgttagttaaattgttttgacccattttcacatttattcttactcaccagggcactgaggccagtttggttcaggctctcaccaaatcacacctgagttattacaataaactctgaattaatgatcatatttctagtccctatctactctgattaataccaaaactttcctctccttaagatattttattggttccccattacattttaaataaatgccaagcttcttgctttggtattcaaaatgttctgtaatccatctggacaaggtggctcagacctgtaatcccaacactgtgaaaggccaaactgggaggattgcttgagcccaggagattgatactagcctggacaataaagtgagatcctgtctgtacaaaaataaataaataaataaattgcccagatgtggtggtgcacacctgtagtctcagctgctcagaagcctgaggtgggagatttcttgagcccaggagtttaagtctgcggtgagctataatcatgccactgcactccagcctggcaacaaagcaagaccctgtctccaaatttaaaaaaaaaaaaaaaagcaacatactctgtaatctgattccactagtttataatgtccctgaaagcagaagctctgtctttctccatcacagcagtatccccagtggctagcagatgactggcgcatgtgtgttcaatgtctgttaaacaggtgagtagacaaatgaacaaatatgtgaagaaatgatctccataatataatctgttattctctttcatgaataaattttcccattaactcagttatactccctgtaacattttttgcaagcctacaaggtattaaatgccatactagatgagaagatgtgcaaggtgctatgaggccatcttcctttttcccagggggtcatgttcattttcagacacaaatctctgcttattgggctttctcccaccatgatgatttcccctgctttgtatctatctaaatcttcccatctccagagcacacctccagaccttctcttttcccaggcttacattcttctcactgtcttctgatgacctgtattactttgttttcattcttagttacatctcttgaatttataagattttattaaattgtaatcattttataagagtaaacattttccctattcactgtattctttacaaaatctcagttcagtactagacagtagatagtaattaaacctatgaattaaattcagtgagtaaaaaatttccaagtgattgtattatgaaaaaacaaagattgctatatccccatctctagcaaatttaagattcacataagtaatcacatacattcccagcatgtagcaagtgctctataaatatttgttgactgaatgaataaatgaataaataaatgaacaaataagccacttccagtctgatgtccatcaactccttgatatccatgaaagtacagtaaaagtccatgagtttgttgccaatagtagttgaaaataacaataatagaaattttgcatttattcattataaagctgcaaacactaaaatcttaagtgtatttattttgtattagaactatattaactctactgaatccctgagtgtgtgaggggaaagaggacagcaggggatgccctgtttgtttaacaagcacttataaaatgccttcaaacatgccagtccctgttctcagcagcgctttaccagcagtggcatatttgcttctctggtactcttactagaatagcattgtcattattgcattttacaattgaggaaactgaggttaacataaagtagctaagattaagtaacttgcccaaggtcaatagctagtgaacaaaacagcaaagaggcattcaagatatatatatcctataatgcctttcaaaaaattaggacaactattctctgatagtccctcaaaactattattatgttgacaaagctacattcattgctattggcaatagaaaatttgggagaggagggaaattgaattgcgacctgagatgagggtgtaccctttttgtctggtgctttattatttgcttatcttaaataggctttctaagtgtcataagggcttctttgtacctttcctgtaacccacagcagcaaaacagatcattagtacatggggcagtacatgccgaagaagaaaacagacactggcaaccatgttgggaatgagaaacatccatgactagttctaatttcagagtctcacaataaatccaagatgaaatctactatttcatattgctttattctaccatttcttttttcttgagactgagtcttgctcttgtcacccaggctggagtgcaatggtgtgattccggctccctgcaacctcggcctcccaggttcaagcgattctcctgcctcagcctcctgagcagctgggatgacaggccccgctaatttttgtatttttagtagagacgggggtttcaccatgttggccaggctagtcttgaactcctgacctcaggtggtccacacaccttagccttccaaagtgctgggattacaggcgtaagccaccgcatctggcctattctacaattttttaaacagccacacaaagctttattttatattttaactgacattctttttacttattacttcatcactgctagaaaacaggtaaaaagaatactctttaaaacacttaaagtctttctaacctacaccaagttctgctcttctgggaagattaggtttgaatttgtttttggtttagctgtactgatgattacatctgtggaatttgtttaaagacagatggttgctcagatacaaaactgctggattaagcagaagcagagtgaagtggaatgataaatacaaaaatgcaagccatgtgaaggcagcagtcagaataaaaccaggtattcatgagaatgagagtctttccagtaattacctagagattttctgggtgagatatacagtcacttcatagaactaccgctgcacatttttatctatttcttatttattcaccgagctcactcaaatgaatatctagtgtctgttctatttcccacatatttctagtgtctgagctaggtaccacatgaaatattatcgtgtattgattaagagcactagtttggaattagacttctcaagtttgaataccagctccacttcttactagttgtgtgggtaaggtacttcaacatgctatgccttgattttctctcttgagaataaataataatcttaatttatggggtagctgtaaaaattaaattagttaatgctcatcaagtataaacattgcctgcctcatattgacactcagtgaattttaactagtgttatcattaatgctataagaaaaagcaggggggacaagcacagggtcttacttcaaaagtgttcaagtgaaattgcaattacaaatatgcatgcaagcgcacttaactaataaggcaaaggtatttggctagccatgaactaacccacagagactctatggttgttcacgcaggaaggaagaaagatctatgggtccaagtggttagagatgtgacttaactaggtcttagaaaatgggtacaacttggacattttgctatcctcattattcaaaccaatccagtattaagagaatagaaaagaatcttaggcctagaaaagtccttagagatcattggtttcattccctttgttttacagattaaaatataa

SEQ ID NO: 23 - DNA, 39715 bp, Mus musculus
atactattcatggtcccgtgccccccatatctccatggctgtccgattctaaaccattgatagaattcaaggtcttgtcttctattgctggggttatagcgttaattctctgactagttttcttacctgctttcctcttgtcttttctaacctctcccccaaattagagcggcggtagtcctgtgcataatcagattagctcattgaactaaggaagccattcaatagctgtggactacaagcttaaatgtttaactacagctaatatgagctacaatgccatcttcaatacaccccatctcatctcgtaccaggcttctctataacctttggttaatctttcctagcttggtgtgtgtgtgtatgtgtgtttaatttttaaattcttgttctgccttaagcattgtctcatgatatttcttttatcttaaagtctttttttttccttcactattcatgcccactgagtgcttttcagcttatatgcattaccctcagtagcgtctctcaagctcccaggccaatggtgttccgaagtaatggttaaatcaggaatattattttgtctttagttatctgtatgaactagtgtatcagtcatcttagataaacaatttcccgaagatgatctgttcctttcttcggggatattattttttgaaggagtctgtactattaaaataaccctatccccaaacttagcttagaagcccaaatacttgaaaattctgcattttcttttctgccggctagcttccttagcatgacgttccacttttttctaaggtggagcttacttctttgatttgatcttttgtgaaacttttggaaattacccatcttcctaagcttctgcttctctcagttttctgcttgctcattccacttttccagctgaccctgccccctaccaacattgctccacaagcacaaattcatccagagaaaataaattctaagttttatagttgtttggatcgcataggtagctaaagaggtggcaacccacacatccttaggcatgagcttgattttttttgatttagaaccttcccctctctgttcctagactacactacacattctgcaagcatagcacagagcaatgttctactttaattactttcattttcttgtatcctcacagcctagaaaataacctgcgttacagcatccactcagtatcccttgagcatgaggtgacactacttaacatagggacgagatggtactttgtgtctcctgctctgtcagcagggcactgtacttgctgataccagggaatgtttgttcttaaataccatcattccggacgtgtttgccttggccagttttccatgtacatgcagaaagaagtttggactgatcaatacagtcctctgcctttaaagcaataggaaaaggccaacttgtctacgtttagtatgtggctgtagaaagggtatagatataaaaattaaaactaatgaaatggcagtcttacacatttttggcagcttatttaaagtcttggtgttaagtacgctggagctgtcacagctaccaatcaggcatgtctgggaatgagtacacggggaccataagttactgacattcgtttcccattccatttgaatacacacttttgtcatggtattgcttgctgaaattgttttgcaaaaaaaaccccttcaaattcatatatattattttaataaatgaattttaatttatctcaatgttataaaaaagtcaattttaataattaggtacttatatacccaataatatctaacaatcatttttaaacatttgtttattgagcttattatggatgaatctatctctatatactctatatactctaaaaaagaagaaagaccatagacaatcatctatttgatatgtgtaaagtttacatgtgagtagacatcagatgctccatttctcactgtaataccatttatagttacttgcaaaactaactggaattctaggacttaaatattttaagttttagctgggtgactggttggaaaattttaggtaagtactgaaaccaagagattataaaacaataaattctaaagttttagaagtgatcataatcaaatattaccctctaatgaaaatattccaaagttgagctacagaaatttcaacataagataattttagctgtaacaatgtaatttgttgtctattttcttttgagatacagttttttctgtctagctttggctgtcctggaccttgctctgtagaccaggttggtcttgaactcagagatctgcttgcctctgccttgcaagtgctaggattaaaagcatgtgccaccactgcctggctacaatctatgttttataagagattataaagctctggctttgtgacattaatctttcagataataagtcttttggattgtgtctggagaacatacagactgtgagcagatgttcagaggtatatttgcttaggggtgaattcaatctgcagcaataattatgagcagaattactgacacttccattttatacattctacttgctgatctatgaaacatagataagcatgcaggcattcatcatagttttctttatctggaaaaacattaaatatgaaagaagcactttattaatacagtttagatgtgttttgccatcttttaatttcttaagaaatactaagctgatgcagagtgaagagtgtgtgaaaagcagtggtgcagcttggcttgaactcgttctccagcttgggatccttaaccccatgtatcctctcctacctttgaggacaccttctcatgccgtaagactgtcacacgccacacgggaagcacacaatcgcagcatttcaaggaggaaggaccccagggataattttatcccagttgatttacatggcatggagacaataacagatctgcaggtccaaggcagtggcaagaaattgagctgaattaagcttcagtcaacaactaagaagctgggaggataatgggaaatttgagtagtacaggcataaattccaggggctcgatctagcaagaaggaaggacagaaaagtacatttttgtcattggaactatggtaaaagaggttgaacagatcaaacaaaccgaaaatagtgattttgtgtgcatttatttactatatactcgacaatgctttcatgaaagaagtgtggtttaaacagatacaaacccattgtataaaatagctgttttcaaaatgcgttctctctcaattttcccttccattttcctcctcgttttaaagtcactgtttgtttacagcagggtctcatgtagcccaggctggccaagtgtcaagattataagcctgcaccactaaatctaacatttcaaaatatgacactccacaggtacagaagatcttgtgtaaagataatatctaccagcaaaggtgcttgtatggagttgaatagcaaaataaagggggtttgggggtgtgttagcctaggctgcctctacccgacatgtccatccttggacgactgctcagtctgactagtactgcactctaccatagatgcactgctttgattgataactttaaaaatgtagcccctgtccacctaaacatatttcttttttttctttaaataaaatttttcttgtaacgttaataatgtcaaaattacccaaataactgggtaatgatgccctttaaagtcatggagtgcttggcttggtagaaaccctcatactttgagggtaaacacacagcctttgaccattctcaagtacgcaaccatgtcaaggcacagtcattgagaaccccaggttattctctaagctagaactctacaatgaatactatttggcaatctcattttattttatattttttttctggccaaaaattaaatattcttgtgtcattgctgaattaagcatttccatcaccttaactattcctatgacatcaaaatgagaacaactcagccttagtgatttgctatagcacttcctgtgtctctcacagccgctgtctcctcccacacaaccatttctctgctcacattttctaatcttagtagaaatcataaaaaacgtgttgacgtgtaaccacagagaaacaatgaagggaggggaacccaagggacagagccacagcagttagaaggcagatgagatgctggcaggaccctgacacttgttagccagcctacactggagaccggaagtgctgtcttcatccttaactacatatggagacactcctgtcctataaaatgaaggaactggcaatccaggacagacgagacagcctgcattattgtttcaacataactgctgttatttttactcccatcagagagttcttttaaaagggatcttttaggaagacccaaaccagagaagtgtagtcagcatttgagattcaccacagccatgacaagtcttgtttccagggatgctagctccaaagaaccctaatttcccctgatgggtggatctttccttcctgaagtcagaggctactctgaaacaaataaagagatataaaaggaggttgcaaaacaggccagcttccagttttatttttttaagaaaaaaatgtatctagttgaaaaaacggtttataaactattgtgatatagtgaaggacttagttgttacatgaaaactggtgcttatagctacttcaattttctctgaggcacagtcaaacttgaatgggtggagaacactgtagtaattatcttttgaggtctctgcacactggtttttaagatgatctagcataaaaaaaatcttccataattttatctccaagtctatgttttcactaggagagaggggaggcatgtgagagggtactaggtggtgacaaacgtgggtgtgcgcacacacacacacacacacacacatacacacatacacacatacacacatacacacacacacatacacatacacacaaacatacacacatatgtacatattcacacatacatacacatacacatatatacacatacatacatacatatacatacctgcacacatacacacatctacacatacatacacaaacacacatacgcatatacacatgtatatttaacatgatcaaagaataatatataaaactatttaaatctcagcatttatcctattagataattgtgttctgttgcatctggttaacagacatatgcagcaaattaaagagactgaagtatagcagtaaaattttggctttacaggtacagacaaacatcaaatcaggaaaggcaatatccttcatgttgtacacgttgatatataaatagttttacatcaagtcagcacagcttttcatactgctaggtacctaccatatatgaacattctagtcaagcctcaatgttctggatgaaaaattagagcattcactagtatacttattacttagctaactcgaagaaactcagcattatctgtgcataacgataaatttcggtcgaagttcatttcacaaagcatcaagtacagcacaataatgaaatacaaatgttcagagcccttcatacccaaaaatgctcacaaccccacacactaatttcaacatttttttaaaactatcaaactcagcttcaaaatgtgatggacactctttaacaatatcagggaaacacacactgaaatagggggaaagcgtaaagcattcctactaaagtaagaagcttgacaaaagtggccactaccttcactcatatttagtatagcgcttgaaatctcagccaaagccataaaacaaaaaaataaaagggtgggggaggacatgggtatgaaaagatgataaactgtccctgtgtgtgtgtgcggatgcgatcctagatatagaagaccctgaagactacatttgaaactctcagcaaggagccgaatagataattaatctaccaccaccagtagccagcctgtgtgcaaataagatgcaaataaagccaggagaacaactccattctcagttgccttaaaaaattaccttggaataataaatctaaccaaagagatgagatacttttacaaagaaaattttaaaacagtgaaaaaaaaaaagacactagaagaagaaagcgcccctcccccatgcttatggattggaagaattaatatagtgaaaatgtctttactaccaaaagcaatgatgtaatcctcatcagaactccaatatcataaattgaatagggctgtaagaaatttcacagctgatttaaagttataatactgagccatagtaaaattaagcaaatgatcccctccccaaactcccagcctagtaccagaataaaattagaaacgtagatcaatacaacaggtgaagagctagttgtaaacccttacatatacagccacttggtttttgactaatacacacacacatacacacacacaatttatgcatgctcgcgaatctcttcaacaaatggtgttgggaaaactagttattaacttgcaaaagaatgaactagattcttttctttaaaagaaccaactacacacggatccaaagatcttgctataaaacctgaatggcagccataaagaaaacaagacatgctggtgtggatgtggacaccagggagccctcatacactgccagtatgaagtggtccaatctccatgaaactgagtacagagactccaaatcaacaccacacagagatacgtgcataccatttacattagctgagtgtccagactggcttcagtgtctgtcagcagaggaaatggagaaggaaaatgagggatactcacacagtggatatttttcagctctaaagaacaaaactatgtccacattaagatcttgactatgactggaagtgatcacattaagtaaattaagtcagccttacaaagacaaatattctgtattttctctcatttgtggttcctaggtttggggcagatatataaaatcatgcatgtatatacaaccgggaagcagaagtaaaatatataaaatcatgaatacaacatatatgacccggaagcaaagtggtctcaaggaataaaggagactaatgggagagataatgaaagggaggtgatgcgttaagaggaataaactcacagtttactatgtactgatacaaagatgcccttatacaagtcagaataatgtacagtgaaaatgtgtcaagaaacatgcacacatgtgcacacacacacacacaccaacagctccattagccattatttttttttactttcatataaatgtactgtatttacaaatttttgttcctttcctttcttacccccaactacctctttgttctcacccccactccttctaaattcatgctttatttcttcagttactattgttcacaaacacacacacacacacacacacacacacacacacacacacacatacttgaatgaacaagggtataagaaaacctgctgagtctgcttagtttcagaagacatttttctcaccggccctgtcctcggagaccagcctctgtacactcgtttgcatctatgtctacattccggcatttcccttgttctcttcttgagatagaattcctgtaaccatctagcccaggttggccataagtctgtgataccacatcttgcctcattagtgctgggattacagagatgtcagcaggcatggtacagtaatcttctcaggtagcaaagcttggcgtccttttccagcatgacgtgctctttcctcaggcccattctctccactcctgcatccctccctatcaagattctcactcagaaggccctgagtcattttttttttgagtttctgcacataagtgacatgcaatgttttttatctccaaacaatgctgggctctctacctccacagcatcccagatagaatagccagtgtctttatttaactgattgaatctgaccacagcaaagcatgttactaagtttgtccatgttaaaaattctttgtctgcttttgaccggcatcaagggggtgatagagtttggtgttacattattcaattcatccagaattttttcctttgattgctctagttcaggcaggcccacgacccattctatgcatcccctttacaaaccatctctaaatgtttaagcctctctccaaaaggtgaaaccctgttgtcattttaattgtaaaccacctgttcaagccacattcacgttaatactgttcattctgcttgtccatatagtgggtcattatcttaaaacaatttctgctgtatatagtatcaatataccattgttaaatgtgtttgtcaccataaggcctgaaggacaccctcctcagagcctcaacacttaaggggctaaagtcataacccagtgatagagcctttgcctgccatggcatgaggccctgggtttgatacccagacctacacagagatgaagattctcagcagttgatgcttatatttgggctgttttgaaatcgtctttgaggcaccaggtgtttaggaatagactgtttatggggatcaatgttctatcccagacccatcaattgtgaactcagacctttctaccactggttttctatgaacctgtttgggaagattgagcaatctaagagccaggagtttctggattcatcaactgagttggttgttatttgaacatctttcatagcattacttctatcagctggccaactgctggcccattgaaaaaatacttagtactgaactgtgtaagtttttgtgatataaactcttatctacaaggaaacctctagcacaatcaatattctcaatattttaagtggatatagtttgggagcatggaaggcttcacatatggggatgacaaggaacaattaatgtttgaattacagtgtttatttgcatgagaaaactttggacatttttttacttttgttggaaaatatatttttatattgaatgagaaatcaaattgcttattatgtttcagttgttgagtttgatgcttagtggtcttccacttcccattttttataaagcatttctggccccgcagaataggagggagctgcatatgcccactcaacaataggaaaagtgtggagaaaagacttcgtgtccccatttttcttcaaaattaaaccaaattttctacattttacagtggatagaggtgaagtcactatttctagaaaatctgtggtgaaattttgaagacattattagatacagctgtttatttttctggaccggttttcctttttttttctattttttgagacagggtttctctgtatagccctggctgtcctggaactcactttgtagaccaggttggcctcgaactcagaaatccacctgcctctgcctccccagtgctgggactaaaggcgtgcgccaccacgcctggcttctgattttacttttaagaggagatccagaagtactgtaggatcatgggggaagaagcatgcaggctggaccaaggttgtcacatggccaggatggcttgaaagaagttagagacgttccagaaataggaaggagagagagagctgggaaaactgggaaaaccatcctatcaaaaacgaatgcaaaagaaataagaaaagcaaaacagaaggaaacaacaaagaggtgatagtataaggagaaaacaagggattgaaaaaattgaagctcaggtttaattcccagtcacatttgtattcagcaggagtgtatgtgtgagagtgtgtgtgagtatgtatgtgtgtttgagtgtgtgtgtgtgtgtgtgtgtgagtgtgtgtgttgttgttgttcccttctagatgacgagcacaggaccatactttccaaacaacaaatcatctcagctactcttcatttttaaagtcctcccacaagcacgagaaaacactcaaagatcacttgagctattttctctttattcagaaactaaacctttagtttaacttttgcatttatgctcctgccaaactcttttgatgactgactaaccatcgagtttaaaagcttgaaaaacaggatgtctagaagtaactaataattatgtggcttcattcctctcagtatagagtctacatataggacgagtgccaggagtttcagaaggaagagtataaattcttactcaccagatgcaactgctcaagtgtttctcttcagttgaaatgatctgtgagcacggagactgtgtcaagaattaagcactttaattctcggctgctaaagattaattagaacatgcccgagtaaggcattgagttagtactgctaaggagaggctcagttgttattaatttatgtcttaaaagtattggagcttcatcagtcactaaaccagctcaagcgcctacttcattctgatgcttttctctccaggctttggctgcatagatgatttttttttttttttttacttaattgtcaaacaaaagtatatatagtatacatagtacatgtgagagtgctaaaagcctgagttaataacacaatattatacttaaacacaatattacatataactatatagtacttgtgagttaataatacaaatacattcaatgacttaagcattacatacttgtttatgtttatcaagacccacaccaggacaggactaggcatgactactgtcttcaaataaatagtgactactctttctaggaagtttaaagaggaattgatccaagaaagaattatctcttctgtttagtttctttttttcttttccaggatggggttttggcttaattctgccacccaccctcaccctcagtagaagttattccatgggcagactttatctatctatctatctatctatctatctatctatctatctatctatctatctatctatctacctacctacctccctatccatctatcatctatctatctatctatctatctatctatctatctatctatctatctatcatctatctatctatctatcattctgttcatctgtgtagaggctagtctgttattccatttcaggactcttttgagtgataaaacaagcaaggaaacacttttcccttctccttcattttgccttgactcctgtggttgattacagaatttgtacacctttctgaagatgaggacacaagatgaggtcataagacatagatttctttcattgtataaccagatataaagaagaatgcttctcctcctcctcctcttcctcctcctcctctcttcctccttttccttcttctcctccttcctcttctccttcttgtcactgaatagtccctgtatatttaggaaccatggggttgatttggatgtagtcttgactgactcataagtgagataactggtctgctactaattattatcctgtggtgttagaggaagtatgttacgatggcaaagaccatcatcactgtcattggagtgcctgttctagtgtctcctctaaagcaccccgagaaagaggttcatgttagatgaaaacattctactccagacccgtttcacacatagcctgagcatggggtggggacacaagacttctgaaagtcctctgcacttgttttttattgctctggcttcttctcagttcacatttgagacactgtgtgctttatggaagattctaactttaaaaagatgagaaagacttggaagccctataatgagacccacccctccctcatacacattcttcattacctgtacataaaagcatatttgggatgaacaacctatgcaattcagttcttagcttttaaatgtggcatgcttccatgccaaggcccacactgaaatgctcaaatgggagacaaagagattaagctcttatgtaaaatttgctgttttacataactttaatgaatggacaaagtcttgtgcatgggggtgggggtggggttagaggggaacagctccagatggcaaacatacgcaagggatttagtcaaacaactttttggcaaagatggtatgattttgtaatggggtaggaaccaatgaaatgcgaggtaagtatggttaatgatctacagttattggttaaagaagtatattagagcgagtctttctgcacacagatcacctttcctatcaaccccactagcctctggcaaaatgaagtgggtaacctttctcctcctcctcttcgtctccggctctgctttttccaggggtgtgtttcgccgagaagcacgtaagagttttatgttttttcatctctgcttgtatttttctagtaatggaagcctggtattttaaaatagttaaattttcctttagtgctgatttctagattattattactgttgttgttgttattattgtcattatttgcatctgagaacccttaggtggttatattattgatatatttttggtatctttgatgacaataatgggggattttgaaagcttagctttaaatttcttttaattaaaaaaaaatgctaggcagaatgactcaaattacgttggatacagttgaatttattacggtctcatagggcctgcctgctcgaccatgctatactaaaaattaaaagtgtgtgttactaattttataaatggagtttccatttatatttacctttatttcttatttaccattgtcttagtagatatttacaaacatgacagaaacactaaatcttgagtttgaatgcacagatataaacacttaacgggttttaaaaataataatgttggtgaaaaaatataactttgagtgtagcagagaggaaccattgccaccttcagattttcctgtaacgatcgggaactggcatcttcagggagtagcttaggtcagtgaagagaagaacaaaaagcagcatattacagttagttgtcttcatcaatctttaaatatgttgtgtggtttttctctccctgtttccacagacaagagtgagatcgcccatcggtataatgatttgggagaacaacatttcaaaggcctgtaagttataatgctgaaagcccacttaatatttctggtagtattagttaaagttttaaaacacctttttccaccttgagtgtgagaattgtagagcagtgctgtccagtagaaatgtgtgcattgacagaaagactgtggatctgtgctgagcaatgtggcagccagagatcacaaggctatcaagcactttgcacatggcaagtgtaactgagaagcacacattcaaataatagttaattttaattgaatgtatctagccatgtgtggctagtagctcctttcctggagagagaatctggagcccacatctaacttgttaagtctggaatcttattttttatttctggaaaggtctatgaactatagttttgggggcagctcacttactaacttttaatgcaataagatctcatggtatcttgagaacattattttgtctctttgtagtactgaaaccttatacatgtgaagtaaggggtctatacttaagtcacatctccaaccttagtaatgttttaatgtagtaaaaaaatgagtaattaatttatttttagaaggtcaatagtatcatgtattccaaataacagaggtatatggttagaaaagaaacaattcaaaggacttatataatatctagccttgacaatgaataaatttagagagtagtttgcctgtttgcctcatgttcataaatctattgacacatatgtgcatctgcacttcagcatggtagaagtccatattcctttgcttggaaaggcaggtgttcccattacgcctcagagaatagctgacgggaagaggctttctagatagttgtatgaaagatatacaaaatctcgcaggtatacacaggcatgatttgctggttgggagagccacttgcctcatactgaggtttttgtgtctgcttttcagagtcctgattgccttttcccagtatctccagaaatgctcatacgatgagcatgccaaattagtgcaggaagtaacagactttgcaaagacgtgtgttgccgatgagtctgccgccaactgtgacaaatcccttgtgagtaccttctgattttgtggatctactttcctgctttctggaactctgtttcaaagccaatcatgactccatcacttaaggccccgggaacactgtggcagagggcagcagagagattgataaagccagggtgatgggaattttctgtgggactccatttcatagtaattgcagaagctacaatacactcaaaaagtctcaccacatgactgcccaaatgggagcttgacagtgacagtgacagtagatatgccaaagtggatgagggaaagaccacaagagctaaaccctgtaaaaagaactgtaggcaactaaggaatgcagagagaagaagttgccttggaagagcataccaactgcctctccaataccaatggtcatccctaaaacatacgtatgaataacatgcagactaagcaggctacatttaggaatatacatgtatttacataaatgtatatgcatgtaacaacaatgaatgaaaactgaggtcatggatctgaaagagagcaagggggcttacatgagagggtttggagggaggggttggagggagggaggtattattctttagttttacagggaacgtagtaaaaacataggcttctcccaaaggagcagagcccatgaggagctgtgcaaggttccccagcttgattttacctgctcctcaaattcccttgatttgtttttattataatgactttactcctagcttttagtgtcagatagaaaacatggaaggtgacattcctcaaggccattagctctttgcttctctgtgttatccatcatacacaatattgtggcacttgactatcatgaaaattacacagaaattgacaagtccaaggaaagtaagtggtagggggtttctacatgatcttcgtttgcctcgcagtttaaaaacgtaacttacttcattaacaatttttttatacttaaatttattttaagtggtatgtagaaccaaaaaaataatatatagctcaaggtgttatcaatatacatatcatctatgcacatacatacaaggtacatgttttcttcaccaatttttatcagcacatttggttttgatgctgctctttggctatgaagaaagttggggtaccggcaggaatttgacttttctctcttcctcttagcacactctttttggagataagttgtgtgccattccaaacctccgtgaaaactatggtgaactggctgactgctgtacaaaacaagagcccgaaagaaacgaatgtttcctgcaacacaaagatgacaaccccagcctgccaccatttgaaaggccagaggctgaggccatgtgcacctcctttaaggaaaacccaaccacctttatgggacagtgagtacccagacatctacactttatgctaaaaactgggcaatagctccgttagtaacacttatgctgatagtcatgaaaaccccaagcatccaacaccaagtctgggaatgtgttgagatggtgtttaaaaacataatacttgataccacagactatacaatgacagtaaaaagatcaatgatgttttgatattgaaaacaggacctgtgtgaaatatctgagactgagaagttgcaaaatattctgaaggcatttgtgtgcatgtgcgtgtatatgtgtgtgagtatgagtatgtgtgtggtgttcatgttctctggatcaatttcattttagtcatcaacattacatcaccaaaatttacttaccaaaaatgtacacatgatgtgtgaacatttacaaacacacacgcgcacacacacacacacacacacacacacacacacacacacacacacacacacatatctacatatctctctttgctcacttaacaacagacaaagtccatcactcatgggtgaccacactgagtgaaaccggtcaattacaaatcccatgtgtatccaagggtgtgggttgattctaatcatttctgtagtattgttctgtggggaataactgcctgttttcttcttcttctttcccataactcagctatttgcatgaagttgccagaagacatccttatttctatgccccagaacttctttactatgctgagcagtacaatgagattctgacccagtgttgtgcagaggctgacaaggaaagctgcctgaccccgaaggtaaactcctggaaagacacacacaacacctgctttgaattccagcctaagattttgatcatcttatggccagattcaggaggcttggctttctgcatgaaacatctctttcttcttaacttaccaacagatttttgttcttatgcctttcttccttctaaactttagcagtggtctgagagagggaattcttgtacttgcgttccttgtcttctcattcttcatggtaatgctgtctacagtagaagactctttgtcaaactgtgcagaaatggctaggttttttttctttgtttttgcttttattttttgaccttctctgaggcattttactggagctttcttaaattcgaaggagagaatttttactgaggctagaagttcgagttcattccttccttccataaatatttgttacatgcagcattcattttttggaggcacttactgattttatgaaagttaatggaggaaggactgaaatggattagtcacaaaataaaaaaagtcagtacaggtatatgtgctgggacatctcctttccggacccttccctcagcaatgtctccaaggtgctttaagtagctagatgctaagaccggacagattttcttttcccttagatatcaaaataattatttgccagaagggagtgcttgggaatggaggcataaattatcttttttaagttttcatttggatcgaaggtccaactaaatggcagagttcatacctaacatgcaaaaggtcccgatttcaactcctccccaaccaaaccaattatttaggcatagggccaactgaaactttgggaggtgtgtgtgtataaaaataatcttttccaatttttttccacttgggttttcttttttgtttgtctgtttttagcttgatggtgtgaaggagaaagcattggtctcatctgtccgtcagagaatgaagtgctccagtatgcagaagtttggagagagagcttttaaagcatggtacatgacttttctttaacatcacagttcgcatctttctgttgatagctgtctaatcaaaaaagctgtgcctttataaggcactttatgaaaagacaatagaggtgaagtcagaatagcagtaataatttgacatttttgtctcatcgttttgttttaaattatcaaggaatttagaagacttttttttttttttcctaagagaagataggtatttaaaatctcatttgtttataaagactgggactcattttcaaagcttacaaaatgcagtcctagtcagggtgatgaatttacttaatttatgttccctcagtctaaaactgactgttttatgtcttgataattgaatttagccatcaagccagctggagttactacttcgaattttattacaactccaattgtgttcttaatctcatgcttttgtttgaccctctctttgcttttatagctgtagctgagtctgggtgcaccctttaatatggcagccaagaaagatatgcttgctcttctggtacctcacctaaccaacacaataggagagaaggttgagatgactttgtgtgtgttctctagaaactgtctgcacaactttcctcactaagtcattcccactctccaaatgattacagccagatcaaccaaagaagcagcttcaatatgaaactgttacacgggctgtgactggctcctgcaaaggagtcttttactggagtaaaggaactgaaagttattttagaatgagaatcttgggttttgccatagggctcagaggctgtctgctggaacagcttctaggcaggaggatgcgtgtttagaactctccagttctctagaacttaagaacacccacaaccccccaactttaggactcagagaaatatgtcttatggtaaaagatgacgaatcttcatttccagatgagaatgctttcatgccattacgtaatttaatctcccagattctgcatgttgtaacactctaaaagctaacgcctgctggtggtcacagtgctaagatgggatcaaactgaaaacagaagtcagataaggacttaaagctttactgctgcccctttggggaaaatcttctatgattttaatttaatgaggtcttagctttccacacaccaccgccattcatttagtagataattctgccaaagaaaaacataactatcatgccagattagcattacaagaactaatgaatttttataatttgttcagttaatttggttttgaacttcaaaacagtttataataggttttgaacttgttaaaaatagtgtcttttgttattgctttcatacaaatacaatatgataattcattgatggaaaatctgtttgtttgtttttccttttcagggcagtagctcgtctgagccagacattccccaatgctgactttgcagaaatcaccaaattggcaacagacctgaccaaagtcaacaaggagtgctgccatggtgacctgctggaatgcgcagatgacagggtaaggaaggagtcattacatgctcagttgagcgcctgtgtttggcttcatcggagaacaccaagggcgggtggtgtggccggtattctaccaagctctccttggttgctgccactttccagaaaaaaagaccaaaacaaacaaacaaacaaacaaacaaacaaacaaaaaactccccccaaaaatccaaaaaacaaaaccaccaactcaaaatgttttcggaattattcaatgacccgaaactcctttcttcagtcacactttgagaaggcattaatggaagagaacaagccataaaatgtagatttctaagaggttttggggagagaagcaggggctagacatcccacagagcagagaggcttttaaaaatgtgtctatcccttggtggtctttcccctaatctactgtctgcgttaagtacatacagattcactgtgatctcattttctccaacattgtcctattatctccctcccctccctgctccaaagactaaaaatataaccaaataccagaatcctcttctaccatagtaccttccggaaaactcaagacagatattttgtatatgtcagcaagacctgtaattgtgctcattactgattatttaataatacttcatattctaatgggttatttagtttcaaaatgcctacccttaacttgggagaaaattttttttcaagcactaacttttatagaaaaagtaacttgaattatcaaagtcagaaagacatagatttaataattaaaacaaactaatttaaatagatacatagcttgcttcagaacggtctttctcggatctaaatggaatgttttgatcatagtatcctagtccacaggttctgcagcactgcagggctgagaacgagtttacagaaaccactttggttgtgtctggtttagggcaggatgaagacactttcctcacatgacagaggtgcagggacaaaatgtagctaagataattcctctgaaacctttgtttttcattctcacaggcggaacttgccaagtacatgtgtgaaaaccaggcgactatctccagcaaactgcagacttgctgcgataaaccactgttgaagaaagcccactgtcttagtgaggtggagcatgacaccatgcctgctgatctgcctgccattgctgctgattttgttgaggaccaggaagtgtgcaagaactatgctgaggccaaggatgtcttcctgggcacgtgagtagatgcctttcctttcatagctttgtcagagctgcatggtttaggactctacaccaggctttcctttggtgttagcaggacttctatggttctcagaaaaattattcatccttgccattttcagcctttaaaatttccttgaaaagtattttaagtaatttaaaatatttttttatgaaacatacatgcattcagcataaactcaatgttccttacttcataggaatatttctggaaatctttagaaatattctatgaatatgtaagtcatatgtaccacttaatcatttttatgagcatatatcttaaatacatagtgtatataaatatatcacctatctatctacttacatactcagctctatctagctagctctgtgatgatatcaaggatatctatttctatgtatataagcaacatgacactagttgtttcatccttggttgaaaagaccagaatatcacaatatagcaagacatgatgcaactaataacaaatgacaaaatattttcaaaaagtacagcaattatttccattgtacaatggagggagttaatgcattgattgattgattgattgattgattgatagttgcccacccagaatattaaaacaggtttcagtggcaaagctgaacgtgggaagagttctctctgggtcccacattcttgttgtttagttttctgcatggagctcgctccaatgcaggatgactgggctgagaatcactactgaggttggttatggggctctattacatattcatttacttaactcagcctatgttcatctcaattaggttcttgtatgaatattcaagaagacaccctgattactctgtatccctgttgctgagacttgctaagaaatatgaagccactctggaaaagtgctgcgctgaagccaatcctcccgcatgctacggcacagtggtaggtttccatgagccaagaacacctacagtgtggatggcactttctataaggacgagggaagagatgaagtcacgataatcgatatgtaggtcaatacagatgttttcttgagatggaggcaagttctagctctttaagttcttcagcatcataggataaactctttggataaaatataaggaaacctagaacaaccgctctagaaaagaaaggttcaaagagagggaggaatcttttcttgcacaaaatctttattgtagctttccctttttcatactcccaaggataaaattagagaataaagtccaatgccaactaaaattcatttattcaacttagatttaaggactattaacctgtcccaccacactatcaactattagaattaatatctcaaaggagtctgtaaactctatttctttactattttggaggttttggtgaagttttttgttttttgtttttttgttttgttttttttttttttgagaagttttacttgcaagtttgttgtagagggaatcaggactcctctcagctcatactagattctgaaccacttgggaccagaagagaatcgtactttacaaagaaactgctgaataccagataccactcagtggttgagcctcagggtggatacactcatctcagagacttcaagagagaccttagagagattgctaaaagtgatggccactatctagtgaacttctgctgtgcaccagttgatgttaatctcatccacttagtgggttaagagaccagttctggtgctgaggacacgtagcccagtacagtgcagacatgatccatctgaagcttgggtgtggaaagaacagtctcacaacaagaaagcacatcaggtggcctgcttcaagtacagccattgaatcccagagcctgaagattctcatttgacttgtgccaaatgaccttgcaaatacaaggaacaatttaaacgcaaggtgacagatgtggcacaaaagatctcctgacttgtcttttacttgtctttggacagagggatggcagtagtgtgaagtggcctactttgggctttcaggaaggggggctgtaaacacaattcttttattttgcagcttgctgaatttcagcctcttgtagaagagcctaagaacttggtcaaaaccaactgtgatctttacgagaagcttggagaatatggattccaaaatgcgtgagtagttttatcagctagttttttttttcttgatcagtttgtgattatttaaaacagcatacaggctatccagcatatggctttcacaatgaaaacattatttataatacagatctatcaagaaattctggcaaggagacagcttagttagagggacgaagagaactgtaaccctgcataatataaacactgatctcttgggagaagaagttttgaggactcagcaaatcttgatacattagaattcagagtgtccttcaagggttaggtggagtttatgagcaaacaatagaataatatttagtagaaaaagaagtagcatgctttgggcagcagaaactcaagaaccgatagaaatgctgaacacaaaaatataacaaaagatttagataaaatggaaacgttacatgaataggagttcacttggggaaaacattggaatttgggagttacagataaactttggtagttgtaaccttgtcttcctatggaatttcaatctcagagatagagactgaatggtcttctagagtcatttcatagaactttatctatggaagtaaagggagcatactggaagagacacattattccttgtttatttcatatacaattttagcactcttgcaactctagagtttggagtgggcacttcttcaccgaaataaattgacttttattggttatggtacattattaaacaccagatgctattaattgctagataatgtgtcaggcagacatttttttcctttcctttaatccatgcatggtttccagtaaaccatttctcttttcacctctatcttttgagtccgtcacaaagttgatatgagtaagtttgtgttagaatttatttaaagcagcactgagtacattaatgccattgggttagagaaatgtcacttccttatgattttactacagatttaaacttaaggtcttatgctcccagtaggtttttttttttttttttaacagatacttggtttctcaggacaaggtcttcttccagtactatgccaccctagtagtaaagataactttgattagtggggaaaaagtcttagttgggttgggtgaatcgtctcttcttgaaatctattacatctggccagttttctgcctggattaaaccatgtaacttattttttgctactcagcattctagttcgctacacccagaaagcacctcaggtgtcaaccccaactctcgtggaggctgcaagaaacctaggaagagtgggcaccaagtgttgtacacttcctgaagatcagagactgccttgtgtggaagactatgtgagtcttttaaacaccaacaaagttaacagggctgggttgttatctttagaccctgataaatctaactttcaggagcaaggggggtcctaatacatgcatatgtatgtgtgtggtatctgggtcatggccccccatatctaactgagaaagaaacagtttttaataagtctcacatgtgtagtttcaaagatagataaattgccatgccaatcaaggctggatttctaatggctaactccatatgacagtttttagtgtaccagaaagtggatgtttgtgaaatacttgtgacctttctactctctcttctttagctgtctgcaatcctgaaccgtgtgtgtctgctgcatgagaagaccccagtgagtgagcatgttaccaagtgctgtagtggatccctggtggaaaggcggccatgcttctctgctctgacagttgatgaaacatatgtccccaaagagtttaaagctgagaccttcaccttccactctgatatctgcacacttccagagaaggagaagcagattaagaaacaaacgtgagcaatatttttttattgcatctattttcatactgcatatgtattgatagtgagaactgacaactggacatttttttgttttgatgcagtgattatatattccttagagagaagtgtttagatgttggcatcactgagttgaaagagtgtcaaaattttttgtctctgtgaaaaaattttctattaaaatctttcattcaacttatctttattactgtgggcaaaaaccacagtagaataaaattctagtggaggcccaatagaagacactaaataccagttagtggatatagatagaagaactggtcatggaaatcatacaagtatttattgcaaggtaggaatagttgattgaaaatgttccacgtacatctacacaatggagtactactcagctattaaaaagaatgaatttatgaaattcctagccaaatggatggacctggagggcatcatcctgagtgaggtaacacattcacaaagaaactcacacaatatgtattcactgataagtggatattagccccaaacctaggatacccaagatataagatataatttgctaaacacatgaaactcaaggagaatgaagactgaagtgtggacactatgcccctccttagatttgggaacaaaacacccatggaaggagttacagagacggagtttggagctgagatgaaaggatggaccatgtagagactgccatagccagggatccaccccataatcagcatccaaacgctgacaccattgcatacactagcaagattttattgaaaggacgcagatgtagctgtctcttgtgagactatgccggggcccagcaaacacagaagtggatgctcacagtcagctaatggatggatcatagggctcccaatggaggagctagagaaagtagccaaggagctaaagggacctgcaaccctataggtggaacaacattatgagctaaccagtaccccggagctcttgactctagctgcatatatatcaaaagatggcctagtcggccatcactggaaagagaggcccattggacttgcaaactttatatgccccagtacaggggaataccagggccaaaaagggggagtgggtgggcaggggagtgggggtgggtggatatgggggacttttggtatagcattggaaatgtaaatgagttaaatacctaataaaaaatggaaaaaaaaaaaaaaaaaaaaaaaaaaaaaaaaaaaaaaagaaaatgttccacgaagaagccatgcaggggcaaggcaacgtcatgggtgtgacttttgagaatggagtaagaaacagctggaagtgtacataggaggttcgaaccctgctgaagggagaggttccaatactacaaaatgtagcgggatattgtcatcacctttggggacatgtcatcatggtccccagacagagttacaaaactcatcccctacacagcactatgtctctggtactgtttgttctacagatgtcaacaacagaggcccagccatctcctattgcttggcttgtcagtctttctagcctccccattattaatttcaaatggggcaggtgttaggagggcaaaaatccacatattaagtgcaaagcctttcaggagatttcctgaaactagacaaaacccgtgtgactggcatcgattattctatttgatctagctagtcctagcaaagtgacaactgctactcccctcctacacagccaagattcctaagttggcagtggcatgcttaatcctcaaagccaaagttacttggctccaagatttatagccttaaactgtggcctcacattccttcctatcttactttcctgcactggggtaaatgtctccttgctcttcttgctttctgtcctactgcagggctcttgctgagctggtgaagcacaagcccaaggctacagcggagcaactgaagactgtcatggatgactttgcacagttcctggatacatgttgcaaggctgctgacaaggacacctgcttctcgactgaggtcagaaacgtttttgcattttgacgatgttcagtttccattttctgtgcacgtggtcaggtgtagctctctggaactcacacactgaataactccaccaatctagatgttgttctctacgtaactgtaatagaaactgacttacgtagcttttaatttttattttctgccacactgctgcctattaaatacctattatcactatttggtttcaaatttgtgacacagaagagcatagttagaaatacttgcaaagcctagaatcatgaactcatttaaaccttgccctgaaatgtttctttttgaattgagttattttacacatgaatggacagttaccattatatatctgaatcatttcacattccctcccatggcctaacaacagtttatcttcttattttgggcacaacagatgtcagagagcctgctttaggaattctaagtagaactgtaattaagcaatgcaaggcacgtacgtttactatgtcattgcctatggctatgaagtgcaaatcctaacagtcctgctaatacttttctaacatccatcatttctttgttttcagggtccaaaccttgtcactagatgcaaagacgccttagcctaaacacatcacaaccacaaccttctcaggtaactatacttgggacttaaaaaacataatcataatcatttttcctaaaacgatcaagactgataaccatttgacaagagccatacagacaagcaccagctggcactcttaggtcttcacgtatggtcatcagtttgggttccatttgtagataagaaactgaacatataaaggtctaggttaatgcaatttacacaaaaggagaccaaaccagggagagaaggaaccaaaattaaaaattcaaaccagagcaaaggagttagccctggttttgctctgacttacatgaaccactatgtggagtcctccatgttagcctagtcaagcttatcctctggatgaagttgaaaccatatgaaggaatatttggggggtgggtcaaaacagttgtgtatcaatgattccatgtggtttgacccaatcattctgtgaatccatttcaacagaagatacaacgggttctgtttcataataagtgatccacttccaaatttctgatgtgccccatgctaagctttaacagaatttatcttcttatgacaaagcagcctcctttgaaaatatagccaactgcacacagctatgttgatcaattttgtttataatcttgcagaagagaattttttaaaatagggcaataatggaaggctttggcaaaaaaattgtttctccatatgaaaacaaaaaacttatttttttattcaagcaaagaacctatagacataaggctatttcaaaattatttcagttttagaaagaattgaaagttttgtagcattctgagaagacagctttcatttgtaatcataggtaatatgtaggtcctcagaaatggtgagacccctgactttgacacttggggactctgagggaccagtgatgaagagggcacaacttatatcacacatgcacgagttggggtgagagggtgtcacaacatctatcagtgtgtcatctgcccaccaagtaacagatgtcagctaagactaggtcatgtgtaggctgtctacaccagtgaaaatcgcaaaaagaatctaagaaattccacatttctagaaaataggtttggaaaccgtattccattttacaaaggacacttacatttctctttttgttttccaggctaccctgagaaaaaaagacatgaagactcaggactcatcttttctgttggtgtaaaatcaacaccctaaggaacacaaatttctttaaacatttgacttcttgtctctgtgctgcaattaataaaaaatggaaagaatctactctgtggttcagaactctatcttccaaaggcgcgcttcaccctagcagcctctttggctcagaggaatccctgcctttcctcccttcatctcagcagagaatgtagttccacatgggcaacacaatgaaaataaacgttaatactctcccatcttatgggtggtgaccctagaaaccaatacttcaacattacgagaattctgaatgagagactaaaagcttatgaactgtggctttcctttgtcagtgggactctaagaatgagttggggacaaaagagataggaatggctttaaaggtgactagttgaactgataaagtaaatgaactgaggaaaaaaaatatcactcaagatgacaggctaaaaccttgagaagtcctgctggaagaggaaactgggtgatcgggaggggtgctggattgatgaatctaaagagttgcgtggtcaaagggtcatgttaaaatttagatgctgccttcactgctgggttcttctctctattccaggagccagttgttcatatacactttggtctatgaattttatagacttgtccaagtgctgtgtatgagtttacatacacagtcatttatagccatatgacatttttattacagacctggcttcagattgtgcacattattcttcaaccagctcttacttatcctttatagctttactttaagcatagtacttgaagtgatgatgaggccatattaaagaaaggtccttttcactcccctcgtgccccacactctcttctccttcaacctgagctttggcctcctggtgaaagtatcaaagagaaaaagactgggagggtagaatggagattgggccctggcctgatggaaaccattaagtttagccagacaattcgagtaaggtgttgctatcaactgggctaataacgagccaggtgtggaagcactatctgaagggcactggttcagtacccactccgacataccaaaggggagcttaaaactttaagagaattatgcctttcaagcactatttcctgagccacttctgctttccacagagtcaacacatgaaactaaagagcccagtgagctctgtttttgagagggcatccatggggaaataattcctatctgtctgccatctatctgtttttcttgtattttgcctcatgatccagaaggctgggttgctagaatattccaggcctgtgtgtgtgtgtgtgtgtgtgtgtgtgtgtgtgtgtgtgtgtgtgtgtgtgtgttagagatggtctcatagaacactgggaacaggttatgttgtcagcgtgacttgacacaggatgttaggctgatcatttatttccttaaaggcggtgtttgccaagtttcctcactgtgcagttattactttccccttgcagagtctttctgggggagcaaaccgttaactacagctctctcaccaaagtgagacatgaaaggtactaagcttctggaaggggaacagtcctggttcctttcattagagaatggtattgcaaagatctgtttactggctctgcccctcgttagtgagggctcactgtttatacaactttgtagagtagaactaagaaacataaagtatgaagacatatgcacacacatcatcaccatcatatctctctctctctccctctccctctccctctccctccccccccctctctctctctctctctctctctcatctatctatgcacataagagtttcaactgataattctgactctctttcagagccacaaggctcagtccaactttcctcttgctgatctataagtgtccttttgattgtgaggacttgtcacccactatctgccctcagatatatatttatattatatatttgtttaagcccaggatatatgttaaggagcttcagaattattgacctcatacttccataagaaccatcaacaactaggatatagtacttacatggaatttcttttgtctttaaccttatagtttttaggcaaaatattgttttccaaagttacttaggtcaattctatttttttctttatattcttcagtgaggttatggtatagtttagtttgaatcacatttacataggatacaagacaaatttaggctgtcttttgaatgattctttggtttatactgcacagatcggtccattgtgtctttcctatatttcagtagagaagcctccgttgatagtataaaaaggtagcagagagggtagcaagcattcttctcccagtgcactctctgctaatgttatctagggcgttcattcccatctctccacaaactccatctcaattctctctcagtcaccaggagtggcatgcctacttcatcccaggtatttgaagactatttgtctgtcactctcttgggcctttttagtgcatcctatcttgctttcttcagtgtgttcacactgtgtttcctcaagttggtattgcctttccaggaatataaccacttcccttttcttatagtcagctgtgtaactactctttttttgtgactataagacataggtgtagtgaccaacgtcactgaacacagggtagaaatggtatagaaggtgcattactagatgtttatgctaaagaaaactaaatagaaccctcacatgaccagaggcttgccctatggttttcatcaaagccacatcacaataacatctaagtgagttaaccgaggccagaatccatagtgacatcatcagtgctatagtagagataatgatgttacgacattaaattaaatgcttaatgagaaagaaaatatggtggcaagatgatttgtttgcatcaatattgattcctcagagcaaatgagtcatgagacatgacattaccatggttttcatgaggttgaaggtacaaaagttagcaagaatacgatgcacttgacacggaagaagacagaacagtcatgtgttactcacggattctggagttaaggacagggtgtgaatatagtggtctcacaagataaaaacagcactgaaaaattcctttcacctagcaatgtagctgtcatagtgtcatgatataatcacacaagctaacatcacagaatcctgattcaccctgcactcccaaaatggtgaatagagtaaattgtgaacctacatggatctgagtcatgcaatcttgccctttatggtaataataattcattttattttaaaatgtgaaataactccccaaattaggtacatcaaaaatgttatattcaataatgataaatctaattactctttcatatggttgagccacttgtgcctcgatttatttcatccaggttcatccagcttgcatttgttatgtgaccaactgattagcaaataggtgaatattcttgtgtgacgctaaaaaagaacattaatattttgagataagtggggaaaggaagaattatcctttgactaatggaagatttaccttaatattatatttcatggttgatggataagtagagtaataaatgatttgttcaagttatttcattcacagaaaccttgtttaatttcttcaactgtagactgtaaactttagactagccaataatttaaaatattatatgcaagtgattaccatttatttgtatttgttctatatattaactcaggttacttcagtttctctaaatatgtttgactgattccttaaaaatttgatctcaagaatctctagcagagactcctagcaatgggggacacagaggctgagctgtgtctgtaaccaggcaagtggagggattaggacactaaagcagccagaaaacctttgacctatagttcattctgcctgcagagtgttctggtataggagcctagtagaatggtcatcagagagaccagagtggctttagccaccaactgatggggatagatagagtaccacagccaaacattaggcagaacttggtgaatcttgtggaggagggggaggaagggttggaggaaccaaaggggtcagggacactataagaacatggaccacacaaacatctacctgaaactcacaggggctcagagagatcaggaagcctgtaggggtctgacctgggtcctctgcatatatgttatagttgtatagcttggtgttcttgtgggattcctaacagcgggcacaggggctgtccctccctcttttgcttgcttgtggggcccttttcctcctacagggctttgtccagccttgatgcaatggtgtgtacctggtgttattgtagcttgttttgccatgtttgattgatgttcctgtgagacttgctctcttctaaggggaggcagaagtggatctggggaaggggaggtggggatggaagggaattgcagtcaggatataacatatgagagaatagagaatgaaagaacctcaagaggggagctgagttgaggagcagtatcactggtgagcaagggtggatggcctgggtgtcataaagatggagaagagtacattctgtttgaggagggtgaagctctcattcattgcaaccagagtaatgggcttgtgatttatgaaggtcccaaaccttctagtgattgaagcaacacaagacaaagctgtgggggttaagattagtcccggtctttggaaaactataaaaaataaagctcagagtttggctgcaacagaatattttcccaaattaagatgcttctgcactgtggcaaatatgattgcttcttaggttgtcctcaaacaccacagagaacaagcaactgctcagaagtctcttcttatgaaggcatattatgggctgcgggggggggggtgtttctgaatcacctgtaagccatcaccagctttgctatatgctacagtttaagcattcatgtcctttctaaattcttatgtggagacctaatttccaaggtgacagtaattgctaaaggcatttagcaagttattaaaccactgggactctgttcttttttttaaattaatttatcattttatttattttcattccaaacattgcccttcctttcaccccatactccctcccctttgcctttgagaagttacccccacagggcatcccccttccctgtggcatgaagtctctaaaggattaggcacatcctctcccactgaggccagacaaagcagtcctccgctatatatatgctatctctgggaactcctaggggtttgggttagttgatattgttggtcttcctatgggcttgccatccccttcagttcctttaatccttccactaattcttccatgggggtccctgaccttagtctaatggttgactaaaagtatctgcatctgtctcaatcagctgctggtagagcctctcagaggacggccatgttagtctcttttctgcaagcacaacatagcatcagtaatagtgtcagggcttggtaccagcccatgggatggatccccagatgggccagtccctggtcagctattccctcagtctctgctccatttttgtccctatataatttttagataggaacaattctgggtcaaacaatttgaaggtgggttgatgactctatccttccagtgggtgccctgtctaccttctggaggtggtctcttcaggttccatccccctactgttggacattttgactatgttcatccccattgagtcctggaagcctctcacccctacttctctgggactttctagaggttcccccgccccctccccaccccctccacccttgcagctgcatatttccattcattctcctgaccctctgggcttctctcatgtttaccctgaccccctcccccattcctgatcctgttcccctttcccccctcccctctcccacccaggtgcctccctccttgtgcctcctgtgattttgttcccccttctaagtgggattgaagcatcctcacttgggtctttcttcttattaaacttcttatggtctgtaggttgtatcatggataatctgtaatttttggctaatatccacttaaaggagtacataccatgcatgtccttttgggtctgagctacttcactcaggaatgatattttctagttccatccatttccttgcaaaatttatgatgtccttgtttttaatagctgaatagtattccattgtgcaaatgaaccataatttctgtttctattcttctgttgtggaagatctgggttgtttccagattctggctattatgaataaggctgctatgaacacagtggggcatgtatctttgtggtatggtggagcatcttttgggtatatattcagaattggtatagctggttcttcaggtaggacaatttccaattttctgaggaacagccagattgatttgcagagtggttgtacaagcttgcaatcccagcagcaatggaggagtgttcctctttctccacatcctcaccagcatctgctttcacctgagtttttgatcttagccattctgattggtgtgaggtggaatctcagggtctatgatatttacatttccctgatgactaaggatgttgaacatttctttttgtgtttctcagccattcagaatccctctgctgagaattctctgtttagctcagtaccccattttttaattggattttttttttggagtctaacttcttgagttctttatatatttttgatattatccctctatcggatgtagagttaataaaggtcttttccaaaccagtaggttgctgttttgtcctattaatagtgttctttgccttacagaaacttttcagtttcatgaggtccagtttgtcagtaggggttctgttcttatggatagattagtaattttgttttgagaactgatctcgatatatagctcaggttggcctcaaactcgtggcaatcctcctacctcagcctactgagttctgggatcacaggcatctgctgtcacagccagttggttattctcaagaaagaggttgagggatgttactagtgttgctggtgtttctgtcccttatgccatttatggcactatatttgaagaatgacctatgttagacattgagtctatggggaccttgtgaccttgaacccccaaggcttcagaatagaaaaatacatttatattatctgtaaatttcttcatccctagcattttgtgagagcagcgcaaagaaaaactcatcagcaaaggagtgtccagcagggagtctggcagaaggcttagcattcatttgatatttcctacatctgcccattgctctagcagctgggaagagggctccatttgaagagatcaccaccagacaagtatttagggaggaatttttctgtatgtgtcattgttccagatgtggtgtttccccaaagtggtttatagtttgactgtgtggaccaattttctattttaagggcccctacccctacccagcctgtccaaagaggctaacccaaagaggggcaaacactgcatgtagaatgtacatttttgtgaacctggttttcagttgacactccactgacattgctgtagctctgcttgacctatatcgatgtctgggtgcacctttattgactttgacatatttctgtccttttaagttcgacaggcagctcggttgcccaatttgtctctgatctcttttagtttgttcctgtgtgggggaaaaaaaaatattttctcccctaaacaccaaagatccaaagataaaattcctttgatgaaggaaaacagtcctttttttttcccattttgattttcctttgagcaaaacatggtcacagcaagtgtggaaggcatttccccctagatcagattaaactaaacaaaagagggagagttgacagaaaccaaccaaggggacagttacgtgacatctggggctagatgtgaagagactgaggaagaaagcagcagagaagacattggttaggttcaacatgagcagtgtgatgctccttacacatcttcacacacagcagaaacatctttctatgtttgacttctagttctttgatgtaatcatatgttaggggttccctgagaaagagtggggagggtcttcacatatggactcaagaaacatgtataggataagtaaagagaacttaacagcatcagggaatggggaagaaaatgtcaaggcaaagtgtgtgctgctttcttaaatccttgaggtcccagcgatatggagactataatagccatgagtctgttttctacccacagataacaagagaaaagggtaggtgtaacaaaatcttcagagtcaggagggtcctagtggtctgaaacactccttgtagttggagtctgtctgctttgcagggttccttttaaagtctgaagatgacaagcattggcttcctcacaagatgccagattccatcccattctcacataggctcctgtgcctgtggaatcccagccttagataagagaatgcatgaatatttcacaaacattctgttaccagaagagcatgagacatgcgtcattcatttgagggcataaagtcttactcccatttgattcgatgacacttaatttctgtttgtaaagattgtgctgtgtttcataggtgctaaccaccatgggaaattcaagaagtgaattcaggtggctcacagcatactaggatgtgagggcgcatgggaagcaccgtgaggaaacgatctaaagagcgttagacgttgtcagagagggacgttctccagtgagcacttgggtacacacacagacaattatatgatctgtaccttgaagagtagtggtaagatttgataagcattgatgggtaaggcactagaaatgtaagaactgtgctttcagggacacatatttgcacacacacacacacacacacacacacacacacacacacacaaaggatcctgaaagagtgaaagtcattttctgctaactcacatgtgcagtttaactgtacattttaaatataccagtcctaagaatggtgatatttactctcatctttttagaaatatttgtagccacccagcacttaggatacatcattccacctccacacgaatgtacacttgaggagaggtattgtttctgtgatacaaatgataaaatccagattcagtcatattacattatttgctgaatgtcgtatggcaagcaacgggcacaagcaagattagcatctttttgatggcagagttcagtttaccgggtcacattgtacctgggaagattcaaggatttatggaaaaagtcaacaacaggagtcagagcagccggaaaagcatggactctgtacttaggactgcgctttgagcaatggcacagcaagctttaaccctgtttgcagtcagcacacaaactgtggttcaaagctccactttatctcttcttgtggcagtcgctgtctctgattctgctctatcgcacagcttctcattcactcccatggccatactaacccccggtaagctggagattttccagtatccatcccttctgtgtagttctggagataggaagcgataagccaatgcctgtcaacttcctcaacctacaaatcagggtgttgtgcccacaacattcctgggaataaaaagcaagattgggttccattaagtcactacatactaaccagaaccattagggtaaaccagcctctgcctccgtctctcggtctctcaacctcccttcctccttcacaatctaggacttagtatgtgtgaacttagcttttaaatctaattctttctattttacttcattcacattactgacctctatgtgtatttctcattccctatcagcaatgctttcacccgtgtggcttattagactacaccttgcagcaggttctttattggtctgctctcctttgccagtggcagagacattttcttttatttatttatttatttatttatttggtattttcctcatttacattttcaatgctatcccaaaagtcccccatacccacccccccaatcccctacccacccattccccatttttggccctggcgttcctctgtactggggcatataaagtttgcaagtccaatgggcctctctttgcagtgatggccgactaggccatcttttgatacataggcagctagagacaagagccccggggtactggttagttcatattgttgttccacctatagggttgcagttccctttagctccttgggtaatttctctagctcctccattgggggccgtgtgacccatccaatagctgactgtgagcatccacttctgtgtttgctaggcccctgcatagtctcacaagagacagctatatctgggtcctttcagcaaaatcttgctagtgtatgcaatggtgtcagcgtttggaagctgattatgggatggatccctggatatggcaatcactagatggtccatcctttcgtcacagctccaaattttgtctctgtaactccttccatgggtgttttgttcccatttctaagaaggggtaaagtgtccacactttggtcttcgttcttcttgaatttcatgcatttagcaaattgtatcttatatcttgggtatcctaagtttctgggctaatatccacttatcagtgagtacatattgtgcgagttcctttgtgattgggttacctcactcaggatgatgccctccaggtccatccatttgcttaggaatttcataaattcatttttttaatagctgagtagtactccattgtgtaaatgtaccacattttctgtatccattcctctgttgaggggcatctgggttctttccagcttctggctattatcaataaggctgctatgaacatagtggagcatgtgtccttcttactggttgggacatcttcattttcaaaggacaatgatgattttttttttatcagctcccctttgtggttctccccattgtcctcagaggaagtgggagcacggtgagatccttaagatacagcctctgccagcctcatcaaaaacactccccctgttaggttggtgatgggtaaagcacttagcttcataagctcaacagcctgagttccatcctggagctcacggaggagtggaaagaaagaacagagtctacagggtcgtcttctgactgccatgagtacgtgccaatgtttcgtgtcacagggagttgaacccagggtctcgcacaaactcggtgagctacaatccgctgagttctgccatttctgaactcagtgtttcacagacactgcctttcttctcattcctgaaatatgctcttctctccctcagtgggccttccattgccttttacatccctcaagttcagaggtaagcctccttatttagcctacttaccaccatttctttcggtctctttgaaacgtgactttctcccaaaatacctcacccgtacaaagatgctaggagctcttttccttccatataacacaacatccactatagaacttagatatagtggatgcagtcacttgtccaccctatgagacatggtctcagtcagtaatcctgcctaattcttactgctgactcttcccttcagcgaatatcatctcaatgcagagttcacattttccttgaatgaataaatcaaaccctcatctgttgagttctactctgtggcgggttctattctgagtgattaattcttactagtttatccaaccttcatttaatagaaagatactaatttttcataattttatagataaatatattgagaataaagctggtttgagtttttgtcatctggctgacagtttgaatagtcaagggtagagcctttcatagactaaagtccagtttgtttaaccatattgcttctgagaggtttcatgggctcaggaagtgacaaacagaaccagacatagagctatgagaggtatgtggtgtgagctcagtatttgcgacaaagctttgagcaacagcacacgtgggcttagggttgtttgcagttggtattagagacctcacacaaagtcatgtggcagataacggagagggcaaaattcaaacccagtcgccatatgttcatgtttaactatgtccctgtgtaccgttctga

SEQ ID NO: 24 - DNA, 39715 bp, Mus musculus
tcagaacggtacacagggacatagttaaacatgaacatatggcgactgggtttgaattttgccctctccgttatctgccacatgactttgtgtgaggtctctaataccaactgcaaacaaccctaagcccacgtgtgctgttgctcaaagctttgtcgcaaatactgagctcacaccacatacctctcatagctctatgtctggttctgtttgtcacttcctgagcccatgaaacctctcagaagcaatatggttaaacaaactggactttagtctatgaaaggctctacccttgactattcaaactgtcagccagatgacaaaaactcaaaccagctttattctcaatatatttatctataaaattatgaaaaattagtatctttctattaaatgaaggttggataaactagtaagaattaatcactcagaatagaacccgccacagagtagaactcaacagatgagggtttgatttattcattcaaggaaaatgtgaactctgcattgagatgatattcgctgaagggaagagtcagcagtaagaattaggcaggattactgactgagaccatgtctcatagggtggacaagtgactgcatccactatatctaagttctatagtggatgttgtgttatatggaaggaaaagagctcctagcatctttgtacgggtgaggtattttgggagaaagtcacgtttcaaagagaccgaaagaaatggtggtaagtaggctaaataaggaggcttacctctgaacttgagggatgtaaaaggcaatggaaggcccactgagggagagaagagcatatttcaggaatgagaagaaaggcagtgtctgtgaaacactgagttcagaaatggcagaactcagcggattgtagctcaccgagtttgtgcgagaccctgggttcaactccctgtgacacgaaacattggcacgtactcatggcagtcagaagacgaccctgtagactctgttctttctttccactcctccgtgagctccaggatggaactcaggctgttgagcttatgaagctaagtgctttacccatcaccaacctaacagggggagtgtttttgatgaggctggcagaggctgtatcttaaggatctcaccgtgctcccacttcctctgaggacaatggggagaaccacaaaggggagctgataaaaaaaaaatcatcattgtcctttgaaaatgaagatgtcccaaccagtaagaaggacacatgctccactatgttcatagcagccttattgataatagccagaagctggaaagaacccagatgcccctcaacagaggaatggatacagaaaatgtggtacatttacacaatggagtactactcagctattaaaaaaatgaatttatgaaattcctaagcaaatggatggacctggagggcatcatcctgagtgaggtaacccaatcacaaaggaactcgcacaatatgtactcactgataagtggatattagcccagaaacttaggatacccaagatataagatacaatttgctaaatgcatgaaattcaagaagaacgaagaccaaagtgtggacactttaccccttcttagaaatgggaacaaaacacccatggaaggagttacagagacaaaatttggagctgtgacgaaaggatggaccatctagtgattgccatatccagggatccatcccataatcagcttccaaacgctgacaccattgcatacactagcaagattttgctgaaaggacccagatatagctgtctcttgtgagactatgcaggggcctagcaaacacagaagtggatgctcacagtcagctattggatgggtcacacggcccccaatggaggagctagagaaattacccaaggagctaaagggaactgcaaccctataggtggaacaacaatatgaactaaccagtaccccggggctcttgtctctagctgcctatgtatcaaaagatggcctagtcggccatcactgcaaagagaggcccattggacttgcaaactttatatgccccagtacagaggaacgccagggccaaaaatggggaatgggtgggtaggggattgggggggtgggtatgggggacttttgggatagcattgaaaatgtaaatgaggaaaataccaaataaataaataaataaataaataaaagaaaatgtctctgccactggcaaaggagagcagaccaataaagaacctgctgcaaggtgtagtctaataagccacacgggtgaaagcattgctgatagggaatgagaaatacacatagaggtcagtaatgtgaatgaagtaaaatagaaagaattagatttaaaagctaagttcacacatactaagtcctagattgtgaaggaggaagggaggttgagagaccgagagacggaggcagaggctggtttaccctaatggttctggttagtatgtagtgacttaatggaacccaatcttgctttttattcccaggaatgttgtgggcacaacaccctgatttgtaggttgaggaagttgacaggcattggcttatcgcttcctatctccagaactacacagaagggatggatactggaaaatctccagcttaccgggggttagtatggccatgggagtgaatgagaagctgtgcgatagagcagaatcagagacagcgactgccacaagaagagataaagtggagctttgaaccacagtttgtgtgctgactgcaaacagggttaaagcttgctgtgccattgctcaaagcgcagtcctaagtacagagtccatgcttttccggctgctctgactcctgttgttgactttttccataaatccttgaatcttcccaggtacaatgtgacccggtaaactgaactctgccatcaaaaagatgctaatcttgcttgtgcccgttgcttgccatacgacattcagcaaataatgtaatatgactgaatctggattttatcatttgtatcacagaaacaatacctctcctcaagtgtacattcgtgtggaggtggaatgatgtatcctaagtgctgggtggctacaaatatttctaaaaagatgagagtaaatatcaccattcttaggactggtatatttaaaatgtacagttaaactgcacatgtgagttagcagaaaatgactttcactctttcaggatcctttgtgtgtgtgtgtgtgtgtgtgtgtgtgtgtgtgtgtgtgtgcaaatatgtgtccctgaaagcacagttcttacatttctagtgccttacccatcaatgcttatcaaatcttaccactactcttcaaggtacagatcatataattgtctgtgtgtgtacccaagtgctcactggagaacgtccctctctgacaacgtctaacgctctttagatcgtttcctcacggtgcttcccatgcgccctcacatcctagtatgctgtgagccacctgaattcacttcttgaatttcccatggtggttagcacctatgaaacacagcacaatctttacaaacagaaattaagtgtcatcgaatcaaatgggagtaagactttatgccctcaaatgaatgacgcatgtctcatgctcttctggtaacagaatgtttgtgaaatattcatgcattctcttatctaaggctgggattccacaggcacaggagcctatgtgagaatgggatggaatctggcatcttgtgaggaagccaatgcttgtcatcttcagactttaaaaggaaccctgcaaagcagacagactccaactacaaggagtgtttcagaccactaggaccctcctgactctgaagattttgttacacctacccttttctcttgttatctgtgggtagaaaacagactcatggctattatagtctccatatcgctgggacctcaaggatttaagaaagcagcacacactttgccttgacattttcttccccattccctgatgctgttaagttctctttacttatcctatacatgtttcttgagtccatatgtgaagaccctccccactctttctcagggaacccctaacatatgattacatcaaagaactagaagtcaaacatagaaagatgtttctgctgtgtgtgaagatgtgtaaggagcatcacactgctcatgttgaacctaaccaatgtcttctctgctgctttcttcctcagtctcttcacatctagccccagatgtcacgtaactgtccccttggttggtttctgtcaactctccctcttttgtttagtttaatctgatctagggggaaatgccttccacacttgctgtgaccatgttttgctcaaaggaaaatcaaaatgggaaaaaaaaaggactgttttccttcatcaaaggaattttatctttggatctttggtgtttaggggagaaaatatttttttttcccccacacaggaacaaactaaaagagatcagagacaaattgggcaaccgagctgcctgtcgaacttaaaaggacagaaatatgtcaaagtcaataaaggtgcacccagacatcgatataggtcaagcagagctacagcaatgtcagtggagtgtcaactgaaaaccaggttcacaaaaatgtacattctacatgcagtgtttgcccctctttgggttagcctctttggacaggctgggtaggggtaggggcccttaaaatagaaaattggtccacacagtcaaactataaaccactttggggaaacaccacatctggaacaatgacacatacagaaaaattcctccctaaatacttgtctggtggtgatctcttcaaatggagccctcttcccagctgctagagcaatgggcagatgtaggaaatatcaaatgaatgctaagccttctgccagactccctgctggacactcctttgctgatgagtttttctttgcgctgctctcacaaaatgctagggatgaagaaatttacagataatataaatgtatttttctattctgaagccttgggggttcaaggtcacaaggtccccatagactcaatgtctaacataggtcattcttcaaatatagtgccataaatggcataagggacagaaacaccagcaacactagtaacatccctcaacctctttcttgagaataaccaactggctgtgacagcagatgcctgtgatcccagaactcagtaggctgaggtaggaggattgccacgagtttgaggccaacctgagctatatatcgagatcagttctcaaaacaaaattactaatctatccataagaacagaacccctactgacaaactggacctcatgaaactgaaaagtttctgtaaggcaaagaacactattaataggacaaaacagcaacctactggtttggaaaagacctttattaactctacatccgatagagggataatatcaaaaatatataaagaactcaagaagttagactccaaaaaaaaaatccaattaaaaaatggggtactgagctaaacagagaattctcagcagagggattctgaatggctgagaaacacaaaaagaaatgttcaacatccttagtcatcagggaaatgtaaatatcatagaccctgagattccacctcacaccaatcagaatggctaagatcaaaaactcaggtgaaagcagatgctggtgaggatgtggagaaagaggaacactcctccattgctgctgggattgcaagcttgtacaaccactctgcaaatcaatctggctgttcctcagaaaattggaaattgtcctacctgaagaaccagctataccaattctgaatatatacccaaaagatgctccaccataccacaaagatacatgccccactgtgttcatagcagccttattcataatagccagaatctggaaacaacccagatcttccacaacagaagaatagaaacagaaattatggttcatttgcacaatggaatactattcagctattaaaaacaaggacatcataaattttgcaaggaaatggatggaactagaaaatatcattcctgagtgaagtagctcagacccaaaaggacatgcatggtatgtactcctttaagtggatattagccaaaaattacagattatccatgatacaacctacagaccataagaagtttaataagaagaaagacccaagtgaggatgcttcaatcccacttagaagggggaacaaaatcacaggaggcacaaggagggaggcacctgggtgggagaggggaggggggaaaggggaacaggatcaggaatgggggagggggtcagggtaaacatgagagaagcccagagggtcaggagaatgaatggaaatatgcagctgcaagggtggagggggtggggagggggcgggggaacctctagaaagtcccagagaagtaggggtgagaggcttccaggactcaatggggatgaacatagtcaaaatgtccaacagtagggggatggaacctgaagagaccacctccagaaggtagacagggcacccactggaaggatagagtcatcaacccaccttcaaattgtttgacccagaattgttcctatctaaaaattatatagggacaaaaatggagcagagactgagggaatagctgaccagggactggcccatctggggatccatcccatgggctggtaccaagccctgacactattactgatgctatgttgtgcttgcagaaaagagactaacatggccgtcctctgagaggctctaccagcagctgattgagacagatgcagatacttttagtcaaccattagactaaggtcagggacccccatggaagaattagtggaaggattaaaggaactgaaggggatggcaagcccataggaagaccaacaatatcaactaacccaaacccctaggagttcccagagatagcatatatatagcggaggactgctttgtctggcctcagtgggagaggatgtgcctaatcctttagagacttcatgccacagggaagggggatgccctgtgggggtaacttctcaaaggcaaaggggagggagtatggggtgaaaggaagggcaatgtttggaatgaaaataaataaaatgataaattaatttaaaaaaaagaacagagtcccagtggtttaataacttgctaaatgcctttagcaattactgtcaccttggaaattaggtctccacataagaatttagaaaggacatgaatgcttaaactgtagcatatagcaaagctggtgatggcttacaggtgattcagaaacacccccccccccgcagcccataatatgccttcataagaagagacttctgagcagttgcttgttctctgtggtgtttgaggacaacctaagaagcaatcatatttgccacagtgcagaagcatcttaatttgggaaaatattctgttgcagccaaactctgagctttattttttatagttttccaaagaccgggactaatcttaacccccacagctttgtcttgtgttgcttcaatcactagaaggtttgggaccttcataaatcacaagcccattactctggttgcaatgaatgagagcttcaccctcctcaaacagaatgtactcttctccatctttatgacacccaggccatccacccttgctcaccagtgatactgctcctcaactcagctcccctcttgaggttctttcattctctattctctcatatgttatatcctgactgcaattcccttccatccccacctccccttccccagatccacttctgcctccccttagaagagagcaagtctcacaggaacatcaatcaaacatggcaaaacaagctacaataacaccaggtacacaccattgcatcaaggctggacaaagccctgtaggaggaaaagggccccacaagcaagcaaaagagggagggacagcccctgtgcccgctgttaggaatcccacaagaacaccaagctatacaactataacatatatgcagaggacccaggtcagacccctacaggcttcctgatctctctgagcccctgtgagtttcaggtagatgtttgtgtggtccatgttcttatagtgtccctgacccctttggttcctccaacccttcctccccctcctccacaagattcaccaagttctgcctaatgtttggctgtggtactctatctatccccatcagttggtggctaaagccactctggtctctctgatgaccattctactaggctcctataccagaacactctgcaggcagaatgaactataggtcaaaggttttctggctgctttagtgtcctaatccctccacttgcctggttacagacacagctcagcctctgtgtcccccattgctaggagtctctgctagagattcttgagatcaaatttttaaggaatcagtcaaacatatttagagaaactgaagtaacctgagttaatatatagaacaaatacaaataaatggtaatcacttgcatataatattttaaattattggctagtctaaagtttacagtctacagttgaagaaattaaacaaggtttctgtgaatgaaataacttgaacaaatcatttattactctacttatccatcaaccatgaaatataatattaaggtaaatcttccattagtcaaaggataattcttcctttccccacttatctcaaaatattaatgttcttttttagcgtcacacaagaatattcacctatttgctaatcagttggtcacataacaaatgcaagctggatgaacctggatgaaataaatcgaggcacaagtggctcaaccatatgaaagagtaattagatttatcattattgaatataacatttttgatgtacctaatttggggagttatttcacattttaaaataaaatgaattattattaccataaagggcaagattgcatgactcagatccatgtaggttcacaatttactctattcaccattttgggagtgcagggtgaatcaggattctgtgatgttagcttgtgtgattatatcatgacactatgacagctacattgctaggtgaaaggaatttttcagtgctgtttttatcttgtgagaccactatattcacaccctgtccttaactccagaatccgtgagtaacacatgactgttctgtcttcttccgtgtcaagtgcatcgtattcttgctaacttttgtaccttcaacctcatgaaaaccatggtaatgtcatgtctcatgactcatttgctctgaggaatcaatattgatgcaaacaaatcatcttgccaccatattttctttctcattaagcatttaatttaatgtcgtaacatcattatctctactatagcactgatgatgtcactatggattctggcctcggttaactcacttagatgttattgtgatgtggctttgatgaaaaccatagggcaagcctctggtcatgtgagggttctatttagttttctttagcataaacatctagtaatgcaccttctataccatttctaccctgtgttcagtgacgttggtcactacacctatgtcttatagtcacaaaaaaagagtagttacacagctgactataagaaaagggaagtggttatattcctggaaaggcaataccaacttgaggaaacacagtgtgaacacactgaagaaagcaagataggatgcactaaaaaggcccaagagagtgacagacaaatagtcttcaaatacctgggatgaagtaggcatgccactcctggtgactgagagagaattgagatggagtttgtggagagatgggaatgaacgccctagataacattagcagagagtgcactgggagaagaatgcttgctaccctctctgctacctttttatactatcaacggaggcttctctactgaaatataggaaagacacaatggaccgatctgtgcagtataaaccaaagaatcattcaaaagacagcctaaatttgtcttgtatcctatgtaaatgtgattcaaactaaactataccataacctcactgaagaatataaagaaaaaaatagaattgacctaagtaactttggaaaacaatattttgcctaaaaactataaggttaaagacaaaagaaattccatgtaagtactatatcctagttgttgatggttcttatggaagtatgaggtcaataattctgaagctccttaacatatatcctgggcttaaacaaatatataatataaatatatatctgagggcagatagtgggtgacaagtcctcacaatcaaaaggacacttatagatcagcaagaggaaagttggactgagccttgtggctctgaaagagagtcagaattatcagttgaaactcttatgtgcatagatagatgagagagagagagagagagagagagggggggggagggagagggagagggagagggagagagagagagatatgatggtgatgatgtgtgtgcatatgtcttcatactttatgtttcttagttctactctacaaagttgtataaacagtgagccctcactaacgaggggcagagccagtaaacagatctttgcaataccattctctaatgaaaggaaccaggactgttccccttccagaagcttagtacctttcatgtctcactttggtgagagagctgtagttaacggtttgctcccccagaaagactctgcaaggggaaagtaataactgcacagtgaggaaacttggcaaacaccgcctttaaggaaataaatgatcagcctaacatcctgtgtcaagtcacgctgacaacataacctgttcccagtgttctatgagaccatctctaacacacacacacacacacacacacacacacacacacacacacacacacacacacaggcctggaatattctagcaacccagccttctggatcatgaggcaaaatacaagaaaaacagatagatggcagacagataggaattatttccccatggatgccctctcaaaaacagagctcactgggctctttagtttcatgtgttgactctgtggaaagcagaagtggctcaggaaatagtgcttgaaaggcataattctcttaaagttttaagctcccctttggtatgtcggagtgggtactgaaccagtgcccttcagatagtgcttccacacctggctcgttattagcccagttgatagcaacaccttactcgaattgtctggctaaacttaatggtttccatcaggccagggcccaatctccattctaccctcccagtctttttctctttgatactttcaccaggaggccaaagctcaggttgaaggagaagagagtgtggggcacgaggggagtgaaaaggacctttctttaatatggcctcatcatcacttcaagtactatgcttaaagtaaagctataaaggataagtaagagctggttgaagaataatgtgcacaatctgaagccaggtctgtaataaaaatgtcatatggctataaatgactgtgtatgtaaactcatacacagcacttggacaagtctataaaattcatagaccaaagtgtatatgaacaactggctcctggaatagagagaagaacccagcagtgaaggcagcatctaaattttaacatgaccctttgaccacgcaactctttagattcatcaatccagcacccctcccgatcacccagtttcctcttccagcaggacttctcaaggttttagcctgtcatcttgagtgatattttttttcctcagttcatttactttatcagttcaactagtcacctttaaagccattcctatctcttttgtccccaactcattcttagagtcccactgacaaaggaaagccacagttcataagcttttagtctctcattcagaattctcgtaatgttgaagtattggtttctagggtcaccacccataagatgggagagtattaacgtttattttcattgtgttgcccatgtggaactacattctctgctgagatgaagggaggaaaggcagggattcctctgagccaaagaggctgctagggtgaagcgcgcctttggaagatagagttctgaaccacagagtagattctttccattttttattaattgcagcacagagacaagaagtcaaatgtttaaagaaatttgtgttccttagggtgttgattttacaccaacagaaaagatgagtcctgagtcttcatgtctttttttctcagggtagcctggaaaacaaaaagagaaatgtaagtgtcctttgtaaaatggaatacggtttccaaacctattttctagaaatgtggaatttcttagattctttttgcgattttcactggtgtagacagcctacacatgacctagtcttagctgacatctgttacttggtgggcagatgacacactgatagatgttgtgacaccctctcaccccaactcgtgcatgtgtgatataagttgtgccctcttcatcactggtccctcagagtccccaagtgtcaaagtcaggggtctcaccatttctgaggacctacatattacctatgattacaaatgaaagctgtcttctcagaatgctacaaaactttcaattctttctaaaactgaaataattttgaaatagccttatgtctataggttctttgcttgaataaaaaaataagttttttgttttcatatggagaaacaatttttttgccaaagccttccattattgccctattttaaaaaattctcttctgcaagattataaacaaaattgatcaacatagctgtgtgcagttggctatattttcaaaggaggctgctttgtcataagaagataaattctgttaaagcttagcatggggcacatcagaaatttggaagtggatcacttattatgaaacagaacccgttgtatcttctgttgaaatggattcacagaatgattgggtcaaaccacatggaatcattgatacacaactgttttgacccaccccccaaatattccttcatatggtttcaacttcatccagaggataagcttgactaggctaacatggaggactccacatagtggttcatgtaagtcagagcaaaaccagggctaactcctttgctctggtttgaatttttaattttggttccttctctccctggtttggtctccttttgtgtaaattgcattaacctagacctttatatgttcagtttcttatctacaaatggaacccaaactgatgaccatacgtgaagacctaagagtgccagctggtgcttgtctgtatggctcttgtcaaatggttatcagtcttgatcgttttaggaaaaatgattatgattatgttttttaagtcccaagtatagttacctgagaaggttgtggttgtgatgtgtttaggctaaggcgtctttgcatctagtgacaaggtttggaccctgaaaacaaagaaatgatggatgttagaaaagtattagcaggactgttaggatttgcacttcatagccataggcaatgacatagtaaacgtacgtgccttgcattgcttaattacagttctacttagaattcctaaagcaggctctctgacatctgttgtgcccaaaataagaagataaactgttgttaggccatgggagggaatgtgaaatgattcagatatataatggtaactgtccattcatgtgtaaaataactcaattcaaaaagaaacatttcagggcaaggtttaaatgagttcatgattctaggctttgcaagtatttctaactatgctcttctgtgtcacaaatttgaaaccaaatagtgataataggtatttaataggcagcagtgtggcagaaaataaaaattaaaagctacgtaagtcagtttctattacagttacgtagagaacaacatctagattggtggagttattcagtgtgtgagttccagagagctacacctgaccacgtgcacagaaaatggaaactgaacatcgtcaaaatgcaaaaacgtttctgacctcagtcgagaagcaggtgtccttgtcagcagccttgcaacatgtatccaggaactgtgcaaagtcatccatgacagtcttcagttgctccgctgtagccttgggcttgtgcttcaccagctcagcaagagccctgcagtaggacagaaagcaagaagagcaaggagacatttaccccagtgcaggaaagtaagataggaaggaatgtgaggccacagtttaaggctataaatcttggagccaagtaactttggctttgaggattaagcatgccactgccaacttaggaatcttggctgtgtaggaggggagtagcagttgtcactttgctaggactagctagatcaaatagaataatcgatgccagtcacacgggttttgtctagtttcaggaaatctcctgaaaggctttgcacttaatatgtggatttttgccctcctaacacctgccccatttgaaattaataatggggaggctagaaagactgacaagccaagcaataggagatggctgggcctctgttgttgacatctgtagaacaaacagtaccagagacatagtgctgtgtaggggatgagttttgtaactctgtctggggaccatgatgacatgtccccaaaggtgatgacaatatcccgctacattttgtagtattggaacctctcccttcagcagggttcgaacctcctatgtacacttccagctgtttcttactccattctcaaaagtcacacccatgacgttgccttgcccctgcatggcttcttcgtggaacattttctttttttttttttttttttttttttttttttttttttttccattttttattaggtatttaactcatttacatttccaatgctataccaaaagtcccccatatccacccacccccactcccctgcccacccactccccctttttggccctggtattcccctgtactggggcatataaagtttgcaagtccaatgggcctctctttccagtgatggccgactaggccatcttttgatatatatgcagctagagtcaagagctccggggtactggttagctcataatgttgttccacctatagggttgcaggtccctttagctccttggctactttctctagctcctccattgggagccctatgatccatccattagctgactgtgagcatccacttctgtgtttgctgggccccggcatagtctcacaagagacagctacatctgcgtcctttcaataaaatcttgctagtgtatgcaatggtgtcagcgtttggatgctgattatggggtggatccctggctatggcagtctctacatggtccatcctttcatctcagctccaaactccgtctctgtaactccttccatgggtgttttgttcccaaatctaaggaggggcatagtgtccacacttcagtcttcattctccttgagtttcatgtgtttagcaaattatatcttatatcttgggtatcctaggtttggggctaatatccacttatcagtgaatacatattgtgtgagtttctttgtgaatgtgttacctcactcaggatgatgccctccaggtccatccatttggctaggaatttcataaattcattctttttaatagctgagtagtactccattgtgtagatgtacgtggaacattttcaatcaactattcctaccttgcaataaatacttgtatgatttccatgaccagttcttctatctatatccactaactggtatttagtgtcttctattgggcctccactagaattttattctactgtggtttttgcccacagtaataaagataagttgaatgaaagattttaatagaaaattttttcacagagacaaaaaattttgacactctttcaactcagtgatgccaacatctaaacacttctctctaaggaatatataatcactgcatcaaaacaaaaaaatgtccagttgtcagttctcactatcaatacatatgcagtatgaaaatagatgcaataaaaaaatattgctcacgtttgtttcttaatctgcttctccttctctggaagtgtgcagatatcagagtggaaggtgaaggtctcagctttaaactctttggggacatatgtttcatcaactgtcagagcagagaagcatggccgcctttccaccagggatccactacagcacttggtaacatgctcactcactggggtcttctcatgcagcagacacacacggttcaggattgcagacagctaaagaagagagagtagaaaggtcacaagtatttcacaaacatccactttctggtacactaaaaactgtcatatggagttagccattagaaatccagccttgattggcatggcaatttatctatctttgaaactacacatgtgagacttattaaaaactgtttctttctcagttagatatggggggccatgacccagataccacacacatacatatgcatgtattaggaccccccttgctcctgaaagttagatttatcagggtctaaagataacaacccagccctgttaactttgttggtgtttaaaagactcacatagtcttccacacaaggcagtctctgatcttcaggaagtgtacaacacttggtgcccactcttcctaggtttcttgcagcctccacgagagttggggttgacacctgaggtgctttctgggtgtagcgaactagaatgctgagtagcaaaaaataagttacatggtttaatccaggcagaaaactggccagatgtaatagatttcaagaagagacgattcacccaacccaactaagactttttccccactaatcaaagttatctttactactagggtggcatagtactggaagaagaccttgtcctgagaaaccaagtatctgttaaaaaaaaaaaaaaaaacctactgggagcataagaccttaagtttaaatctgtagtaaaatcataaggaagtgacatttctctaacccaatggcattaatgtactcagtgctgctttaaataaattctaacacaaacttactcatatcaactttgtgacggactcaaaagatagaggtgaaaagagaaatggtttactggaaaccatgcatggattaaaggaaaggaaaaaaatgtctgcctgacacattatctagcaattaatagcatctggtgtttaataatgtaccataaccaataaaagtcaatttatttcggtgaagaagtgcccactccaaactctagagttgcaagagtgctaaaattgtatatgaaataaacaaggaataatgtgtctcttccagtatgctccctttacttccatagataaagttctatgaaatgactctagaagaccattcagtctctatctctgagattgaaattccataggaagacaaggttacaactaccaaagtttatctgtaactcccaaattccaatgttttccccaagtgaactcctattcatgtaacgtttccattttatctaaatcttttgttatatttttgtgttcagcatttctatcggttcttgagtttctgctgcccaaagcatgctacttctttttctactaaatattattctattgtttgctcataaactccacctaacccttgaaggacactctgaattctaatgtatcaagatttgctgagtcctcaaaacttcttctcccaagagatcagtgtttatattatgcagggttacagttctcttcgtccctctaactaagctgtctccttgccagaatttcttgatagatctgtattataaataatgttttcattgtgaaagccatatgctggatagcctgtatgctgttttaaataatcacaaactgatcaagaaaaaaaaaactagctgataaaactactcacgcattttggaatccatattctccaagcttctcgtaaagatcacagttggttttgaccaagttcttaggctcttctacaagaggctgaaattcagcaagctgcaaaataaaagaattgtgtttacagccccccttcctgaaagcccaaagtaggccacttcacactactgccatccctctgtccaaagacaagtaaaagacaagtcaggagatcttttgtgccacatctgtcaccttgcgtttaaattgttccttgtatttgcaaggtcatttggcacaagtcaaatgagaatcttcaggctctgggattcaatggctgtacttgaagcaggccacctgatgtgctttcttgttgtgagactgttctttccacacccaagcttcagatggatcatgtctgcactgtactgggctacgtgtcctcagcaccagaactggtctcttaacccactaagtggatgagattaacatcaactggtgcacagcagaagttcactagatagtggccatcacttttagcaatctctctaaggtctctcttgaagtctctgagatgagtgtatccaccctgaggctcaaccactgagtggtatctggtattcagcagtttctttgtaaagtacgattctcttctggtcccaagtggttcagaatctagtatgagctgagaggagtcctgattccctctacaacaaacttgcaagtaaaacttctcaaaaaaaaaaaaaacaaaacaaaaaaacaaaaaacaaaaaacttcaccaaaacctccaaaatagtaaagaaatagagtttacagactcctttgagatattaattctaatagttgatagtgtggtgggacaggttaatagtccttaaatctaagttgaataaatgaattttagttggcattggactttattctctaattttatccttgggagtatgaaaaagggaaagctacaataaagattttgtgcaagaaaagattcctccctctctttgaacctttcttttctagagcggttgttctaggtttccttatattttatccaaagagtttatcctatgatgctgaagaacttaaagagctagaacttgcctccatctcaagaaaacatctgtattgacctacatatcgattatcgtgacttcatctcttccctcgtccttatagaaagtgccatccacactgtaggtgttcttggctcatggaaacctaccactgtgccgtagcatgcgggaggattggcttcagcgcagcacttttccagagtggcttcatatttcttagcaagtctcagcaacagggatacagagtaatcagggtgtcttcttgaatattcatacaagaacctaattgagatgaacataggctgagttaagtaaatgaatatgtaatagagccccataaccaacctcagtagtgattctcagcccagtcatcctgcattggagcgagctccatgcagaaaactaaacaacaagaatgtgggacccagagagaactcttcccacgttcagctttgccactgaaacctgttttaatattctgggtgggcaactatcaatcaatcaatcaatcaatcaatcaatgcattaactccctccattgtacaatggaaataattgctgtactttttgaaaatattttgtcatttgttattagttgcatcatgtcttgctatattgtgatattctggtcttttcaaccaaggatgaaacaactagtgtcatgttgcttatatacatagaaatagatatccttgatatcatcacagagctagctagatagagctgagtatgtaagtagatagataggtgatatatttatatacactatgtatttaagatatatgctcataaaaatgattaagtggtacatatgacttacatattcatagaatatttctaaagatttccagaaatattcctatgaagtaaggaacattgagtttatgctgaatgcatgtatgtttcataaaaaaatattttaaattacttaaaatacttttcaaggaaattttaaaggctgaaaatggcaaggatgaataatttttctgagaaccatagaagtcctgctaacaccaaaggaaagcctggtgtagagtcctaaaccatgcagctctgacaaagctatgaaaggaaaggcatctactcacgtgcccaggaagacatccttggcctcagcatagttcttgcacacttcctggtcctcaacaaaatcagcagcaatggcaggcagatcagcaggcatggtgtcatgctccacctcactaagacagtgggctttcttcaacagtggtttatcgcagcaagtctgcagtttgctggagatagtcgcctggttttcacacatgtacttggcaagttccgcctgtgagaatgaaaaacaaaggtttcagaggaattatcttagctacattttgtccctgcacctctgtcatgtgaggaaagtgtcttcatcctgccctaaaccagacacaaccaaagtggtttctgtaaactcgttctcagccctgcagtgctgcagaacctgtggactaggatactatgatcaaaacattccatttagatccgagaaagaccgttctgaagcaagctatgtatctatttaaattagtttgttttaattattaaatctatgtctttctgactttgataattcaagttactttttctataaaagttagtgcttgaaaaaaaattttctcccaagttaagggtaggcattttgaaactaaataacccattagaatatgaagtattattaaataatcagtaatgagcacaattacaggtcttgctgacatatacaaaatatctgtcttgagttttccggaaggtactatggtagaagaggattctggtatttggttatatttttagtctttggagcagggaggggagggagataataggacaatgttggagaaaatgagatcacagtgaatctgtatgtacttaacgcagacagtagattaggggaaagaccaccaagggatagacacatttttaaaagcctctctgctctgtgggatgtctagcccctgcttctctccccaaaacctcttagaaatctacattttatggcttgttctcttccattaatgccttctcaaagtgtgactgaagaaaggagtttcgggtcattgaataattccgaaaacattttgagttggtggttttgttttttggatttttggggggagttttttgtttgtttgtttgtttgtttgtttgtttgttttggtctttttttctggaaagtggcagcaaccaaggagagcttggtagaataccggccacaccacccgcccttggtgttctccgatgaagccaaacacaggcgctcaactgagcatgtaatgactccttccttaccctgtcatctgcgcattccagcaggtcaccatggcagcactccttgttgactttggtcaggtctgttgccaatttggtgatttctgcaaagtcagcattggggaatgtctggctcagacgagctactgccctgaaaaggaaaaacaaacaaacagattttccatcaatgaattatcatattgtatttgtatgaaagcaataacaaaagacactatttttaacaagttcaaaacctattataaactgttttgaagttcaaaaccaaattaactgaacaaattataaaaattcattagttcttgtaatgctaatctggcatgatagttatgtttttctttggcagaattatctactaaatgaatggcggtggtgtgtggaaagctaagacctcattaaattaaaatcatagaagattttccccaaaggggcagcagtaaagctttaagtccttatctgacttctgttttcagtttgatcccatcttagcactgtgaccaccagcaggcgttagcttttagagtgttacaacatgcagaatctgggagattaaattacgtaatggcatgaaagcattctcatctggaaatgaagattcgtcatcttttaccataagacatatttctctgagtcctaaagttggggggttgtgggtgttcttaagttctagagaactggagagttctaaacacgcatcctcctgcctagaagctgttccagcagacagcctctgagccctatggcaaaacccaagattctcattctaaaataactttcagttcctttactccagtaaaagactcctttgcaggagccagtcacagcccgtgtaacagtttcatattgaagctgcttctttggttgatctggctgtaatcatttggagagtgggaatgacttagtgaggaaagttgtgcagacagtttctagagaacacacacaaagtcatctcaaccttctctcctattgtgttggttaggtgaggtaccagaagagcaagcatatctttcttggctgccatattaaagggtgcacccagactcagctacagctataaaagcaaagagagggtcaaacaaaagcatgagattaagaacacaattggagttgtaataaaattcgaagtagtaactccagctggcttgatggctaaattcaattatcaagacataaaacagtcagttttagactgagggaacataaattaagtaaattcatcaccctgactaggactgcattttgtaagctttgaaaatgagtcccagtctttataaacaaatgagattttaaatacctatcttctcttaggaaaaaaaaaaaaaagtcttctaaattccttgataatttaaaacaaaacgatgagacaaaaatgtcaaattattactgctattctgacttcacctctattgtcttttcataaagtgccttataaaggcacagcttttttgattagacagctatcaacagaaagatgcgaactgtgatgttaaagaaaagtcatgtaccatgctttaaaagctctctctccaaacttctgcatactggagcacttcattctctgacggacagatgagaccaatgctttctccttcacaccatcaagctaaaaacagacaaacaaaaaagaaaacccaagtggaaaaaaattggaaaagattatttttatacacacacacctcccaaagtttcagttggccctatgcctaaataattggtttggttggggaggagttgaaatcgggaccttttgcatgttaggtatgaactctgccatttagttggaccttcgatccaaatgaaaacttaaaaaagataatttatgcctccattcccaagcactcccttctggcaaataattattttgatatctaagggaaaagaaaatctgtccggtcttagcatctagctacttaaagcaccttggagacattgctgagggaagggtccggaaaggagatgtcccagcacatatacctgtactgactttttttattttgtgactaatccatttcagtccttcctccattaactttcataaaatcagtaagtgcctccaaaaaatgaatgctgcatgtaacaaatatttatggaaggaaggaatgaactcgaacttctagcctcagtaaaaattctctccttcgaatttaagaaagctccagtaaaatgcctcagagaaggtcaaaaaataaaagcaaaaacaaagaaaaaaaacctagccatttctgcacagtttgacaaagagtcttctactgtagacagcattaccatgaagaatgagaagacaaggaacgcaagtacaagaattccctctctcagaccactgctaaagtttagaaggaagaaaggcataagaacaaaaatctgttggtaagttaagaagaaagagatgtttcatgcagaaagccaagcctcctgaatctggccataagatgatcaaaatcttaggctggaattcaaagcaggtgttgtgtgtgtctttccaggagtttaccttcggggtcaggcagctttccttgtcagcctctgcacaacactgggtcagaatctcattgtactgctcagcatagtaaagaagttctggggcatagaaataaggatgtcttctggcaacttcatgcaaatagctgagttatgggaaagaagaagaagaaaacaggcagttattccccacagaacaatactacagaaatgattagaatcaacccacacccttggatacacatgggatttgtaattgaccggtttcactcagtgtggtcacccatgagtgatggactttgtctgttgttaagtgagcaaagagagatatgtagatatgtgtgtgtgtgtgtgtgtgtgtgtgtgtgtgtgtgtgtgtgtgtgtgtgtgcgcgtgtgtgtttgtaaatgttcacacatcatgtgtacatttttggtaagtaaattttggtgatgtaatgttgatgactaaaatgaaattgatccagagaacatgaacaccacacacatactcatactcacacacatatacacgcacatgcacacaaatgccttcagaatattttgcaacttctcagtctcagatatttcacacaggtcctgttttcaatatcaaaacatcattgatctttttactgtcattgtatagtctgtggtatcaagtattatgtttttaaacaccatctcaacacattcccagacttggtgttggatgcttggggttttcatgactatcagcataagtgttactaacggagctattgcccagtttttagcataaagtgtagatgtctgggtactcactgtcccataaaggtggttgggttttccttaaaggaggtgcacatggcctcagcctctggcctttcaaatggtggcaggctggggttgtcatctttgtgttgcaggaaacattcgtttctttcgggctcttgttttgtacagcagtcagccagttcaccatagttttcacggaggtttggaatggcacacaacttatctccaaaaagagtgtgctaagaggaagagagaaaagtcaaattcctgccggtaccccaactttcttcatagccaaagagcagcatcaaaaccaaatgtgctgataaaaattggtgaagaaaacatgtaccttgtatgtatgtgcatagatgatatgtatattgataacaccttgagctatatattatttttttggttctacataccacttaaaataaatttaagtataaaaaaattgttaatgaagtaagttacgtttttaaactgcgaggcaaacgaagatcatgtagaaaccccctaccacttactttccttggacttgtcaatttctgtgtaattttcatgatagtcaagtgccacaatattgtgtatgatggataacacagagaagcaaagagctaatggccttgaggaatgtcaccttccatgttttctatctgacactaaaagctaggagtaaagtcattataataaaaacaaatcaagggaatttgaggagcaggtaaaatcaagctggggaaccttgcacagctcctcatgggctctgctcctttgggagaagcctatgtttttactacgttccctgtaaaactaaagaataatacctccctccctccaacccctccctccaaaccctctcatgtaagcccccttgctctctttcagatccatgacctcagttttcattcattgttgttacatgcatatacatttatgtaaatacatgtatattcctaaatgtagcctgcttagtctgcatgttattcatacgtatgttttagggatgaccattggtattggagaggcagttggtatgctcttccaaggcaacttcttctctctgcattccttagttgcctacagttctttttacagggtttagctcttgtggtctttccctcatccactttggcatatctactgtcactgtcactgtcaagctcccatttgggcagtcatgtggtgagactttttgagtgtattgtagcttctgcaattactatgaaatggagtcccacagaaaattcccatcaccctggctttatcaatctctctgctgccctctgccacagtgttcccggggccttaagtgatggagtcatgattggctttgaaacagagttccagaaagcaggaaagtagatccacaaaatcagaaggtactcacaagggatttgtcacagttggcggcagactcatcggcaacacacgtctttgcaaagtctgttacttcctgcactaatttggcatgctcatcgtatgagcatttctggagatactgggaaaaggcaatcaggactctgaaaagcagacacaaaaacctcagtatgaggcaagtggctctcccaaccagcaaatcatgcctgtgtatacctgcgagattttgtatatctttcatacaactatctagaaagcctcttcccgtcagctattctctgaggcgtaatgggaacacctgcctttccaagcaaaggaatatggacttctaccatgctgaagtgcagatgcacatatgtgtcaatagatttatgaacatgaggcaaacaggcaaactactctctaaatttattcattgtcaaggctagatattatataagtcctttgaattgtttcttttctaaccatatacctctgttatttggaatacatgatactattgaccttctaaaaataaattaattactcatttttttactacattaaaacattactaaggttggagatgtgacttaagtatagaccccttacttcacatgtataaggtttcagtactacaaagagacaaaataatgttctcaagataccatgagatcttattgcattaaaagttagtaagtgagctgcccccaaaactatagttcatagacctttccagaaataaaaaataagattccagacttaacaagttagatgtgggctccagattctctctccaggaaaggagctactagccacacatggctagatacattcaattaaaattaactattatttgaatgtgtgcttctcagttacacttgccatgtgcaaagtgcttgatagccttgtgatctctggctgccacattgctcagcacagatccacagtctttctgtcaatgcacacatttctactggacagcactgctctacaattctcacactcaaggtggaaaaaggtgttttaaaactttaactaatactaccagaaatattaagtgggctttcagcattataacttacaggcctttgaaatgttgttctcccaaatcattataccgatgggcgatctcactcttgtctgtggaaacagggagagaaaaaccacacaacatatttaaagattgatgaagacaactaactgtaatatgctgctttttgttcttctcttcactgacctaagctactccctgaagatgccagttcccgatcgttacaggaaaatctgaaggtggcaatggttcctctctgctacactcaaagttatattttttcaccaacattattatttttaaaacccgttaagtgtttatatctgtgcattcaaactcaagatttagtgtttctgtcatgtttgtaaatatctactaagacaatggtaaataagaaataaaggtaaatataaatggaaactccatttataaaattagtaacacacacttttaatttttagtatagcatggtcgagcaggcaggccctatgagaccgtaataaattcaactgtatccaacgtaatttgagtcattctgcctagcatttttttttaattaaaagaaatttaaagctaagctttcaaaatcccccattattgtcatcaaagataccaaaaatatatcaataatataaccacctaagggttctcagatgcaaataatgacaataataacaacaacaacagtaataataatctagaaatcagcactaaaggaaaatttaactattttaaaataccaggcttccattactagaaaaatacaagcagagatgaaaaaacataaaactcttacgtgcttctcggcgaaacacacccctggaaaaagcagagccggagacgaagaggaggaggagaaaggttacccacttcattttgccagaggctagtggggttgataggaaaggtgatctgtgtgcagaaagactcgctctaatatacttctttaaccaataactgtagatcattaaccatacttacctcgcatttcattggttcctaccccattacaaaatcataccatctttgccaaaaagttgtttgactaaatcccttgcgtatgtttgccatctggagctgttcccctctaaccccacccccacccccatgcacaagactttgtccattcattaaagttatgtaaaacagcaaattttacataagagcttaatctctttgtctcccatttgagcatttcagtgtgggccttggcatggaagcatgccacatttaaaagctaagaactgaattgcataggttgttcatcccaaatatgcttttatgtacaggtaatgaagaatgtgtatgagggaggggtgggtctcattatagggcttccaagtctttctcatctttttaaagttagaatcttccataaagcacacagtgtctcaaatgtgaactgagaagaagccagagcaataaaaaacaagtgcagaggactttcagaagtcttgtgtccccaccccatgctcaggctatgtgtgaaacgggtctggagtagaatgttttcatctaacatgaacctctttctcggggtgctttagaggagacactagaacaggcactccaatgacagtgatgatggtctttgccatcgtaacatacttcctctaacaccacaggataataattagtagcagaccagttatctcacttatgagtcagtcaagactacatccaaatcaaccccatggttcctaaatatacagggactattcagtgacaagaaggagaagaggaaggaggagaagaaggaaaaggaggaagagaggaggaggaggaagaggaggaggaggagaagcattcttctttatatctggttatacaatgaaagaaatctatgtcttatgacctcatcttgtgtcctcatcttcagaaaggtgtacaaattctgtaatcaaccacaggagtcaaggcaaaatgaaggagaagggaaaagtgtttccttgcttgttttatcactcaaaagagtcctgaaatggaataacagactagcctctacacagatgaacagaatgatagatagatagatagatgatagatagatagatagatagatagatagatagatagatagatagatagatgatagatggatagggaggtaggtaggtagatagatagatagatagatagatagatagatagatagatagatagatagatagatagataaagtctgcccatggaataacttctactgagggtgagggtgggtggcagaattaagccaaaaccccatcctggaaaagaaaaaaagaaactaaacagaagagataattctttcttggatcaattcctctttaaacttcctagaaagagtagtcactatttatttgaagacagtagtcatgcctagtcctgtcctggtgtgggtcttgataaacataaacaagtatgtaatgcttaagtcattgaatgtatttgtattattaactcacaagtactatatagttatatgtaatattgtgtttaagtataatattgtgttattaactcaggcttttagcactctcacatgtactatgtatactatatatacttttgtttgacaattaagtaaaaaaaaaaaaaaaaatcatctatgcagccaaagcctggagagaaaagcatcagaatgaagtaggcgcttgagctggtttagtgactgatgaagctccaatacttttaagacataaattaataacaactgagcctctccttagcagtactaactcaatgccttactcgggcatgttctaattaatctttagcagccgagaattaaagtgcttaattcttgacacagtctccgtgctcacagatcatttcaactgaagagaaacacttgagcagttgcatctggtgagtaagaatttatactcttccttctgaaactcctggcactcgtcctatatgtagactctatactgagaggaatgaagccacataattattagttacttctagacatcctgtttttcaagcttttaaactcgatggttagtcagtcatcaaaagagtttggcaggagcataaatgcaaaagttaaactaaaggtttagtttctgaataaagagaaaatagctcaagtgatctttgagtgttttctcgtgcttgtgggaggactttaaaaatgaagagtagctgagatgatttgttgtttggaaagtatggtcctgtgctcgtcatctagaagggaacaacaacaacacacacactcacacacacacacacacacacactcaaacacacatacatactcacacacactctcacacatacactcctgctgaatacaaatgtgactgggaattaaacctgagcttcaattttttcaatcccttgttttctccttatactatcacctctttgttgtttccttctgttttgcttttcttatttcttttgcattcgtttttgataggatggttttcccagttttcccagctctctctctccttcctatttctggaacgtctctaacttctttcaagccatcctggccatgtgacaaccttggtccagcctgcatgcttcttcccccatgatcctacagtacttctggatctcctcttaaaagtaaaatcagaagccaggcgtggtggcgcacgcctttagtcccagcactggggaggcagaggcaggtggatttctgagttcgaggccaacctggtctacaaagtgagttccaggacagccagggctatacagagaaaccctgtctcaaaaaatagaaaaaaaaaggaaaaccggtccagaaaaataaacagctgtatctaataatgtcttcaaaatttcaccacagattttctagaaatagtgacttcacctctatccactgtaaaatgtagaaaatttggtttaattttgaagaaaaatggggacacgaagtcttttctccacacttttcctattgttgagtgggcatatgcagctccctcctattctgcggggccagaaatgctttataaaaaatgggaagtggaagaccactaagcatcaaactcaacaactgaaacataataagcaatttgatttctcattcaatataaaaatatattttccaacaaaagtaaaaaaatgtccaaagttttctcatgcaaataaacactgtaattcaaacattaattgttccttgtcatccccatatgtgaagccttccatgctcccaaactatatccacttaaaatattgagaatattgattgtgctagaggtttccttgtagataagagtttatatcacaaaaacttacacagttcagtactaagtattttttcaatgggccagcagttggccagctgatagaagtaatgctatgaaagatgttcaaataacaaccaactcagttgatgaatccagaaactcctggctcttagattgctcaatcttcccaaacaggttcatagaaaaccagtggtagaaaggtctgagttcacaattgatgggtctgggatagaacattgatccccataaacagtctattcctaaacacctggtgcctcaaagacgatttcaaaacagcccaaatataagcatcaactgctgagaatcttcatctctgtgtaggtctgggtatcaaacccagggcctcatgccatggcaggcaaaggctctatcactgggttatgactttagccccttaagtgttgaggctctgaggagggtgtccttcaggccttatggtgacaaacacatttaacaatggtatattgatactatatacagcagaaattgttttaagataatgacccactatatggacaagcagaatgaacagtattaacgtgaatgtggcttgaacaggtggtttacaattaaaatgacaacagggtttcaccttttggagagaggcttaaacatttagagatggtttgtaaaggggatgcatagaatgggtcgtgggcctgcctgaactagagcaatcaaaggaaaaaattctggatgaattgaataatgtaacaccaaactctatcacccccttgatgccggtcaaaagcagacaaagaatttttaacatggacaaacttagtaacatgctttgctgtggtcagattcaatcagttaaataaagacactggctattctatctgggatgctgtggaggtagagagcccagcattgtttggagataaaaaacattgcatgtcacttatgtgcagaaactcaaaaaaaaaatgactcagggccttctgagtgagaatcttgatagggagggatgcaggagtggagagaatgggcctgaggaaagagcacgtcatgctggaaaaggacgccaagctttgctacctgagaagattactgtaccatgcctgctgacatctctgtaatcccagcactaatgaggcaagatgtggtatcacagacttatggccaacctgggctagatggttacaggaattctatctcaagaagagaacaagggaaatgccggaatgtagacatagatgcaaacgagtgtacagaggctggtctccgaggacagggccggtgagaaaaatgtcttctgaaactaagcagactcagcaggttttcttatacccttgttcattcaagtatgtgtgtgtgtgtgtgtgtgtgtgtgtgtgtgtgtgtgtgtgtttgtgaacaatagtaactgaagaaataaagcatgaatttagaaggagtgggggtgagaacaaagaggtagttgggggtaagaaaggaaaggaacaaaaatttgtaaatacagtacatttatatgaaagtaaaaaaaaataatggctaatggagctgttggtgtgtgtgtgtgtgtgcacatgtgtgcatgtttcttgacacattttcactgtacattattctgacttgtataagggcatctttgtatcagtacatagtaaactgtgagtttattcctcttaacgcatcacctccctttcattatctctcccattagtctcctttattccttgagaccactttgcttccgggtcatatatgttgtattcatgattttatatattttacttctgcttcccggttgtatatacatgcatgattttatatatctgccccaaacctaggaaccacaaatgagagaaaatacagaatatttgtctttgtaaggctgacttaatttacttaatgtgatcacttccagtcatagtcaagatcttaatgtggacatagttttgttctttagagctgaaaaatatccactgtgtgagtatccctcattttccttctccatttcctctgctgacagacactgaagccagtctggacactcagctaatgtaaatggtatgcacgtatctctgtgtggtgttgatttggagtctctgtactcagtttcatggagattggaccacttcatactggcagtgtatgagggctccctggtgtccacatccacaccagcatgtcttgttttctttatggctgccattcaggttttatagcaagatctttggatccgtgtgtagttggttcttttaaagaaaagaatctagttcattcttttgcaagttaataactagttttcccaacaccatttgttgaagagattcgcgagcatgcataaattgtgtgtgtgtatgtgtgtgtgtattagtcaaaaaccaagtggctgtatatgtaagggtttacaactagctcttcacctgttgtattgatctacgtttctaattttattctggtactaggctgggagtttggggaggggatcatttgcttaattttactatggctcagtattataactttaaatcagctgtgaaatttcttacagccctattcaatttatgatattggagttctgatgaggattacatcattgcttttggtagtaaagacattttcactatattaattcttccaatccataagcatgggggaggggcgctttcttcttctagtgtctttttttttttcactgttttaaaattttctttgtaaaagtatctcatctctttggttagatttattattccaaggtaattttttaaggcaactgagaatggagttgttctcctggctttatttgcatcttatttgcacacaggctggctactggtggtggtagattaattatctattcggctccttgctgagagtttcaaatgtagtcttcagggtcttctatatctaggatcgcatccgcacacacacacagggacagtttatcatcttttcatacccatgtcctcccccacccttttatttttttgttttatggctttggctgagatttcaagcgctatactaaatatgagtgaaggtagtggccacttttgtcaagcttcttactttagtaggaatgctttacgctttccccctatttcagtgtgtgtttccctgatattgttaaagagtgtccatcacattttgaagctgagtttgatagttttaaaaaaatgttgaaattagtgtgtggggttgtgagcatttttgggtatgaagggctctgaacatttgtatttcattattgtgctgtacttgatgctttgtgaaatgaacttcgaccgaaatttatcgttatgcacagataatgctgagtttcttcgagttagctaagtaataagtatactagtgaatgctctaatttttcatccagaacattgaggcttgactagaatgttcatatatggtaggtacctagcagtatgaaaagctgtgctgacttgatgtaaaactatttatatatcaacgtgtacaacatgaaggatattgcctttcctgatttgatgtttgtctgtacctgtaaagccaaaattttactgctatacttcagtctctttaatttgctgcatatgtctgttaaccagatgcaacagaacacaattatctaataggataaatgctgagatttaaatagttttatatattattctttgatcatgttaaatatacatgtgtatatgcgtatgtgtgtttgtgtatgtatgtgtagatgtgtgtatgtgtgcaggtatgtatatgtatgtatgtatgtgtatatatgtgtatgtgtatgtatgtgtgaatatgtacatatgtgtgtatgtttgtgtgtatgtgtatgtgtgtgtgtgtatgtgtgtatgtgtgtatgtgtgtatgtgtgtgtgtgtgtgtgtgtgtgcgcacacccacgtttgtcaccacctagtaccctctcacatgcctcccctctctcctagtgaaaacatagacttggagataaaattatggaagattttttttatgctagatcatcttaaaaaccagtgtgcagagacctcaaaagataattactacagtgttctccacccattcaagtttgactgtgcctcagagaaaattgaagtagctataagcaccagttttcatgtaacaactaagtccttcactatatcacaatagtttataaaccgttttttcaactagatacatttttttcttaaaaaaataaaactggaagctggcctgttttgcaacctccttttatatctctttatttgtttcagagtagcctctgacttcaggaaggaaagatccacccatcaggggaaattagggttctttggagctagcatccctggaaacaagacttgtcatggctgtggtgaatctcaaatgctgactacacttctctggtttgggtcttcctaaaagatcccttttaaaagaactctctgatgggagtaaaaataacagcagttatgttgaaacaataatgcaggctgtctcgtctgtcctggattgccagttccttcattttataggacaggagtgtctccatatgtagttaaggatgaagacagcacttccggtctccagtgtaggctggctaacaagtgtcagggtcctgccagcatctcatctgccttctaactgctgtggctctgtcccttgggttcccctcccttcattgtttctctgtggttacacgtcaacacgttttttatgatttctactaagattagaaaatgtgagcagagaaatggttgtgtgggaggagacagcggctgtgagagacacaggaagtgctatagcaaatcactaaggctgagttgttctcattttgatgtcataggaatagttaaggtgatggaaatgcttaattcagcaatgacacaagaatatttaatttttggccagaaaaaaaatataaaataaaatgagattgccaaatagtattcattgtagagttctagcttagagaataacctggggttctcaatgactgtgccttgacatggttgcgtacttgagaatggtcaaaggctgtgtgtttaccctcaaagtatgagggtttctaccaagccaagcactccatgactttaaagggcatcattacccagttatttgggtaattttgacattattaacgttacaagaaaaattttatttaaagaaaaaaaagaaatatgtttaggtggacaggggctacatttttaaagttatcaatcaaagcagtgcatctatggtagagtgcagtactagtcagactgagcagtcgtccaaggatggacatgtcgggtagaggcagcctaggctaacacacccccaaaccccctttattttgctattcaactccatacaagcacctttgctggtagatattatctttacacaagatcttctgtacctgtggagtgtcatattttgaaatgttagatttagtggtgcaggcttataatcttgacacttggccagcctgggctacatgagaccctgctgtaaacaaacagtgactttaaaacgaggaggaaaatggaagggaaaattgagagagaacgcattttgaaaacagctattttatacaatgggtttgtatctgtttaaaccacacttctttcatgaaagcattgtcgagtatatagtaaataaatgcacacaaaatcactattttcggtttgtttgatctgttcaacctcttttaccatagttccaatgacaaaaatgtacttttctgtccttccttcttgctagatcgagcccctggaatttatgcctgtactactcaaatttcccattatcctcccagcttcttagttgttgactgaagcttaattcagctcaatttcttgccactgccttggacctgcagatctgttattgtctccatgccatgtaaatcaactgggataaaattatccctggggtccttcctccttgaaatgctgcgattgtgtgcttcccgtgtggcgtgtgacagtcttacggcatgagaaggtgtcctcaaaggtaggagaggatacatggggttaaggatcccaagctggagaacgagttcaagccaagctgcaccactgcttttcacacactcttcactctgcatcagcttagtatttcttaagaaattaaaagatggcaaaacacatctaaactgtattaataaagtgcttctttcatatttaatgtttttccagataaagaaaactatgatgaatgcctgcatgcttatctatgtttcatagatcagcaagtagaatgtataaaatggaagtgtcagtaattctgctcataattattgctgcagattgaattcacccctaagcaaatatacctctgaacatctgctcacagtctgtatgttctccagacacaatccaaaagacttattatctgaaagattaatgtcacaaagccagagctttataatctcttataaaacatagattgtagccaggcagtggtggcacatgcttttaatcctagcacttgcaaggcagaggcaagcagatctctgagttcaagaccaacctggtctacagagcaaggtccaggacagccaaagctagacagaaaaaactgtatctcaaaagaaaatagacaacaaattacattgttacagctaaaattatcttatgttgaaatttctgtagctcaactttggaatattttcattagagggtaatatttgattatgatcacttctaaaactttagaatttattgttttataatctcttggtttcagtacttacctaaaattttccaaccagtcacccagctaaaacttaaaatatttaagtcctagaattccagttagttttgcaagtaactataaatggtattacagtgagaaatggagcatctgatgtctactcacatgtaaactttacacatatcaaatagatgattgtctatggtctttcttcttttttagagtatatagagtatatagagatagattcatccataataagctcaataaacaaatgtttaaaaatgattgttagatattattgggtatataagtacctaattattaaaattgacttttttataacattgagataaattaaaattcatttattaaaataatatatatgaatttgaaggggttttttttgcaaaacaatttcagcaagcaataccatgacaaaagtgtgtattcaaatggaatgggaaacgaatgtcagtaacttatggtccccgtgtactcattcccagacatgcctgattggtagctgtgacagctccagcgtacttaacaccaagactttaaataagctgccaaaaatgtgtaagactgccatttcattagttttaatttttatatctataccctttctacagccacatactaaacgtagacaagttggccttttcctattgctttaaaggcagaggactgtattgatcagtccaaacttctttctgcatgtacatggaaaactggccaaggcaaacacgtccggaatgatggtatttaagaacaaacattccctggtatcagcaagtacagtgccctgctgacagagcaggagacacaaagtaccatctcgtccctatgttaagtagtgtcacctcatgctcaagggatactgagtggatgctgtaacgcaggttattttctaggctgtgaggatacaagaaaatgaaagtaattaaagtagaacattgctctgtgctatgcttgcagaatgtgtagtgtagtctaggaacagagaggggaaggttctaaatcaaaaaaaatcaagctcatgcctaaggatgtgtgggttgccacctctttagctacctatgcgatccaaacaactataaaacttagaatttattttctctggatgaatttgtgcttgtggagcaatgttggtagggggcagggtcagctggaaaagtggaatgagcaagcagaaaactgagagaagcagaagcttaggaagatgggtaatttccaaaagtttcacaaaagatcaaatcaaagaagtaagctccaccttagaaaaaagtggaacgtcatgctaaggaagctagccggcagaaaagaaaatgcagaattttcaagtatttgggcttctaagctaagtttggggatagggttattttaatagtacagactccttcaaaaaataatatccccgaagaaaggaacagatcatcttcgggaaattgtttatctaagatgactgatacactagttcatacagataactaaagacaaaataatattcctgatttaaccattacttcggaacaccattggcctgggagcttgagagacgctactgagggtaatgcatataagctgaaaagcactcagtgggcatgaatagtgaaggaaaaaaaaagactttaagataaaagaaatatcatgagacaatgcttaaggcagaacaagaatttaaaaattaaacacacatacacacacacaccaagctaggaaagattaaccaaaggttatagagaagcctggtacgagatgagatggggtgtattgaagatggcattgtagctcatattagctgtagttaaacatttaagcttgtagtccacagctattgaatggcttccttagttcaatgagctaatctgattatgcacaggactaccgccgctctaatttgggggagaggttagaaaagacaagaggaaagcaggtaagaaaactagtcagagaattaacgctataaccccagcaatagaagacaagaccttgaattctatcaatggtttagaatcggacagccatggagatatggggggcacgggaccatgaatagtat

SEQ ID NO: 25 - DNA, 27612 bp, Homo sapiens
gttccctgtactggtgggtgacatggacaacagtggcagtctcaacgctcaggtcattcaccagctgggccccggtctcaggtccaagatggccatccaggtgagtggggcacggaggctgctgctcccctcggccaccgtgagcagggagccgccctcacaccccctcctctccacagacccagcagtcgaagtttgtgaactggcaggtggacggggagtatcggggctctgacttcacagcagccgtcaccctggggaacccagacgtcctcgtgggttcaggtaagaggcggagggcttggagggtggtcacaaaactgcagttctggctttgccagcaaatccaccccatttgtgaacctccttttctgccactggagaagtggctcagcaggagtgattttgaaacatcaggcaacatactacagtgggtgagacggtcacccactgaccatgagtgggtgagtcagagcagtcttttttttttttttttttgagatggagtcttgctttatcacccaggttggagtgccgtggcacgatcttggctcactgcaacctccatctcctgggttcatgcaattctcctgcctcagcctcccgagtagctgggattacaggcatgcgctaccacgcctggctaatttttgtatttttagtagagacagggtttcaccacattggtcaggctggtcttgaactcctgacctcaagggatccacccacctcagcctcccaaagtgctgggattacaggtgtgagccaccacgcccagccagtcagcgcaattttaactgagattttcttttgtattaaaaaatgttttaagatggggtcttgctgtattggccaggctggtcttggaactcctggcttcaagcaatcctcccaccttgaccttccaaagtgctgggatgacaggcgtgagccacctcgcctggccagggaaacagcttttcagcctgcaagtagtgcagtcgggactcgtgaaaggaacttgagggaggatggtcccctggttgcataaggctttgcagagccttggccttcgctctgagtgagtctggggctttcggaaaccaaggcatagcttctcacaggaccctgcagctggcgtagagagcagactccaaagggggtaccactgggagggagtggacggggagaggaggttggattctggatgttgtttgaaggcagagctgccaggatttgttgagaccggatggaggcgatgactctgtagtttttggctggaactggaaggatggagtttcggattgccagctttgtgtctttgtgcagccatccactgtgtcgtggagagcaggctcttgagcgctgagtcctgagtgaatgactcgtgcaggcggggaggggagctagggttggccttggacccctgggagtgcctagggagagtcaccacttctcgctgcaggagcccagggagactcaaaagtgttgacttttgagctgccagaggaggagaaggggctaccccggctgggggacaggagcaagaagattccaggcagggagaagcaggaacaggggtgagggaagggaagggccatggcagaaaacccaggagacagggaagctggaggtgcagcaggtgcagagaggcctcctaggtgaggctgatctgtaggggccccatgaggaagaaacatttcctgtccccaactcacctggtgacatcaccccatcttctcatacactacagttgaaccacatgagccttttttgttggtttgtttttgtttttgagacggagtcttgctctgttgcccaggctggagtgctgtggtgcaatctcggctcactgcaacctctgcctccctggttcaagcgattctcctgcctcaggctccctagtatccctagtagctgggactacaggcgcgcgccaccatgcctggctaatttttgtatttttagtagagacaggttttcgccatgtcggccaggctgatctcgaacttcttacctcaagtgatccacccgccccggcctcccaaagtgctgggattacaggtgtgagccaccgcgcccggccgaccatgcaagcttttctgacggttcctgaaaccaccgagttggttctaccccaggaccgacgcacactctgtccctgctgcatggaattcttccctctggtcttgacatgactgggaaggcttgcgtgcgcatgtcgccctctgtcgtccaccattgtccccatcttgcaaggccaagaggaggttctccactaagggcacatggccagtgggactccagtgtccctgctcttcacggcgccagcaaccccgttccctgtgccgcctcgctcgcctggtcctttcgtgctccccagcactggcctcctggagcccagggccaccagtgacgctttggtctctagtcctttccagtgcctcttccttcccccagacaccagtgagaacagggcctgccgtgtgccggtcagggctgagctctcgagtctcttgccaccaacagctccgacttgacccagggtgtctctacctccaggcggctctgtgacctccggcaagtggttccagcccttctgggcttcagtctcctcatctgtcacttgggcacaatagaagcaactacctcccagtgaaggagtccatgagagggcccgacttctcggcctcagcactgggccacatgcacagtcaccacttgctccactctggcatctccatggggacaatgcccgcaggcacccccatttcacagataaggaaagcgaggcccaggggtgaaatcagttgcccagggtgacacagccaggaagcagaggagctgggatttgaatggaagcttaattcaggagcccgtgagcctccccagcccctcccaatggtgacagctccttttctgcttcactctgagcacctcatgtgtgcccagccctgggctgggacacagcagtgaccgagacagcccattcctgccctcatgggggtcccaggtcaggcacagtggctcacacctgtaatcccagcactttgggaggctgaggtgggcggatcgcttgagatcgggagttcaagatcagcctgggcaacatagcaataccctgtctctacaaaaaaaattagaaattaggcatatggtggtacatgcctgtagtcccaactactggggacgctgagctggcagggcacatgcctatagtcccagctacttgggagcctgggaagggggagtggttctattctgaagctgaggccaagccatccaaggccttgcaggtgtgctgaggaacccatatcttctcagggcacgagggagccatggcaggttctgggcagggggtcaacagggtcaggtttgtgctttaacatgatccctctgtctgctgtctgtgaggtcacttgaagttggggcatgagactagagaggaggctgtgggtagagaaactgggggggtggcccaggagatgggaaggatggttagaaagatacttgagggtctcatggcctcagttccaacagtccctggaactcagaggccagagattctaagtcactcactctagatggctgcttttccctctgggcttcagtctcccccttgattgaatgaggggataacactgaccagagtggtaatggtagtgattttttttttcttttcttcccctgccccacctcacatacctctgccctgagacgcagtctctgttgcccaggccagagtgcagtggcacagtgtcagctcacctcaacctccaccttctgggttcaagtgattctcctgtctcagcctcccaagtagctgggattacaggcacgcactgccacacccggctaatttttgtatttttgcgtcgtggcacatgcgtgtaatcccaggtactcgggaggctgaggcaggagagtcacttgaacccgggaggcagaggttgcagtgagccgagatgacgcctttgcactccagcctgggcaacaagagcaaaacgccccatctcaaaaaaaaaaaaaaagagagagagagggagagatgggggtctcgccatgttgccccagctggtctcagactcctgggctcaaacaaccctcctgcctcagcctcccaaagtgccaggattacaggcgtgagctactgtgccccgcccgtgtgatggtgattcaacaaccagtggggggttcggggattcatttgcttcatctcctctgggaaggagagtcacacagtcgcttgcccgagcccatggggaccagctgcagcctacttctgatctcagcctccccagaagatgccaccagggcactggccatgaactcacggcctctctcacacccaccaggctcatcttgggggttgccgcctaacactcagcccctctgagagctccacccagccatgcctgcaggtatgaaaggcccctattcctgcagctccagagagctggctccaggctggctccatgctagcaggccagcctgctcccactgtggggcccctagtctgcccctctggtcatcttggtctgggaagcatcttcgcacctgctttgctctgtgctgtctcagcttctctgtgtgccctcagtctcgtggcccccaacctcccttcccttctccacgtgtcttcctctccagggctgcaccctaggagattgctcgatcgtggtggatttctcaactgtgaatcttcagtccctcttcccccttcatttctgtctctgcagatgtgttgtttctttttttttttttcttttttttttttttttgtctttttgagatgaagtcttgcactgtctcccaggctggagtgcagtggcacaatcacaatctcagcttactgcaacttccgcctcccgggttcaagcgattctcctgcctcagcctcctgagtagctgggactacaggtgtgcaccaccacactcagctaatgtttgtatttttagtagagacagggtttcaccatgttggccaggctggtctcgaacctccgacctcagacgatccacccacctcagcctcccaaagtgctggaattacaggtgtgagccaccgtgcccagcctctttttttctttaaaaattttttaggccgggcgcggtggctcatgcttgtaatcccagcactttgggaggccgaggcaggcggatcacgaggtcaggagatcgagaccacggtgaaaccccttctctactaaaaatacaaaaaattagccaggcatggtggcgggctcctgtagtcccagctactcggagaggctgaggcaggagaatggcgtgaacccgggaggtggagcttgcagtgagccgagatagtgccactgcactccagcctgggcgacagagcgagactccatctcaaaaaaaaaaaaaaaaaattaaatttcttattttttgaaacaggatctctgttgcccacgttggagtgcagtggcgtgatcatagctcagtgtaaccttgaccttctgagctcaagtgatcctcctgcctcagcctcccaagtagctgggactataagcatgtgccatcatgcctggctacgtttttaaatttatttatttgttgtttgtttgcttattgggacagattctcactctgtcactcaggctggagtgcagtggcactatcatggctcactgcagcctccacctcctgggcttaagcaatcctcccacgtccacccccttagtacctgggactacaggtgtgcaccacctcacccaactaatttttgtattcgctatgtttcccaagctggtttcgaattcctgggctcaaatgaacccactttggcctcccaaactgctgggattacaacaagcatgagccactgtgcctggccttgatttttttttttttttttatgataatctgtagttagatgaagtttttaaattttttgtagagatggggtctcactatgtcacctaggcttgtctccaactgctgacctcaagctgtcctcttgccccagccctccaaagcattgggattactggcatgagccattgcatctggctttttttttttttttttttttttttttttttttttgagatggggtctcaccatgttgcccgggctggcttcgaatgcctaggctcaagcaatcctcccttctcagcctcccaaatagctgggattacaggcacgtgccaccacgccaggcttgttttctttccctgtccctccctctctatttcccactctcttcctccccaattcttctggccctataaaatcacatttgtggcctgtaccctgctaggctcgaaagacaccaaagtgaatccatctccatcctgaggcttgaaaaggcagcccaaaggtggcagttctcttgttcagcaagcactccctacggtggagggacacaggaacgcagacttggacctcagtgcagcaagtcccagccacagctgagcactcgattcctcacaaccccaagaggcagttaggttcacagagagatgatgccagcgtccatggtcaccagccagcctgtggcagggctgggattcgaacccaggctgtgcatatttacccactctacccaatggcctctcagcagcagagtggctcagagcctgggtttgggaggtgtggaggcttggattctgcccttgacacattttgtgagcatgagtgagtgacttaccctgtaagcttctataagtggtggtgaccccctctgtaagtgggggtggataaatgctgaccacatgggcttgtgtcgaccagatgaggtccttcaggtaatgcagtcatagcagggcctgggacgctgacctcagcggtagggaacccctgggcgatgggttaggagaaaggagcccttgagggaggcctgagagcaagcccaagcctccagccggggtgagcctagagggcttcctggaggtggagtctagcctggcactcagggtgggtggaaactgatcgtcattttgcccacaggaatcctcgtagcccactacctccagagcatcacgccttgcctggccctgggtggagagctggtctaccaccggcggcctggagaggagggcactgtcatgtctctagctgggaaatacacatgtgagcctggcgcctgggtccgagggtggaggggctgggcccctggactcctcctgggtctgagggaggacgggctagggccctggacactcaggtctgagggaggaggcctgggttcccagatgcccaaatccccttggtaatgagaccccgcctccaccccactctctgacagtgaacaactggttggcaacggtaacgttgggccaggcgggcatgcacgcaacatactaccacaaagccagtgaccaggtgagtgggtgcagggactagctggtgctgccaggggctgctgggcctggaagtccaggtggggccacttgctaattctcatgtgttgctccggcccctccagctgcaggtgggtgtggagtttgaggccagcacaaggatgcaggacaccagcgtctccttcgggtaccagctggacctgcccaaggccaacctcctcttcaaaggtaaaggtctcggttcccctacgcgggaaacaggcaggaggtgactcaactctgagtggatgtgtgggccaccacaggtgctggaggacagtgtgctgccaccctgtgggcctccacattaccagggaacacttgttaaaaggtaggtggggccgggtgcggtggctcacgcctgtaatcccagcactttgggaggccaaggcgggccgaggtaaggagattgagaccatcctggctaacacggtgaaactccgtctctactaaaaatacaaaaacaaaattagccgggtgtggttgcgggtgcctatagtcccaactactgaggctgaggcgggaaaatggtatgaacccaggaggcggagcttgcggtgagccgagatcgtgccaccgcactccagcctgggtgacagagcaagactccatctcaaaaaaaaaaaagtaggtggacaaccctctactatgttttatgcttggaaaaaaaaagtaggtagagcagccaggcgtggtgactcacgcctgtaatcccagcattttgggaggccaagccaggtagaatacttgaggccaggagttggagaccagcctggccaacgtggtgaaatcccctctctactaaaagtacaaaaattagccaggtgtggtagcgtgctgcaactgtagtccccgctacttaggaggctgaggcacaagaatcacttgaacctgggaggcggaggttgcagggagttgagactgcaccactgcactccagcctgggtgacagagtgagactccatctccaaaaaaaataaaatgaaataaataaataaatgttaaaaaaaatctggtggagcatctgatgggtgtttgggccaagctggagctttgtccatcccctcttatttttctgcacttgactctcttatttttctgagactggtctccctctgtcgcccaggctagagtgcagcagtgcaactgcggctcactgcagcctccacctcccgggctcaagcagccttcccacctcagcctcctgagtagctaggaccacaggtgtatgccaccaggcccagctaatttttttgatagttttgggagacatgggggtttcaccatgttgcccaggctggtctcgaactcctggactcaagccttggcctcccaaagtgctgggattataggtgtgagccaccacacccagccagggtagaaggcactttggaagcctcgagcctgccccattcatcttacgttagtggaaactgaggcttccagaggtttcaaggtcacaactaaatccagaacctcatctcaggcacactggtcgtagtcccaatgtccagtcttaagtcttcttggatatctgtggctcacagattttgggtgtttgagcctcctgctgagcactgctggggccacagcggtgaccagccctgtcttcacgggactcagtgagaggaacagattcatccgcagagtgggcaggactaggttgggggaacccaggggtctagagggcttttcagagggcaggggtcactgagcggagagcagaggaggagtgagccatttgctccagcgtgaagttgttggtgtgatggggtttcagggtggcaggagcagtgtggttaaaggtctggaagctgtcggcatgtggctggtatccaaggtggccaggaactctgcatggatatggtgggaagctggcacgcctctcacctcagctcttccctgcaggctctgtggatagcaactggatcgtgggtgccacgctggagaagaagctcccacccctgcccctgacactggcccttggggccttcctgaatcaccgcaagaacaagtttcagtgtggctttggcctcaccatcggctgagccctcctggcccccgccttccacgcccttccgattccacctccacctccacctccccctgccacagaggggagacctgagcccccctcccttccctccccccttgggggtcgggggggacattggaaaggagggaccccgccaccccagcagctgaggaggggattctggaactgaatggcgcttcgggattctgagtagcaggggcagcatgcccagtgggcctggggtcccgggagggattccggaattgaggggcacgcaggattctgagcaccaggggcagaggcggccagacaacctcagggaggagtgtcctggcgtccccatcctccaaagggcctgggcccgccccgagggggcagcgagaggagcttccccatccccggtcagtccaccctgccccgtccactttcccatctcctcggtataaatcatgtttataagttatggaagaaccgggacattttacagaaaaaaaacaaaaaacaacaaaaaatatacgtgggaaaaaaaacgatgggaggcctccgttttctcaagtgtgtctggcctgttttgagcatttcatccggagtctggccgccctgaccttcccccagccgcctgcagggggcgccagagggccggagcacggaaagcagcggatccttgatgctgccttaagtccggctcagaggggcgcagcgtggcctggggtcgctatcttcccatccggaacatctgccctgctgggggacactacgggccttcccttgcctgagggtagggtctcaaggtcacttgcccccagcttgacctggccggagtggctatagaggactttgtccctgcagactgcagcagcagagatgacactgtctctgagtgcagagatgggggcagggagctgggagagggttcaagctactggaacagcttcagaacaactagggtactaggaactgctgtgtcagggagaaggggctcaaggactcgcaggcctgggaggaggggcctaggccagccatgggagttgggtcacctgtgtctgaggacttggtgctgtctggattttgccaacctagggctggggtcagctgatgcccaccacgactcccgagcctccaggaactgaaaccctgtctgcccccagggtctggggaaggaggctgctgagtagaaccaaccccaggttaccaaccccacctcagccaccccttgccagccaaagcaaacaggcccggcccggcactgggggttccttctcgaaccaggagttcagcctcccctgacccgcagaatcttctgatcccacccgctccaggagccaggaatgagtcccagtctctcccagttctcactgtgtggttttgccattcgtcttgctgctgaaccacgggtttctcctctgaaacatctgggatttataacagggcttaggaaagtgacagcgtctgagcgttcactgtggcctgtccattgctagccctaacataggaccgctgtgtgccagggctgtcctccatgctcaatacacgttagcttgtcaccaaacatacccgtgccgctgctttcccagtctgatgagcaaaggaacttgatgctcagagaggacaagtcatttgcccaaggtcacacagctggcaactggcagagccaggattcacgccctggcaatttgactccagaatcctaaccttaacccagaagcacggcttcaagcccctggaaaccacaatacctgtggcagccagggggaggtgctggaatctcatttcacatgtggggagggggctcccctgtgctcaaggtcacaaccaaagaggaagctgtgattaaaacccaggtcccatttgcaaagcctcgacttttagcaggtgcatcatactgttcccacccctcccatcccacttctgtccagccgcctagccccactttcttttttttctttttttgagacagtctccctcttgctgaggctggagtgcagtggcgagatctcggctcactgtaacctccgcctcccgggttcaagcgattctcctgcctcagcctcccaagtagctaggattacaggcgcccgccaccacgcctggctaacttttgtatttttagtagagatggggtttcaccatgttggccaggctggtctcaaactcctgaccttaagtgattcgcccactgtggcctcccaaagtgctgggattacaggcgtgagctaccgcccccagcccctcccatcccacttctgtccagccccctagccctactttctttctgggatccaggagtccagatccccagccccctctccagattacattcatccaggcacaggaaaggacagggtcaggaaaggaggactctgggcggcagcctccacattccccttccacgcttggcccccagaatggaggagggtgtctgtattactgggcgaggtgtcctcccttcctggggactgtggggggtggtcaaaagacctctatgccccacctccttcctccctctgccctgctgtgcctggggcagggggagaacagcccacctcgtgactgggggctggcccagcccgccctatccctgggggagggggcgggacagggggagccctataattggacaagtctgggatccttgagtcctactcagccccagcggaggtgaaggacgtccttccccaggagccggtgagaagcgcagtcgggggcacggggatgagctcaggggcctctagaaagagctgggaccctgggaacccctggcctccaggtagtctcaggagagctactcggggtcgggcttggggagaggaggagcgggggtgaggcaagcagcaggggactggacctgggaagggctgggcagcagagacgacccgacccgctagaaggtggggtggggagagcagctggactgggatgtaagccatagcaggactccacgagttgtcactatcatttatcgagcacctactgggtgtccccagtgtcctcagatctccataactggggagccaggggcagcgacacggtagctagccgtcgattggagaactttaaaatgaggactgaattagctcataaatggaacacggcgcttaactgtgaggttggagcttagaatgtgaagggagaatgaggaatgcgagactgggactgagatggaaccggcggtggggagggggtggggggatggaatttgaaccccgggagaggaagatggaattttctatggaggccgacctggggatggggagataagagaagaccaggagggagttaaatagggaatgggttgggggcggcttggtaaatgtgctgggattaggctgttgcagataatgcaacaaggcttggaaggctaacctggggtgaggccgggttggggccgggctgggggtgggaggagtcctcactggcggttgattgacagtttctccttccccagactggccaatcacaggcaggaagatgaaggttctgtgggctgcgttgctggtcacattcctggcaggtatgggggcggggcttgctcggttccccccgctcctccccctctcatcctcacctcaacctcctggccccattcaggcagaccctgggccccctcttctgaggcttctgtgctgcttcctggctctgaacagcgatttgacgctctctgggcctcggtttcccccatccttgagataggagttagaagttgttttgttgttgttgtttgttgttgttgttttgtttttttgagatgaagtctcgctctgtcgcccaggctggagtgcagtggcgggatctcggctcactgcaagctccgcctcccaggtccacgccattctcctgcctcagcctcccaagtagctgggactacaggcacatgccaccacacccgactaacttttttgtattttcagtagagacggggtttcaccatgttggccaggctggtctggaactcctgacctcaggtgatctgcccgtttcgatctcccaaagtgctgggattacaggcgtgagccaccgcacctggctgggagttagaggtttctaatgcattgcaggcagatagtgaataccagacacggggcagctgtgatctttattctccatcacccccacacagccctgcctggggcacacaaggacactcaatacatgcttttccgctgggcgcggtggctcacccctgtaatcccagcactttgggaggccaaggtgggaggatcacttgagcccaggagttcaacaccagcctgggcaacatagtgagaccctgtctctactaaaaatacaaaaattagccaggcatggtgccacacacctgtgctctcagctactcaggaggctgaggcaggaggatcgcttgagcccagaaggtcaaggttgcagtgaaccatgttcaggccgctgcactccagcctgggtgacagagcaagaccctgtttataaatacataatgctttccaagtgattaaaccgactcccccctcaccctgcccaccatggctccaaagaagcatttgtggagcaccttctgtgtgcccctaggtactagatgcctggacggggtcagaaggaccctgacccaccttgaacttgttccacacaggatgccaggccaaggtggagcaagcggtggagacagagccggagcccgagctgcgccagcagaccgagtggcagagcggccagcgctgggaactggcactgggtcgcttttgggattacctgcgctgggtgcagacactgtctgagcaggtgcaggaggagctgctcagctcccaggtcacccaggaactgaggtgagtgtccccatcctggcccttgaccctcctggtgggcggctatacctccccaggtccaggtttcattctgcccctgtcgctaagtcttggggggcctgggtctctgctggttctagcttcctcttcccatttctgactcctggctttagctctctggaattctctctctcagctttgtctctctctcttcccttctgactcagtctctcacactcgtcctggctctgtctctgtccttccctagctcttttatatagagacagagagatggggtctcactgtgttgcccaggctggtcttgaacttctgggctcaagcgatcctcccgcctcggcctcccaaagtgctgggattagaggcatgagccaccttgcccggcctcctagctccttcttcgtctctgcctctgccctctgcatctgctctctgcatctgtctctgtctccttctctcggcctctgccccgttccttctctccctcttgggtctctctggctcatccccatctcgcccgccccatcccagcccttctccccgcctcccactgtgcgacaccctcccgccctctcggccgcagggcgctgatggacgagaccatgaaggagttgaaggcctacaaatcggaactggaggaacaactgaccccggtggcggaggagacgcgggcacggctgtccaaggagctgcaggcggcgcaggcccggctgggcgcggacatggaggacgtgtgcggccgcctggtgcagtaccgcggcgaggtgcaggccatgctcggccagagcaccgaggagctgcgggtgcgcctcgcctcccacctgcgcaagctgcgtaagcggctcctccgcgatgccgatgacctgcagaagcgcctggcagtgtaccaggccggggcccgcgagggcgccgagcgcggcctcagcgccatccgcgagcgcctggggcccctggtggaacagggccgcgtgcgggccgccactgtgggctccctggccggccagccgctacaggagcgggcccaggcctggggcgagcggctgcgcgcgcggatggaggagatgggcagccggacccgcgaccgcctggacgaggtgaaggagcaggtggcggaggtgcgcgccaagctggaggagcaggcccagcagatacgcctgcaggccgaggccttccaggcccgcctcaagagctggttcgagcccctggtggaagacatgcagcgccagtgggccgggctggtggagaaggtgcaggctgccgtgggcaccagcgccgcccctgtgcccagcgacaatcactgaacgccgaagcctgcagccatgcgaccccacgccaccccgtgcctcctgcctccgcgcagcctgcagcgggagaccctgtccccgccccagccgtcctcctggggtggaccctagtttaataaagattcaccaagtttcacgcatctgctggcctccccctgtgatttcctctaagccccagcctcagtttctctttctgcccacatactggccacacaattctcagccccctcctctccatctgtgtctgtgtgtatctttctctctgcccttttttttttttttagacggagtctggctctgtcacccaggctagagtgcagtggcacgatcttggctcactgcaacctctgcctcttgggttcaagcgattctgctgcctcagtagctgggattacaggctcacaccaccacacccggctaatttttgtatttttagtagagacgagctttcaccatgttggccaggcaggtctcaaactcctgaccaagtgatccacccgccggcctcccaaagtgctgagattacaggcctgagccaccatgcccggcctctgcccctctttcttttttagggggcagggaaaggtctcaccctgtcacccgccatcacagctcactgcagcctccacctcctggactcaagtgataagtgatcctcccgcctcagcctttccagtagctgagactacaggcgcataccactaggattaatttgggggggggggtggtgtgtgtggagatggggtctggctttgttggccaggctgatgtggaattcctgggctcaagcgatactcccaccttggcctcctgagtagctgagactactggctagcaccaccacacccagctttttattattatttgtagagacaaggtctcaatatgttgcccaggctagtctcaaacccctgggctcaagagatcctccgccatcggcctcccaaagtgctgggattccaggcatggggctccgagcccggcctgcccaacttaataatacttgttcctcagagttgcaactccaaatgacctgagattggtgcctttattctaagctattttcattttttttctgctgtcattattctcccccttctctcctccagtcttatctgatatctgcctccttcccacccaccctgcaccccatcccacccctctgtctctccctgttctcctcaggagactctggcttcctgttttcctccacttctatcttttatctctccctcctacggtttcttttctttctccccggcctgcttgtttctcccccaacccccttcatctggatttcttcttctgccattcagtttggtttgagctctctgcttctccggttccctctgagctagctgtcccttcacccactgtgaactgggtttccctgcccaaccctcattctctttctttctttctttttttttttttttttttttttttttttttgagacagagtcttgctctgttgcccagcctggagtgcagtggtgcaatcttggttcactgcaacctccacttcccagattcaagcaattctcctgcctcagcctccagagtagctgggattacaggcgtgtcccaccacacccgactaatttttgtatttttggtagagacaaggcttcggcattgttggccaggcaggtctcgaactcctgacctcaagtaatctgcctgcctcaccctcccaaagtgctgggattacaggcatgagccacctcacccggaccatccctcattctccatcctttcctccagttgtgatgtctacccctcatgtttcccaacaagcctactgggtgctgaatccaggctgggaagagaagggagcggctcttctgtcggagtctgcaccaggcccatgctgagacgagagctggcgctcagagaggggaagcttggatggaagcccaggagccgccggcactctcttctcctcccaccccctcagttctcagagacggggaggagggttcccaccaacgggggacaggctgagacttgagcttgtatctcctgggccagctgcaacatctgcttgtccctctgcccatcttggctcctgcacaccctgaacttggtgctttccctggcactgctctgatcacccacgtggaggcagcacccctcccctggagatgactcaccagggctgagtgaggaggggaagggtcagtgtgctcacaggcagggggcctggtctgctgggcctgctgctgattcaccgtatgtccaggagctggagcagcaccctctcagagcctcagtttccccagatgtcaatgagagaatcagcatcagccacatctcccacctgaagaatcgaaccttgagttctcacctttaagaatttttttttttttttgagacagtgccttgctcagtcgaccacgctggagtgcagtagcacgatcatcaatcactgcagcctccaactcaagcaaccctcctgcctcaacctcctgagtagctggggccacaggcacccaccaccatgcctggctaattctttcttttttgagatggagtctcactctgtcgcccaggctggagtgcagtggcaccatcttggctcaccgcaacctctgccccccgggttcaagcaattctcctgcctcagcctcctgagtagctagaattacaggcgcacaccaccacaccaggctaatttttgtatttttagtagaaacgaggtttcaccacggtggtcaggttggtctcaaactcctgacatcaggtgatccacccgcctcggcctcccaaagcactgggattacaggagtgagccaccatgcctggccatattttaaacttttttgtagagatggggtcttactatgttgcccaggctgatctcaaactcttgggctcaagcagatcctcctgccaaagcttcccaaagtagttggattacaggtgtgagccaccacgccccaccaacctatgaagatgtctaagcagacagggtgccctatctcaccacatccccagtcagatccagaggtgggacaaggatgggaaggaggttccagaacaaaggctggcagggagtcgtatgggacaggagctgacccagcaaccatccacagagacatcctggagcctgggaaggagaaggacaaagagcccccttttttaaattttttttatgtttttgagacggagtctcactctgtcacccaagctggagtgcagtggcacaatcttggctcactgcaacctccacctcatgggttcaaacgactctcctgcctcagcctcctgagtagctgggaccacaggtgcacaccaccatgcctggataatttttgaatttttggtagagacggagtttcaccatgttggccaggcaggtctcgaactcctgacctcaagtgctccgcccaccttggcctcccaaagttctgggaatacaggcgtgagccactgcaaccagccagtagcccccatctttgcccctcgctgagccctactggatgttcttggttatgcgacagtttccccatctattaaagagaaacccctatagcagaggggaggatgaggttggaaaagcaggagcattgttatgctattcttgtggggtctgggaagcagacatctgggtggatgtttggggggtgctgggcttagttggggaagtaggggggcccctggggctgacagggactggaagctctgagctggccagagggatgttgcaatcctgccagggtcttgtctatgctgtccttttcacaaccatccccctactgccaggctgacacgtggttgcgggggcacaaggccagccaacctagagtctgaggctaggcggaggacaccctccccaccagctgccagggtcactggcggtcaaaggcagctggtggggaaggcattggactccagccttgggggacggatgtagtgatggtgggaagcaggcttggtgccaggaggggcgtcagagggtgaataaaagcagatagagtgtttgggggaggtagccagccaaagggggtgaggcccggtggaagggaagaagggacatacacgcagagctttgcagctgagggttttaattttttgagatggggtctctgtcccaccaggctggagtgcagtggcacaatcacagctcactgcagcctcgaactcctgggctcaagcaatcttcctacctcagcctcttgagtagctgggactacaggcatgcgccaccacgctcggctaatttttgaacttttttgtagagatgaggtctccctatattgcccaggctggtctcgaactcccaggctcaagtgatcctccctcttcagcttcccaaagtgctgggattacaggcatgagccaccatgcctggctaatgcaggtgaggtttttgcagtgtcatccagctaaggcgacccgttcccctcccaaaaaagggagactgagaaccatgaagttaagagcccagagaatatcacggtggtctggggtgcttcaagggctggtctggaataaattggaggtggcacgcagggtaggagcgccgggccaactgggagacccagcaacataaaggaaaagttgttggggctgaggaggcttgctgagagaggggaagtgagggaaagaggtgatctagggacacggtgtgaatgagggggggatgagatcacagggttattactgggagacccctgagggaagatggccacagggacaggacaaggctgtcttcttaagggaggagaccacccctcatattgtcttatgcccaatttctgcctccaaagaaagaaaaagtaaaaactaaaaggcagaaatgaaatccacaagcagacagcccgcgccacaccctgggcctggtggttaaagattgacccctgacctaatccgttaggttatctatagattacagacattgtatagaaaagcactgtgaaaatccctattctgttttgttccgatctaattaccggtgcatgcagcccccagtcacgcatcccctgcttgttcaatcgatcacgaccctctcacgtgcacccacttagagttgtgagcccttaaaaggaacagggattgctcactcggggagctcggctcttgagacaggaatcttgcccattccccgaacgaataaaccccttccttaactcagcgtctgaggaattttgtctgcggctcctcctgctacattctgagtggggaaagggactaaggtggtctgaggaccccacagagtcaggaagattgagaggtgagagtgctgaacggggaggggctttggggctaagggaagtgcccgggaccccacctgaccccaacgctcacgggacaggggcagaggagaaaaacgtgggtggacagagggaggcaggcggtcaggggaaggctcaggaggagggagatcaacatcaacctgccccgccccctccccagcctgataaaggtcctgcgggcaggacaggacctcccaaccaagccctccagcaaggattcaggttggtgctgagtgcctgggagggacacccgcctacactctgcaagaaactcaaaaagggagatgaggggatcgtgggagggaggtagggagggaggagggtgccactgatcccctgaacccctgcctctgcctccagagtgcccctccggcctcgccatgaggctcttcctgtcgctcccggtcctggtggtggttctgtcgatcgtcttggaaggtaaaagtgggatgggagaattgcggagttggagatttggaagagtgaaggtggctacaggcctggggtcccggcttagaggacctctgagagctccggggccccttctgggtcgtggttgcctcatcgtggtcgggtgggtctccaggttctcccaggctcagtcccgcaggcgccaaatctgcgcaggagagcactagcaaccgatgacgtattgaggcccacacctctgggattggctgtcctgcttcgacagccttgaaagtgggtaagctgggtggggggctctgggagaggtcagtgctgagtaaggcaattcccagcagcttgagccccaccaggtcactccagtattcctccccattctttttttttttttttttttttctcttgagacggagtctcgctctgtcgccgaggctggagtgcagtggcgcgatctcggctcactgcaagctccgcctccctggttcacgccattctcctgcctcagcaggactacaggcgcccgccaccgcgcccggctaattttttgtattttcagtagagacagggtttcaccgtggtctcgatctcctgactttgtgatccgcctgcctcgacctcccaaagtgctgggattacaggcgtgagccaccgcgtccggccattcctccccattctaaccacatgatccccaaggatctctatccatcccggtatcccaacctaagggggttccaataacaaatttttggccgggcagggtggctcatgcctgtaatcccagcactttgggaggccgaggcgggcagatcacttgaggtcaggagttcgaaaccagcctggccaacatggtgaaacttcgtctctactaaaaatacaaaaaaattagccaggtgtggaggcacgcgcctgtaggcccagctactcgggaggctgaggcaggagaatcacttgaacccgggaggcggaggttgcagtgagccgagatcataccactgcactccagcctggctgacacagcaagactccgtctcaaaacaaaacaaaacaaaaatagctgggtgtggtggtgcacacctgtaatcccagctacttgggaggctgaggcaggagaactgcttgaacccgggaggtggtggttgcagtaggccgagatcatgccactgcactccagcttgggctacagagcaagactccatctccaaaaaaaaaaaaaaaaaaacaaattttgaacccctgcccatcttcctggcaggcccagccccagcccaggggaccccagacgtctccagtgccttggataagctgaaggagtttggaaacacactggaggacaaggctcgggaactcatcagccgcatcaaacagagtgaactttctgccaagatgcggttagaacccttcccagggcacgggagagctggggtgtgtttttgggtggagccctggcagatggtccaagatgaacagattgaaaaaaaaacaagtcctggagaggctgacaacatccctctggtcacacagctagatctcaaggtgctcagacttcaaggacagtttccctgactcccatccaggccatattttaaaagatggtcttgggctgggcacggtggctcatgcttgcaatcccagcacttagggaggccgaggtgggctgattgcctgaggtcaggagttcgagaccagtctgaccaacatggtgaaaccttgtctctactaaaaatacaaaaaaattaggcaggcatggtggcgtgcacctgtaatcccagctagtcgggaggctgaggcaggggaattgcttgaaccaggaaggtgggagttacagtgagccaacattgtgccagcctgggtgacagaaggagactctgtctcaaaaaaaaaaaaaaaaaaaaaaaaaacaagatggtcttgcccaggtatggtggctcacacctgtaattccagcactatgggaggctgagatgggaggattgcttgagcccaggagttcgagaccagcctgaccaacatggcgagatcctgtctccatttaaaaaaaaaaaaaaaaagatggttttgtgaggtaatgaaaatgaaggccccaagcttggccagacctgggtccccaggctggagtagcaccccttcctgtgtgatcttgacagaggggcattactgtgagcctcagtttcctctcctataaactggtggttctacagggaagtaaaggagcaggcctacagggtgtctggtacatgtagatgctcagtatatcatgaaacccacccttgccccctttggcaagttagagagtcattcgttctttcaaaaatatttactgagcatctgctaagtgctggaaactgtttcaatgtggggaataaaacagtgaagaacgtgccgagcacggtggctcacacctgtaaccccaccactttggaaggccgaggtgggtggatcacttgaggtcaggagtgcgagaaccccgtccctaatagaaatgcaaaaaaaattagctgggcatggtggcccatgcctgtagtcccagctccttgggaggctgaggcgagaggattgcttgagcccaggagatctaggctgcagtgcgccatgtttgtgccactgcattccagcctgggtaacagaatgagaccctgtctcaacaaaaaaagaaaagaaaagagaagaaaagagaaaagaaagacagggagggagggaggaaggaagggagggagggagggaaaatagagccaggcataaacttagaaagatcgtttggaggccaggcacaatggctcacacctgtaatcccagcactttgggaggccaaggcaagcagatcacctgaggtcaggagttcgagaccagcctaacatggagaaaccctgtctctactaaaaatacaaaattagccgggcgtggtggtgcattcctgtagtcctagctactcgggagcctgaggcaggagaatcacttgaacccgggaggcggaggttgcagtgagccgagatcatgccactgcactccagcctgggcgacaaggcgagactccatgccaaaaaagaaaaaaaactcctggcgcggtggctcacgccagtaatcccagcactgtgggaggctgagcaggcggatcacgaggtcaggagttcgagactagcctgctcaacataatgaaaccctctctgtactaaaaatacaaaaattagctgggtgtggtggcaggcacctgtagtcccagctactcgggaggctgaggcaggagaatggcttgaacctgggaggcagaggttgcagtgagccgagacagtgccattgcactccagtccaggtgacagagcgaaactccatctcaaaaaaaaaaggaaggcattggtagcaagagatggcaggccttgaaagccaggccagggtgaagtgtttcttttttttttttttttttttttctttttaaatttttttttttgagacggagtctcgctctgtcacccaggctggattgcagtggcctgatctcggctcactgcaagttccgcctcccgggttcatgccattctcctgcctcaccctcccgagtagctgggactacaggcacctgccaccacgccagctaattttttgtattcttagtagaatgtagaatttacttagtagaattttttgtattcttagccagcatggtctcgatctcctgacctggtgatccacccgcctcggcctcccaaagtgctgggattacaggcgtgagccacggcgcccggccttattttttctttttgagatgtacccagactggagtacagtggtgcgatctcggcttactggaacctccacctcccgggttcaggcaattctcctgcctcagcctcatgagtacttggaactacaggtgtgtgacaccacacatggtattttttgtatttttagtgaagatgacatttcaccatgttgcccaggttggtctcgaactcctgacctcaagtgatcagcctacctcggcctcccaaagtgttgggattacaggcgtgagccaaatgcccagccaagggtaaagtgtttagacttcaacgtgctttggtccatctgggaaactgaggcacagaagttggcccacccagcccagcggtcctcctaatcccacagacagtggggatggagattctgcaaggggaagaggtgggagtcaggtagcaggcagaatttggacagcctgggaggtagctgcacacagtgacccccttccttattcctccccacagggagtggttttcagagacatttcagaaagtgaaggagaaactcaagattgactcatgaggacctgaagggtgacatcccaggaggggcctctgaaatttcccacaccccagcgcctgtgctgaggactccctccatgtggccccaggtgccaccaataaaaatcctacagaaaattctctcctgagtgcttctttactctggggaaggggctgcgggagagggtaggggcttccagagagggcagggtctgcaggagagggcaggggctaaaccttaggtactcctcacaagccctccaatgccctatctacttgccctgtgctgaggatgttttaactccatggtctcaaaagagtcttcctaagaaccctgcaaactgggccttattaatcccataagggcattgaggcccagagaggtgaagttacttgtataaggtcacacagccaggaagtagagaactggaactagattgaaccctcagcctagcaatgtcactatgctacacttttcctagtgtggtctacccgagatgaggggctgaggtttttttttgtttttgtttctgttttgaggcagactcactctctcccccaggatggagtacagtggtgcgatctcagctcactgcaacctccacctcccaggttcaagagattatcctgcctcagcctcccaagtagctgggatttacaggtgtgcgccaccacacccagctaatttttgtatttttagtagagacagggtttcatcatgttggccaggctggtctccaactcctgggcttaagcaatcctcctgccttggcctcccaaagtattagaattacaggcgtgagccactgtgcctggctcttatgtaaaattaaaccacatacacatgagaaacaaccctatgtaattaagatttctttctttttttttttttttttaagagatggagtcacccaggctggagtgcagttgcacaatctccattcactgcagccttgcaacctccaccacctgagttcaagggattctcctgcctcagcctcctgagtagctgggattataggcatgtgccaccacgcccagctaatttttttgtatttttagtagagacggaatttccccatgttggccaggctggtctcaaactcctggccttaaatgatccacccgtcctggcctcccaaagtgctgggattacaggtgtgagccaccgcacccagcttaagatttcataagaaaaatatttgtaagccacatatctaataaccggttaatattcaggctgggtgaagtggctcatgcctgtaatcccagcactttgggaagacaaggcgggcggattacctgaagtcaaaagtttgagacctgcctggccaacatggtgaaaccctgtctctactaaaaatacaaaaaaattagccgggtggggtggcacatgcctgtaatcccagctgcttgggaggctgaggcaagagaatcccttgaacccaggagtcgaaggttgcagtgagccaagatggcgccactgccctccagcctgggagacagagtgggactccatctcaaaaaaaaaaaaaattcaaaatgtataatatacaatcctagttgggacatcaaacactgcagccactgtggaaaacagtatggggtttcctcaaaacattaaagatagaactctcaaatgatccttcaatcccacttctgggtatttattcaaaagaattgaaatcaggaccttgaagagatacctgccctcccatgttcactgcaggtctgctcaatacccaagatatggaaacaacctaaatgtttatcaacagatgaatgggtcaaggaaatgtggtctctacatgtaatggaatgtaacgcatccttaaaaaggaaaccctaaggccgggctctgtggctcacacatgtttttttttttaaattttatttatttatttatttatttatttattttttattgatcattcttgggtgtttctcacagagggggatttggcagggtcataggacaatagtggagggaaggtcagcagataaacaagtgaacaaaggtctctggttttcctaggcagaggaccctgaggccttccgcagtgtttgtgtccctgggtacttgagattagggagtggtgacgactcttaacgagcatgctgccttcaagcatctgtttaacaaagcacatcttgcaccacccttaatccatttaaccctgagtgg

SEQ ID NO: 26 - DNA, 27612 bp, Homo sapiens
ccactcagggttaaatggattaagggtggtgcaagatgtgctttgttaaacagatgcttgaaggcagcatgctcgttaagagtcgtcaccactccctaatctcaagtacccagggacacaaacactgcggaaggcctcagggtcctctgcctaggaaaaccagagacctttgttcacttgtttatctgctgaccttccctccactattgtcctatgaccctgccaaatccccctctgtgagaaacacccaagaatgatcaataaaaaataaataaataaataaataaataaataaaatttaaaaaaaaaaacatgtgtgagccacagagcccggccttagggtttcctttttaaggatgcgttacattccattacatgtagagaccacatttccttgacccattcatctgttgataaacatttaggttgtttccatatcttgggtattgagcagacctgcagtgaacatgggagggcaggtatctcttcaaggtcctgatttcaattcttttgaataaatacccagaagtgggattgaaggatcatttgagagttctatctttaatgttttgaggaaaccccatactgttttccacagtggctgcagtgtttgatgtcccaactaggattgtatattatacattttgaattttttttttttttgagatggagtcccactctgtctcccaggctggagggcagtggcgccatcttggctcactgcaaccttcgactcctgggttcaagggattctcttgcctcagcctcccaagcagctgggattacaggcatgtgccaccccacccggctaatttttttgtatttttagtagagacagggtttcaccatgttggccaggcaggtctcaaacttttgacttcaggtaatccgcccgccttgtcttcccaaagtgctgggattacaggcatgagccacttcacccagcctgaatattaaccggttattagatatgtggcttacaaatatttttcttatgaaatcttaagctgggtgcggtggctcacacctgtaatcccagcactttgggaggccaggacgggtggatcatttaaggccaggagtttgagaccagcctggccaacatggggaaattccgtctctactaaaaatacaaaaaaattagctgggcgtggtggcacatgcctataatcccagctactcaggaggctgaggcaggagaatcccttgaactcaggtggtggaggttgcaaggctgcagtgaatggagattgtgcaactgcactccagcctgggtgactccatctcttaaaaaaaaaaaaaaaaagaaagaaatcttaattacatagggttgtttctcatgtgtatgtggtttaattttacataagagccaggcacagtggctcacgcctgtaattctaatactttgggaggccaaggcaggaggattgcttaagcccaggagttggagaccagcctggccaacatgatgaaaccctgtctctactaaaaatacaaaaattagctgggtgtggtggcgcacacctgtaaatcccagctacttgggaggctgaggcaggataatctcttgaacctgggaggtggaggttgcagtgagctgagatcgcaccactgtactccatcctgggggagagagtgagtctgcctcaaaacagaaacaaaaacaaaaaaaaacctcagcccctcatctcgggtagaccacactaggaaaagtgtagcatagtgacattgctaggctgagggttcaatctagttccagttctctacttcctggctgtgtgaccttatacaagtaacttcacctctctgggcctcaatgcccttatgggattaataaggcccagtttgcagggttcttaggaagactcttttgagaccatggagttaaaacatcctcagcacagggcaagtagatagggcattggagggcttgtgaggagtacctaaggtttagcccctgccctctcctgcagaccctgccctctctggaagcccctaccctctcccgcagccccttccccagagtaaagaagcactcaggagagaattttctgtaggatttttattggtggcacctggggccacatggagggagtcctcagcacaggcgctggggtgtgggaaatttcagaggcccctcctgggatgtcacccttcaggtcctcatgagtcaatcttgagtttctccttcactttctgaaatgtctctgaaaaccactccctgtggggaggaataaggaagggggtcactgtgtgcagctacctcccaggctgtccaaattctgcctgctacctgactcccacctcttccccttgcagaatctccatccccactgtctgtgggattaggaggaccgctgggctgggtgggccaacttctgtgcctcagtttcccagatggaccaaagcacgttgaagtctaaacactttacccttggctgggcatttggctcacgcctgtaatcccaacactttgggaggccgaggtaggctgatcacttgaggtcaggagttcgagaccaacctgggcaacatggtgaaatgtcatcttcactaaaaatacaaaaaataccatgtgtggtgtcacacacctgtagttccaagtactcatgaggctgaggcaggagaattgcctgaacccgggaggtggaggttccagtaagccgagatcgcaccactgtactccagtctgggtacatctcaaaaagaaaaaataaggccgggcgccgtggctcacgcctgtaatcccagcactttgggaggccgaggcgggtggatcaccaggtcaggagatcgagaccatgctggctaagaatacaaaaaattctactaagtaaattctacattctactaagaatacaaaaaattagctggcgtggtggcaggtgcctgtagtcccagctactcgggagggtgaggcaggagaatggcatgaacccgggaggcggaacttgcagtgagccgagatcaggccactgcaatccagcctgggtgacagagcgagactccgtctcaaaaaaaaaaatttaaaaagaaaaaaaaaaaaaaaaaaaaaagaaacacttcaccctggcctggctttcaaggcctgccatctcttgctaccaatgccttccttttttttttgagatggagtttcgctctgtcacctggactggagtgcaatggcactgtctcggctcactgcaacctctgcctcccaggttcaagccattctcctgcctcagcctcccgagtagctgggactacaggtgcctgccaccacacccagctaatttttgtatttttagtacagagagggtttcattatgttgagcaggctagtctcgaactcctgacctcgtgatccgcctgctcagcctcccacagtgctgggattactggcgtgagccaccgcgccaggagttttttttcttttttggcatggagtctcgccttgtcgcccaggctggagtgcagtggcatgatctcggctcactgcaacctccgcctcccgggttcaagtgattctcctgcctcaggctcccgagtagctaggactacaggaatgcaccaccacgcccggctaattttgtatttttagtagagacagggtttctccatgttaggctggtctcgaactcctgacctcaggtgatctgcttgccttggcctcccaaagtgctgggattacaggtgtgagccattgtgcctggcctccaaacgatctttctaagtttatgcctggctctattttccctccctccctcccttccttcctccctccctccctgtctttcttttctcttttcttctcttttcttttctttttttgttgagacagggtctcattctgttacccaggctggaatgcagtggcacaaacatggcgcactgcagcctagatctcctgggctcaagcaatcctctcgcctcagcctcccaaggagctgggactacaggcatgggccaccatgcccagctaattttttttgcatttctattagggacggggttctcgcactcctgacctcaagtgatccacccacctcggccttccaaagtggtggggttacaggtgtgagccaccgtgctcggcacgttcttcactgttttattccccacattgaaacagtttccagcacttagcagatgctcagtaaatatttttgaaagaacgaatgactctctaacttgccaaagggggcaagggtgggtttcatgatatactgagcatctacatgtaccagacaccctgtaggcctgctcctttacttccctgtagaaccaccagtttataggagaggaaactgaggctcacagtaatgcccctctgtcaagatcacacaggaaggggtgctactccagcctggggacccaggtctggccaagcttggggccttcattttcattacctcacaaaaccatctttttttttttttttttaaatggagacaggatctcgccatgttggtcaggctggtctcgaactcctgggctcaagcaatcctcccatctcagcctcccatagtgctggaattacaggtgtgagccaccatacctgggcaagaccatcttgttttttttttttttttttttttttttgagacagagtctccttctgtcacccaggctggcacaatgttggctcactgtaactcccaccttcctggttcaagcaattcccctgcctcagcctcccgactagctgggattacaggtgcacgccaccatgcctgcctaatttttttgtatttttagtagagacaaggtttcaccatgttggtcagactggtctcgaactcctgacctcaggcaatcagcccacctcggcctccctaagtgctgggattgcaagcatgagccaccgtgcccagcccaagaccatcttttaaaatatggcctggatgggagtcagggaaactgtccttgaagtctgagcaccttgagatctagctgtgtgaccagagggatgttgtcagcctctccaggacttgtttttttttcaatctgttcatcttggaccatctgccagggctccacccaaaaacacaccccagctctcccgtgccctgggaagggttctaaccgcatcttggcagaaagttcactctgtttgatgcggctgatgagttcccgagccttgtcctccagtgtgtttccaaactccttcagcttatccaaggcactggagacgtctggggtcccctgggctggggctgggcctgccaggaagatgggcaggggttcaaaatttgtttttttttttttttttttggagatggagtcttgctctgtagcccaagctggagtgcagtggcatgatctcggcctactgcaaccaccacctcccgggttcaagcagttctcctgcctcagcctcccaagtagctgggattacaggtgtgcaccaccacacccagctatttttgttttgttttgttttgagacggagtcttgctgtgtcagccaggctggagtgcagtggtatgatctcggctcactgcaacctccgcctcccgggttcaagtgattctcctgcctcagcctcccgagtagctgggcctacaggcgcgtgcctccacacctggctaatttttttgtatttttagtagagacgaagtttcaccatgttggccaggctggtttcgaactcctgacctcaagtgatctgcccgcctcggcctcccaaagtgctgggattacaggcatgagccaccctgcccggccaaaaatttgttattggaacccccttaggttgggataccgggatggatagagatccttggggatcatgtggttagaatggggaggaatggccggacgcggtggctcacgcctgtaatcccagcactttgggaggtcgaggcaggcggatcacaaagtcaggagatcgagaccacggtgaaaccctgtctctactgaaaatacaaaaaattagccgggcgcggtggcgggcgcctgtagtcctgctgaggcaggagaatggcgtgaaccagggaggcggagcttgcagtgagccgagatcgcgccactgcactccagcctcggcgacagagcgagactccgtctcaagagaaaaaaaaaaaaaaaaaaaaagaatggggaggaatactggagtgacctggtggggctcaagctgctgggaattgccttactcagcactgacctctcccagagccccccacccagcttacccactttcaaggctgtcgaagcaggacagccaatcccagaggtgtgggcctcaatacgtcatcggttgctagtgctctcctgcgcagatttggcgcctgcgggactgagcctgggagaacctggagacccacccgaccacgatgaggcaaccacgacccagaaggggccccggagctctcagaggtcctctaagccgggaccccaggcctgtagccaccttcactcttccaaatctccaactccgcaattctcccatcccacttttaccttccaagacgatcgacagaaccaccaccaggaccgggagcgacaggaagagcctcatggcgaggccggaggggcactctggaggcagaggcaggggttcaggggatcagtggcaccctcctccctccctacctccctcccacgatcccctcatctccctttttgagtttcttgcagagtgtaggcgggtgtccctcccaggcactcagcaccaacctgaatccttgctggagggcttggttgggaggtcctgtcctgcccgcaggacctttatcaggctggggagggggcggggcaggttgatgttgatctccctcctcctgagccttcccctgaccgcctgcctccctctgtccacccacgtttttctcctctgcccctgtcccgtgagcgttggggtcaggtggggtcccgggcacttcccttagccccaaagcccctccccgttcagcactctcacctctcaatcttcctgactctgtggggtcctcagaccaccttagtccctttccccactcagaatgtagcaggaggagccgcagacaaaattcctcagacgctgagttaaggaaggggtttattcgttcggggaatgggcaagattcctgtctcaagagccgagctccccgagtgagcaatccctgttccttttaagggctcacaactctaagtgggtgcacgtgagagggtcgtgatcgattgaacaagcaggggatgcgtgactgggggctgcatgcaccggtaattagatcggaacaaaacagaatagggattttcacagtgcttttctatacaatgtctgtaatctatagataacctaacggattaggtcaggggtcaatctttaaccaccaggcccagggtgtggcgcgggctgtctgcttgtggatttcatttctgccttttagtttttactttttctttctttggaggcagaaattgggcataagacaatatgaggggtggtctcctcccttaagaagacagccttgtcctgtccctgtggccatcttccctcaggggtctcccagtaataaccctgtgatctcatccccccctcattcacaccgtgtccctagatcacctctttccctcacttcccctctctcagcaagcctcctcagccccaacaacttttcctttatgttgctgggtctcccagttggcccggcgctcctaccctgcgtgccacctccaatttattccagaccagcccttgaagcaccccagaccaccgtgatattctctgggctcttaacttcatggttctcagtctcccttttttgggaggggaacgggtcgccttagctggatgacactgcaaaaacctcacctgcattagccaggcatggtggctcatgcctgtaatcccagcactttgggaagctgaagagggaggatcacttgagcctgggagttcgagaccagcctgggcaatatagggagacctcatctctacaaaaaagttcaaaaattagccgagcgtggtggcgcatgcctgtagtcccagctactcaagaggctgaggtaggaagattgcttgagcccaggagttcgaggctgcagtgagctgtgattgtgccactgcactccagcctggtgggacagagaccccatctcaaaaaattaaaaccctcagctgcaaagctctgcgtgtatgtcccttcttcccttccaccgggcctcaccccctttggctggctacctcccccaaacactctatctgcttttattcaccctctgacgcccctcctggcaccaagcctgcttcccaccatcactacatccgtcccccaaggctggagtccaatgccttccccaccagctgcctttgaccgccagtgaccctggcagctggtggggagggtgtcctccgcctagcctcagactctaggttggctggccttgtgcccccgcaaccacgtgtcagcctggcagtagggggatggttgtgaaaaggacagcatagacaagaccctggcaggattgcaacatccctctggccagctcagagcttccagtccctgtcagccccaggggcccccctacttccccaactaagcccagcaccccccaaacatccacccagatgtctgcttcccagaccccacaagaatagcataacaatgctcctgcttttccaacctcatcctcccctctgctataggggtttctctttaatagatggggaaactgtcgcataaccaagaacatccagtagggctcagcgaggggcaaagatgggggctactggctggttgcagtggctcacgcctgtattcccagaactttgggaggccaaggtgggcggagcacttgaggtcaggagttcgagacctgcctggccaacatggtgaaactccgtctctaccaaaaattcaaaaattatccaggcatggtggtgtgcacctgtggtcccagctactcaggaggctgaggcaggagagtcgtttgaacccatgaggtggaggttgcagtgagccaagattgtgccactgcactccagcttgggtgacagagtgagactccgtctcaaaaacataaaaaaaatttaaaaaagggggctctttgtccttctccttcccaggctccaggatgtctctgtggatggttgctgggtcagctcctgtcccatacgactccctgccagcctttgttctggaacctccttcccatccttgtcccacctctggatctgactggggatgtggtgagatagggcaccctgtctgcttagacatcttcataggttggtggggcgtggtggctcacacctgtaatccaactactttgggaagctttggcaggaggatctgcttgagcccaagagtttgagatcagcctgggcaacatagtaagaccccatctctacaaaaaagtttaaaatatggccaggcatggtggctcactcctgtaatcccagtgctttgggaggccgaggcgggtggatcacctgatgtcaggagtttgagaccaacctgaccaccgtggtgaaacctcgtttctactaaaaatacaaaaattagcctggtgtggtggtgtgcgcctgtaattctagctactcaggaggctgaggcaggagaattgcttgaacccggggggcagaggttgcggtgagccaagatggtgccactgcactccagcctgggcgacagagtgagactccatctcaaaaaagaaagaattagccaggcatggtggtgggtgcctgtggccccagctactcaggaggttgaggcaggagggttgcttgagttggaggctgcagtgattgatgatcgtgctactgcactccagcgtggtcgactgagcaaggcactgtctcaaaaaaaaaaaaaaattcttaaaggtgagaactcaaggttcgattcttcaggtgggagatgtggctgatgctgattctctcattgacatctggggaaactgaggctctgagagggtgctgctccagctcctggacatacggtgaatcagcagcaggcccagcagaccaggccccctgcctgtgagcacactgacccttcccctcctcactcagccctggtgagtcatctccaggggaggggtgctgcctccacgtgggtgatcagagcagtgccagggaaagcaccaagttcagggtgtgcaggagccaagatgggcagagggacaagcagatgttgcagctggcccaggagatacaagctcaagtctcagcctgtcccccgttggtgggaaccctcctccccgtctctgagaactgagggggtgggaggagaagagagtgccggcggctcctgggcttccatccaagcttcccctctctgagcgccagctctcgtctcagcatgggcctggtgcagactccgacagaagagccgctcccttctcttcccagcctggattcagcacccagtaggcttgttgggaaacatgaggggtagacatcacaactggaggaaaggatggagaatgagggatggtccgggtgaggtggctcatgcctgtaatcccagcactttgggagggtgaggcaggcagattacttgaggtcaggagttcgagacctgcctggccaacaatgccgaagccttgtctctaccaaaaatacaaaaattagtcgggtgtggtgggacacgcctgtaatcccagctactctggaggctgaggcaggagaattgcttgaatctgggaagtggaggttgcagtgaaccaagattgcaccactgcactccaggctgggcaacagagcaagactctgtctcaaaaaaaaaaaaaaaaaaaaaaaaaaaaaaagaaagaaagaaagagaatgagggttgggcagggaaacccagttcacagtgggtgaagggacagctagctcagagggaaccggagaagcagagagctcaaaccaaactgaatggcagaagaagaaatccagatgaagggggttgggggagaaacaagcaggccggggagaaagaaaagaaaccgtaggagggagagataaaagatagaagtggaggaaaacaggaagccagagtctcctgaggagaacagggagagacagaggggtgggatggggtgcagggtgggtgggaaggaggcagatatcagataagactggaggagagaagggggagaataatgacagcagaaaaaaaatgaaaatagcttagaataaaggcaccaatctcaggtcatttggagttgcaactctgaggaacaagtattattaagttgggcaggccgggctcggagccccatgcctggaatcccagcactttgggaggccgatggcggaggatctcttgagcccaggggtttgagactagcctgggcaacatattgagaccttgtctctacaaataataataaaaagctgggtgtggtggtgctagccagtagtctcagctactcaggaggccaaggtgggagtatcgcttgagcccaggaattccacatcagcctggccaacaaagccagaccccatctccacacacaccacccccccccccaaattaatcctagtggtatgcgcctgtagtctcagctactggaaaggctgaggcgggaggatcacttatcacttgagtccaggaggtggaggctgcagtgagctgtgatggcgggtgacagggtgagacctttccctgccccctaaaaaagaaagaggggcagaggccgggcatggtggctcaggcctgtaatctcagcactttgggaggccggcgggtggatcacttggtcaggagtttgagacctgcctggccaacatggtgaaagctcgtctctactaaaaatacaaaaattagccgggtgtggtggtgtgagcctgtaatcccagctactgaggcagcagaatcgcttgaacccaagaggcagaggttgcagtgagccaagatcgtgccactgcactctagcctgggtgacagagccagactccgtctaaaaaaaaaaaaaagggcagagagaaagatacacacagacacagatggagaggagggggctgagaattgtgtggccagtatgtgggcagaaagagaaactgaggctggggcttagaggaaatcacagggggaggccagcagatgcgtgaaacttggtgaatctttattaaactagggtccaccccaggaggacggctggggcggggacagggtctcccgctgcaggctgcgcggaggcaggaggcacggggtggcgtggggtcgcatggctgcaggcttcggcgttcagtgattgtcgctgggcacaggggcggcgctggtgcccacggcagcctgcaccttctccaccagcccggcccactggcgctgcatgtcttccaccaggggctcgaaccagctcttgaggcgggcctggaaggcctcggcctgcaggcgtatctgctgggcctgctcctccagcttggcgcgcacctccgccacctgctccttcacctcgtccaggcggtcgcgggtccggctgcccatctcctccatccgcgcgcgcagccgctcgccccaggcctgggcccgctcctgtagcggctggccggccagggagcccacagtggcggcccgcacgcggccctgttccaccaggggccccaggcgctcgcggatggcgctgaggccgcgctcggcgccctcgcgggccccggcctggtacactgccaggcgcttctgcaggtcatcggcatcgcggaggagccgcttacgcagcttgcgcaggtgggaggcgaggcgcacccgcagctcctcggtgctctggccgagcatggcctgcacctcgccgcggtactgcaccaggcggccgcacacgtcctccatgtccgcgcccagccgggcctgcgccgcctgcagctccttggacagccgtgcccgcgtctcctccgccaccggggtcagttgttcctccagttccgatttgtaggccttcaactccttcatggtctcgtccatcagcgccctgcggccgagagggcgggagggtgtcgcacagtgggaggcggggagaagggctgggatggggcgggcgagatggggatgagccagagagacccaagagggagagaaggaacggggcagaggccgagagaaggagacagagacagatgcagagagcagatgcagagggcagaggcagagacgaagaaggagctaggaggccgggcaaggtggctcatgcctctaatcccagcactttgggaggccgaggcgggaggatcgcttgagcccagaagttcaagaccagcctgggcaacacagtgagaccccatctctctgtctctatataaaagagctagggaaggacagagacagagccaggacgagtgtgagagactgagtcagaagggaagagagagagacaaagctgagagagagaattccagagagctaaagccaggagtcagaaatgggaagaggaagctagaaccagcagagacccaggccccccaagacttagcgacaggggcagaatgaaacctggacctggggaggtatagccgcccaccaggagggtcaagggccaggatggggacactcacctcagttcctgggtgacctgggagctgagcagctcctcctgcacctgctcagacagtgtctgcacccagcgcaggtaatcccaaaagcgacccagtgccagttcccagcgctggccgctctgccactcggtctgctggcgcagctcgggctccggctctgtctccaccgcttgctccaccttggcctggcatcctgtgtggaacaagttcaaggtgggtcagggtccttctgaccccgtccaggcatctagtacctaggggcacacagaaggtgctccacaaatgcttctttggagccatggtgggcagggtgaggggggagtcggtttaatcacttggaaagcattatgtatttataaacagggtcttgctctgtcacccaggctggagtgcagcggcctgaacatggttcactgcaaccttgaccttctgggctcaagcgatcctcctgcctcagcctcctgagtagctgagagcacaggtgtgtggcaccatgcctggctaatttttgtatttttagtagagacagggtctcactatgttgcccaggctggtgttgaactcctgggctcaagtgatcctcccaccttggcctcccaaagtgctgggattacaggggtgagccaccgcgcccagcggaaaagcatgtattgagtgtccttgtgtgccccaggcagggctgtgtgggggtgatggagaataaagatcacagctgccccgtgtctggtattcactatctgcctgcaatgcattagaaacctctaactcccagccaggtgcggtggctcacgcctgtaatcccagcactttgggagatcgaaacgggcagatcacctgaggtcaggagttccagaccagcctggccaacatggtgaaaccccgtctctactgaaaatacaaaaaagttagtcgggtgtggtggcatgtgcctgtagtcccagctacttgggaggctgaggcaggagaatggcgtggacctgggaggcggagcttgcagtgagccgagatcccgccactgcactccagcctgggcgacagagcgagacttcatctcaaaaaaacaaaacaacaacaacaaacaacaacaacaaaacaacttctaactcctatctcaaggatgggggaaaccgaggcccagagagcgtcaaatcgctgttcagagccaggaagcagcacagaagcctcagaagagggggcccagggtctgcctgaatggggccaggaggttgaggtgaggatgagagggggaggagcggggggaaccgagcaagccccgcccccatacctgccaggaatgtgaccagcaacgcagcccacagaaccttcatcttcctgcctgtgattggccagtctggggaaggagaaactgtcaatcaaccgccagtgaggactcctcccacccccagcccggccccaacccggcctcaccccaggttagccttccaagccttgttgcattatctgcaacagcctaatcccagcacatttaccaagccgcccccaacccattccctatttaactccctcctggtcttctcttatctccccatccccaggtcggcctccatagaaaattccatcttcctctcccggggttcaaattccatccccccaccccctccccaccgccggttccatctcagtcccagtctcgcattcctcattctcccttcacattctaagctccaacctcacagttaagcgccgtgttccatttatgagctaattcagtcctcattttaaagttctccaatcgacggctagctaccgtgtcgctgcccctggctccccagttatggagatctgaggacactggggacacccagtaggtgctcgataaatgatagtgacaactcgtggagtcctgctatggcttacatcccagtccagctgctctccccaccccaccttctagcgggtcgggtcgtctctgctgcccagcccttcccaggtccagtcccctgctgcttgcctcacccccgctcctcctctccccaagcccgaccccgagtagctctcctgagactacctggaggccaggggttcccagggtcccagctctttctagaggcccctgagctcatccccgtgcccccgactgcgcttctcaccggctcctggggaaggacgtccttcacctccgctggggctgagtaggactcaaggatcccagacttgtccaattatagggctccccctgtcccgccccctcccccagggatagggcgggctgggccagcccccagtcacgaggtgggctgttctccccctgccccaggcacagcagggcagagggaggaaggaggtggggcatagaggtcttttgaccaccccccacagtccccaggaagggaggacacctcgcccagtaatacagacaccctcctccattctgggggccaagcgtggaaggggaatgtggaggctgccgcccagagtcctcctttcctgaccctgtcctttcctgtgcctggatgaatgtaatctggagagggggctggggatctggactcctggatcccagaaagaaagtagggctagggggctggacagaagtgggatgggaggggctgggggcggtagctcacgcctgtaatcccagcactttgggaggccacagtgggcgaatcacttaaggtcaggagtttgagaccagcctggccaacatggtgaaaccccatctctactaaaaatacaaaagttagccaggcgtggtggcgggcgcctgtaatcctagctacttgggaggctgaggcaggagaatcgcttgaacccgggaggcggaggttacagtgagccgagatctcgccactgcactccagcctcagcaagagggagactgtctcaaaaaaagaaaaaaaagaaagtggggctaggcggctggacagaagtgggatgggaggggtgggaacagtatgatgcacctgctaaaagtcgaggctttgcaaatgggacctgggttttaatcacagcttcctctttggttgtgaccttgagcacaggggagccccctccccacatgtgaaatgagattccagcacctccccctggctgccacaggtattgtggtttccaggggcttgaagccgtgcttctgggttaaggttaggattctggagtcaaattgccagggcgtgaatcctggctctgccagttgccagctgtgtgaccttgggcaaatgacttgtcctctctgagcatcaagttcctttgctcatcagactgggaaagcagcggcacgggtatgtttggtgacaagctaacgtgtattgagcatggaggacagccctggcacacagcggtcctatgttagggctagcaatggacaggccacagtgaacgctcagacgctgtcactttcctaagccctgttataaatcccagatgtttcagaggagaaacccgtggttcagcagcaagacgaatggcaaaaccacacagtgagaactgggagagactgggactcattcctggctcctggagcgggtgggatcagaagattctgcgggtcaggggaggctgaactcctggttcgagaaggaacccccagtgccgggccgggcctgtttgctttggctggcaaggggtggctgaggtggggttggtaacctggggttggttctactcagcagcctccttccccagaccctgggggcagacagggtttcagttcctggaggctcgggagtcgtggtgggcatcagctgaccccagccctaggttggcaaaatccagacagcaccaagtcctcagacacaggtgacccaactcccatggctggcctaggcccctcctcccaggcctgcgagtccttgagccccttctccctgacacagcagttcctagtaccctagttgttctgaagctgttccagtagcttgaaccctctcccagctccctgcccccatctctgcactcagagacagtgtcatctctgctgctgcagtctgcagggacaaagtcctctatagccactccggccaggtcaagctgggggcaagtgaccttgagaccctaccctcaggcaagggaaggcccgtagtgtcccccagcagggcagatgttccggatgggaagatagcgaccccaggccacgctgcgcccctctgagccggacttaaggcagcatcaaggatccgctgctttccgtgctccggccctctggcgccccctgcaggcggctgggggaaggtcagggcggccagactccggatgaaatgctcaaaacaggccagacacacttgagaaaacggaggcctcccatcgttttttttcccacgtatattttttgttgttttttgttttttttctgtaaaatgtcccggttcttccataacttataaacatgatttataccgaggagatgggaaagtggacggggcagggtggactgaccggggatggggaagctcctctcgctgccccctcggggcgggcccaggccctttggaggatggggacgccaggacactcctccctgaggttgtctggccgcctctgcccctggtgctcagaatcctgcgtgcccctcaattccggaatccctcccgggaccccaggcccactgggcatgctgcccctgctactcagaatcccgaagcgccattcagttccagaatcccctcctcagctgctggggtggcggggtccctcctttccaatgtcccccccgacccccaaggggggagggaagggaggggggctcaggtctcccctctgtggcagggggaggtggaggtggaggtggaatcggaagggcgtggaaggcgggggccaggagggctcagccgatggtgaggccaaagccacactgaaacttgttcttgcggtgattcaggaaggccccaagggccagtgtcaggggcaggggtgggagcttcttctccagcgtggcacccacgatccagttgctatccacagagcctgcagggaagagctgaggtgagaggcgtgccagcttcccaccatatccatgcagagttcctggccaccttggataccagccacatgccgacagcttccagacctttaaccacactgctcctgccaccctgaaaccccatcacaccaacaacttcacgctggagcaaatggctcactcctcctctgctctccgctcagtgacccctgccctctgaaaagccctctagacccctgggttcccccaacctagtcctgcccactctgcggatgaatctgttcctctcactgagtcccgtgaagacagggctggtcaccgctgtggccccagcagtgctcagcaggaggctcaaacacccaaaatctgtgagccacagatatccaagaagacttaagactggacattgggactacgaccagtgtgcctgagatgaggttctggatttagttgtgaccttgaaacctctggaagcctcagtttccactaacgtaagatgaatggggcaggctcgaggcttccaaagtgccttctaccctggctgggtgtggtggctcacacctataatcccagcactttgggaggccaaggcttgagtccaggagttcgagaccagcctgggcaacatggtgaaacccccatgtctcccaaaactatcaaaaaaattagctgggcctggtggcatacacctgtggtcctagctactcaggaggctgaggtgggaaggctgcttgagcccgggaggtggaggctgcagtgagccgcagttgcactgctgcactctagcctgggcgacagagggagaccagtctcagaaaaataagagagtcaagtgcagaaaaataagaggggatggacaaagctccagcttggcccaaacacccatcagatgctccaccagattttttttaacatttatttatttatttcattttattttttttggagatggagtctcactctgtcacccaggctggagtgcagtggtgcagtctcaactccctgcaacctccgcctcccaggttcaagtgattcttgtgcctcagcctcctaagtagcggggactacagttgcagcacgctaccacacctggctaatttttgtacttttagtagagaggggatttcaccacgttggccaggctggtctccaactcctggcctcaagtattctacctggcttggcctcccaaaatgctgggattacaggcgtgagtcaccacgcctggctgctctacctactttttttttccaagcataaaacatagtagagggttgtccacctacttttttttttttgagatggagtcttgctctgtcacccaggctggagtgcggtggcacgatctcggctcaccgcaagctccgcctcctgggttcataccattttcccgcctcagcctcagtagttgggactataggcacccgcaaccacacccggctaattttgtttttgtatttttagtagagacggagtttcaccgtgttagccaggatggtctcaatctccttacctcggcccgccttggcctcccaaagtgctgggattacaggcgtgagccaccgcacccggccccacctaccttttaacaagtgttccctggtaatgtggaggcccacagggtggcagcacactgtcctccagcacctgtggtggcccacacatccactcagagttgagtcacctcctgcctgtttcccgcgtaggggaaccgagacctttacctttgaagaggaggttggccttgggcaggtccagctggtacccgaaggagacgctggtgtcctgcatccttgtgctggcctcaaactccacacccacctgcagctggaggggccggagcaacacatgagaattagcaagtggccccacctggacttccaggcccagcagcccctggcagcaccagctagtccctgcacccactcacctggtcactggctttgtggtagtatgttgcgtgcatgcccgcctggcccaacgttaccgttgccaaccagttgttcactgtcagagagtggggtggaggcggggtctcattaccaaggggatttgggcatctgggaacccaggcctcctccctcagacctgagtgtccagggccctagcccgtcctccctcagacccaggaggagtccaggggcccagcccctccaccctcggacccaggcgccaggctcacatgtgtatttcccagctagagacatgacagtgccctcctctccaggccgccggtggtagaccagctctccacccagggccaggcaaggcgtgatgctctggaggtagtgggctacgaggattcctgtgggcaaaatgacgatcagtttccacccaccctgagtgccaggctagactccacctccaggaagccctctaggctcaccccggctggaggcttgggcttgctctcaggcctccctcaagggctcctttctcctaacccatcgcccaggggttccctaccgctgaggtcagcgtcccaggccctgctatgactgcattacctgaaggacctcatctggtcgacacaagcccatgtggtcagcatttatccacccccacttacagagggggtcaccaccacttatagaagcttacagggtaagtcactcactcatgctcacaaaatgtgtcaagggcagaatccaagcctccacacctcccaaacccaggctctgagccactctgctgctgagaggccattgggtagagtgggtaaatatgcacagcctgggttcgaatcccagccctgccacaggctggctggtgaccatggacgctggcatcatctctctgtgaacctaactgcctcttggggttgtgaggaatcgagtgctcagctgtggctgggacttgctgcactgaggtccaagtctgcgttcctgtgtccctccaccgtagggagtgcttgctgaacaagagaactgccacctttgggctgccttttcaagcctcaggatggagatggattcactttggtgtctttcgagcctagcagggtacaggccacaaatgtgattttatagggccagaagaattggggaggaagagagtgggaaatagagagggagggacagggaaagaaaacaagcctggcgtggtggcacgtgcctgtaatcccagctatttgggaggctgagaagggaggattgcttgagcctaggcattcgaagccagcccgggcaacatggtgagaccccatctcaaaaaaaaaaaaaaaaaaaaaaaaaaaaaaaaaaagccagatgcaatggctcatgccagtaatcccaatgctttggagggctggggcaagaggacagcttgaggtcagcagttggagacaagcctaggtgacatagtgagaccccatctctacaaaaaatttaaaaacttcatctaactacagattatcataaaaaaaaaaaaaaaaatcaaggccaggcacagtggctcatgcttgttgtaatcccagcagtttgggaggccaaagtgggttcatttgagcccaggaattcgaaaccagcttgggaaacatagcgaatacaaaaattagttgggtgaggtggtgcacacctgtagtcccaggtactaagggggtggacgtgggaggattgcttaagcccaggaggtggaggctgcagtgagccatgatagtgccactgcactccagcctgagtgacagagtgagaatctgtcccaataagcaaacaaacaacaaataaataaatttaaaaacgtagccaggcatgatggcacatgcttatagtcccagctacttgggaggctgaggcaggaggatcacttgagctcagaaggtcaaggttacactgagctatgatcacgccactgcactccaacgtgggcaacagagatcctgtttcaaaaaataagaaatttaattttttttttttttttttgagatggagtctcgctctgtcgcccaggctggagtgcagtggcactatctcggctcactgcaagctccacctcccgggttcacgccattctcctgcctcagcctctccgagtagctgggactacaggagcccgccaccatgcctggctaattttttgtatttttagtagagaaggggtttcaccgtggtctcgatctcctgacctcgtgatccgcctgcctcggcctcccaaagtgctgggattacaagcatgagccaccgcgcccggcctaaaaaatttttaaagaaaaaaagaggctgggcacggtggctcacacctgtaattccagcactttgggaggctgaggtgggtggatcgtctgaggtcggaggttcgagaccagcctggccaacatggtgaaaccctgtctctactaaaaatacaaacattagctgagtgtggtggtgcacacctgtagtcccagctactcaggaggctgaggcaggagaatcgcttgaacccgggaggcggaagttgcagtaagctgagattgtgattgtgccactgcactccagcctgggagacagtgcaagacttcatctcaaaaagacaaaaaaaaaaaaaaaagaaaaaaaaaaaaagaaacaacacatctgcagagacagaaatgaagggggaagagggactgaagattcacagttgagaaatccaccacgatcgagcaatctcctagggtgcagccctggagaggaagacacgtggagaagggaagggaggttgggggccacgagactgagggcacacagagaagctgagacagcacagagcaaagcaggtgcgaagatgcttcccagaccaagatgaccagaggggcagactaggggccccacagtgggagcaggctggcctgctagcatggagccagcctggagccagctctctggagctgcaggaataggggcctttcatacctgcaggcatggctgggtggagctctcagaggggctgagtgttaggcggcaacccccaagatgagcctggtgggtgtgagagaggccgtgagttcatggccagtgccctggtggcatcttctggggaggctgagatcagaagtaggctgcagctggtccccatgggctcgggcaagcgactgtgtgactctccttcccagaggagatgaagcaaatgaatccccgaaccccccactggttgttgaatcaccatcacacgggcggggcacagtagctcacgcctgtaatcctggcactttgggaggctgaggcaggagggttgtttgagcccaggagtctgagaccagctggggcaacatggcgagacccccatctctccctctctctctctttttttttttttttgagatggggcgttttgctcttgttgcccaggctggagtgcaaaggcgtcatctcggctcactgcaacctctgcctcccgggttcaagtgactctcctgcctcagcctcccgagtacctgggattacacgcatgtgccacgacgcaaaaatacaaaaattagccgggtgtggcagtgcgtgcctgtaatcccagctacttgggaggctgagacaggagaatcacttgaacccagaaggtggaggttgaggtgagctgacactgtgccactgcactctggcctgggcaacagagactgcgtctcagggcagaggtatgtgaggtggggcaggggaagaaaagaaaaaaaaaatcactaccattaccactctggtcagtgttatcccctcattcaatcaagggggagactgaagcccagagggaaaagcagccatctagagtgagtgacttagaatctctggcctctgagttccagggactgttggaactgaggccatgagaccctcaagtatctttctaaccatccttcccatctcctgggccacccccccagtttctctacccacagcctcctctctagtctcatgccccaacttcaagtgacctcacagacagcagacagagggatcatgttaaagcacaaacctgaccctgttgaccccctgcccagaacctgccatggctccctcgtgccctgagaagatatgggttcctcagcacacctgcaaggccttggatggcttggcctcagcttcagaatagaaccactcccccttcccaggctcccaagtagctgggactataggcatgtgccctgccagctcagcgtccccagtagttgggactacaggcatgtaccaccatatgcctaatttctaattttttttgtagagacagggtattgctatgttgcccaggctgatcttgaactcccgatctcaagcgatccgcccacctcagcctcccaaagtgctgggattacaggtgtgagccactgtgcctgacctgggacccccatgagggcaggaatgggctgtctcggtcactgctgtgtcccagcccagggctgggcacacatgaggtgctcagagtgaagcagaaaaggagctgtcaccattgggaggggctggggaggctcacgggctcctgaattaagcttccattcaaatcccagctcctctgcttcctggctgtgtcaccctgggcaactgatttcacccctgggcctcgctttccttatctgtgaaatgggggtgcctgcgggcattgtccccatggagatgccagagtggagcaagtggtgactgtgcatgtggcccagtgctgaggccgagaagtcgggccctctcatggactccttcactgggaggtagttgcttctattgtgcccaagtgacagatgaggagactgaagcccagaagggctggaaccacttgccggaggtcacagagccgcctggaggtagagacaccctgggtcaagtcggagctgttggtggcaagagactcgagagctcagccctgaccggcacacggcaggccctgttctcactggtgtctgggggaaggaagaggcactggaaaggactagagaccaaagcgtcactggtggccctgggctccaggaggccagtgctggggagcacgaaaggaccaggcgagcgaggcggcacagggaacggggttgctggcgccgtgaagagcagggacactggagtcccactggccatgtgcccttagtggagaacctcctcttggccttgcaagatggggacaatggtggacgacagagggcgacatgcgcacgcaagccttcccagtcatgtcaagaccagagggaagaattccatgcagcagggacagagtgtgcgtcggtcctggggtagaaccaactcggtggtttcaggaaccgtcagaaaagcttgcatggtcggccgggcgcggtggctcacacctgtaatcccagcactttgggaggccggggcgggtggatcacttgaggtaagaagttcgagatcagcctggccgacatggcgaaaacctgtctctactaaaaatacaaaaattagccaggcatggtggcgcgcgcctgtagtcccagctactagggatactagggagcctgaggcaggagaatcgcttgaaccagggaggcagaggttgcagtgagccgagattgcaccacagcactccagcctgggcaacagagcaagactccgtctcaaaaacaaaaacaaaccaacaaaaaaggctcatgtggttcaactgtagtgtatgagaagatggggtgatgtcaccaggtgagttggggacaggaaatgtttcttcctcatggggcccctacagatcagcctcacctaggaggcctctctgcacctgctgcacctccagcttccctgtctcctgggttttctgccatggcccttcccttccctcacccctgttcctgcttctccctgcctggaatcttcttgctcctgtcccccagccggggtagccccttctcctcctctggcagctcaaaagtcaacacttttgagtctccctgggctcctgcagcgagaagtggtgactctccctaggcactcccaggggtccaaggccaaccctagctcccctccccgcctgcacgagtcattcactcaggactcagcgctcaagagcctgctctccacgacacagtggatggctgcacaaagacacaaagctggcaatccgaaactccatccttccagttccagccaaaaactacagagtcatcgcctccatccggtctcaacaaatcctggcagctctgccttcaaacaacatccagaatccaacctcctctccccgtccactccctcccagtggtaccccctttggagtctgctctctacgccagctgcagggtcctgtgagaagctatgccttggtttccgaaagccccagactcactcagagcgaaggccaaggctctgcaaagccttatgcaaccaggggaccatcctccctcaagttcctttcacgagtcccgactgcactacttgcaggctgaaaagctgtttccctggccaggcgaggtggctcacgcctgtcatcccagcactttggaaggtcaaggtgggaggattgcttgaagccaggagttccaagaccagcctggccaatacagcaagaccccatcttaaaacattttttaatacaaaagaaaatctcagttaaaattgcgctgactggctgggcgtggtggctcacacctgtaatcccagcactttgggaggctgaggtgggtggatcccttgaggtcaggagttcaagaccagcctgaccaatgtggtgaaaccctgtctctactaaaaatacaaaaattagccaggcgtggtagcgcatgcctgtaatcccagctactcgggaggctgaggcaggagaattgcatgaacccaggagatggaggttgcagtgagccaagatcgtgccacggcactccaacctgggtgataaagcaagactccatctcaaaaaaaaaaaaaaaaaagactgctctgactcacccactcatggtcagtgggtgaccgtctcacccactgtagtatgttgcctgatgtttcaaaatcactcctgctgagccacttctccagtggcagaaaaggaggttcacaaatggggtggatttgctggcaaagccagaactgcagttttgtgaccaccctccaagccctccgcctcttacctgaacccacgaggacgtctgggttccccagggtgacggctgctgtgaagtcagagccccgatactccccgtccacctgccagttcacaaacttcgactgctgggtctgtggagaggagggggtgtgagggcggctccctgctcacggtggccgaggggagcagcagcctccgtgccccactcacctggatggccatcttggacctgagaccggggcccagctggtgaatgacctgagcgttgagactgccactgttgtccatgtcacccaccagtacagggaac

SEQ ID NO: 27 - DNA, 26923 bp, Mus musculus
ctgcagggttcacacttgctccaggggcaggtgtgtcactgaaatgacgacccaagtgggtgcggtgtgagcaccgagggggcttcatggtggagaccatgccaatgggactgatgcttaacctctaaccttccctctgtcccgcaggcgttccccgtgctggtgggtgacatggacaatagtggcagcctcaatgcacaggtcatccaccagctgagcccaggcctcaggtccaaaatggccatccaggtgagtctggatggacgtggcctgtcacccccacaggtgctccctcccccgtggtcctcacactgcccctcccccacagacccagcagtccaagttcgtgaactggcaggtggatggcgagtaccgtggttctgacttcacagctgctgtcaccctgggcaacccagatgtcttggtgggttcaggtaagaggtggggctcagtggtgctcacgaagccgtgatccagatcccctttcccacaaggcacctgacatggccttgcctctgagaggcggcaggggaggagtgacttgagatcttgggtgctgccacaagcttgtggtcccaacactcaaaaagtcagggcagttgtgagttctggcagcatgagctgattcacaggagcaaatgaaaggcaaaccacaaagccaggtatggccacacctgtaatctcaggactggggagggtcaaagagagatgttggatccctttccaggttgggtacctttttttttgtttgttttggtttggttttggtttttcgagacagggtttctctatgtagccctggctgtcctggaactcactctgtagaccaggctggccttgaactcagaaatccgcctgcctctgcctcccaagtgctgggattaaaggtgtgcaccaccactgctcggcttttttttttttttcttcacattatttggtgtgtttgtgtgcagcatgtgtgtgagtgtgcacatgcatggagcctgcttattgccctcaagcaccagcagagtgtgtccagtccttagagactggaattagagactactgccagtcaccttctgggtgctggtgatatctagatcttctgaaagagatgacagtgctcctaaccgctggaccactgttctggcctggtgaaacaagcctttagccccagccctagggaggcagagacactagattgcctgagttgaaggccagcctggtctgcatagtgagactgtctctaaaacaaagaaatctgagcgtgatgatgcaaacctctcatttcaacgctcaggaagacttgtgcaaggagagccagcctgccctgtgagtgttcagttggtgtggtcaaacaccatgcccagtgccacactggaaagggttggatttgtttaggtgtatagatccagaaagataagaccctgtcctgacaatgggacatgacagcaagtggcagaagcaaagcaagagagaccattaaaaatgacattagctttgacacttcagtctgcccccagtaacgtatttcctcaagcaggccatgcccgggcctctccaactggggtgcaagtgttctgatgcctgagactacagggcattcatttctcattcagaccaccacctggtctacctaggtagggtaggtagggaaaggaaagggataaaatggaggttaaatagagaaggcgtgtggcaggcaccatggttaacttcctaggttccatcctcgtggagcaaaaccctgcagtgccatccatcaggcaggaaccatgattgcggggcgtggttcagccctgggctgctgctgtctgcccagccatgtgcaccctagtgacactggtgaagcttggtgagcgcgcgccctgtggggtcaggcgtggcctaagtcccaggtgatggaactgtccttagtctacctgcctgtagtacttagacttggcttttggtcatgaacagggcacagtgttcccacgtgcagacagacaggtaggacgggccaagatgggtaccgacgtctgcccccctgcacttctctcttccttcttcatggtgtgcaggagttcctgatcgcctgtctgtccactgagtggaagtgtaccgagcctaccccgtagggtgtacttaagcgttgataatggattagtggataagaaacctgagtcacctctggggagtgtccgtcccaggatggacctccacataaaaagcacatacagattttagcggtatactggggtgaggcttgccacctgcctagatccaccagtgaggtgctcatggagtggttgggttatagtccctttaaaaatattgttttgttctgtgttgcaagacagaatttcactgtgtagccctggctatcctggagcttgctcagtagaccagactggcctcaaacccaaaaatatctgccaacctctaccaccagagtgctaggattaaaggtgtgtgccaccatacctggcaattgtttttgttcttgagggctggcccagaactcaactaagctcttgcctacctttctcctgagtggtaagatcaagagaatacaaatccctggagttggtgagatggctcagcggttaagagcaccgactgctcttccgaaggtcctgagttcaaatcccagcaaccacatggtggctcacaaccattcgtaatgagatctgactccctcttctggagtgtctgaagacagtacagtgtagttacatataataagtaaataaatctttccaaaaaaaaaaagaatatgcaaatctacctggcaaatatgtattttaacccccaaaacaaatattcgtacaatgcatgtgttactgttaggataagtcatacatgaagcaagttcaaatgatcaaatactttctaggtggaggatttttcatccagagtttctctgtgtagccctggctgtcctggaactcactctgtagaccaggctggcctcaaattcagtgatgccccctccccctgcgtcccaaatgccagaattaaaggtgtgcaccaccactgcccagcagctgattgctactgtattcttttgtttatcacagtgtgtcactgtatgtggaggtcagaggacaacttttaggagctgatgctcattgcactgtgggtaccagggatggaaatcagctctgcagcttacccagcaggctctaattaatctctatgatggtctctaacaaggagccacatctttactggaataagccagatagtttctccaaaatgccagtgcctcacccaagaagcgagaagaagggtggccttggttttggttgtttgttttttaaaaaggtattcctgctggacagtggtggcgcacacctttaatcccagcacttgggaggcaaaggcaggcggatttctgagttcaaggccagccagggctacacagaaaccctgtcttgaaaaaaaaacaaaaaaaatcaaaacaataacaaaaaggtattcctggcatgtctgggatgggaacacaactgcctgtcctccaaggggctgaactgcacatctgcatagtgactggtaatcattcaagatgctatcagctaaacaggtgtacttgcacacccctttaggacagccatggctacacagagaaaccctgtctcagaaaaaagaattaaaactgtcagccttaataaagctgggcagaagggcctggagagatggctcaatggttaagagcactgactgttcttccagacgtcctgagttcaattcccagcaaccacatggtggatcacaaccatctgtaatggattctgatgccctcttctggtgtctgaagacagaaacagtgtattcacatatataaaataaataaatctttgagccacgtgttggtggcgcacgcctttaatcccagcacttgggaggcagaggcaggtggatttctgagttcgaggccagcctggtctacaaagtgagttccaggatcgacagggctacacagagaaaccctgtctcaaaaaaacaaaaaaaaacaaaaaacaaaaaactgggcagtggtgttgcacgcctttagtcccagcacttgggaggcagaggtgggtggatttctgagtttgaggccagcctggtttatagagtgagttccaggacaaccagggctacacagagaaaccctgggggaggggggggagtggggagggggactatcagccttgaacagtctggggtttgctgggaccttacagcccgccttcttccaccgtgacccagcctgtctgaggcctgctataccttggctgttactaatcttccattttcagtttcagtgatttctagtccctttgagcctcttaggtttgtccatttgcttgaagaacatgattttgttgatcacttctgaagtgccaggcttcatgttatttgtttatctattggcagtgttaaagatggcaaccaaggccttagtatgcaatctctccactgtgccccagcctctcactgggggattctaggcacgggtcctatcactgagcccccatccacagcctgttgctgggggattttcgacagggtttcttctagtgatgggctgcctctccactacaaattaattcaaatgtttctgggcttccagccttaggacatgactttgtcgagactgttcttggataggtggtgtgtagccatatgtagacaaggccttccaagttttacccaactgaaacattttcatacattgcaagaagacttcatttgggaactggtgctatagtcaactccagtggagacccgtggagataaaagcatgggagaaaaggctgggcatgcagagcagaatcaccctgtaagcagtgcacatggagggctgtggtgaggctcagtgataaagccctacctgctgacctgagtacttggctagcaagtacagagccctccattaagaccttagcaacggggaaggcgagatggctcagcggttaagagcactgactgttcttccgaaggtcttgagttcaaatcccagcaaccacatggtggctcacaaccacccgtaatgagatctgatgccctcttctggtgtgtctgaagacagctacagtgtaattagatataataataaataaatctttaaaaaaaaaaaaaaaaagaccctagcaatggtggtgcacgcctttaatcccagcactcgtgaggcagaggcaggcggatttctgagttcaaggccagcctggtctatacagtgagttccaggacagccagggctacacagagaaaccctgtctcggggaagaaaaaaaaaaaagaccctagcaaccagggctggggagatggctcagtggttaagagcactgattgttcttccaaaggttctgagttcaaatgccagcaaccacatggtggctcatagcatctgtaatgcgatctgatgccctcttctggtgtgtctgaagacagctacagtgtactcatatacaataaataaatctttttaaaaaaaaaaaaagaccctagcaactaactaactaaagtagcccagcactcaaggtgagcccagcactcacctccagggtcatcctggactaatgagtgagcaaattccacatcagctttgattagagagcttggtggctcacatgggcagaagaatcctcacaagttctgagctgtccccgattgcgcagagtgaaaaacagcaataagagcaacagaacagggtgggcggacaacagggctgagcaggttgggcacttgctgccaagcctgaagggaaccaactcaagttgtcctctgacctatacacacctgtatgcttgcacaattactgatgggagtgggtatgccgtcttgaatagaagacagtgtggcacactttaataatcagaaccgcgtgggaggccaaggaagaaggatcacccgatttaaggctagcctgagcttcagagcaagaccctttgttgtttattgaaaggggttctcttggttttacgaggcagggtttctctttgtagccttggctgtcttggaactcactctgtagacaagactggcctcgaactcagaaatctgcctgcctctgcctcccaagtgctgggattaaaggcatacgccaccatgcccagcaagaatttaattttgaagactataaataggtcaggggccctagagaggtggctggaagcactagctggttttccagaggactcttgtttaatttcaagtgcctgtatgtccgctcagaactgcctgtaagtccagttcagacaatttgataccctcctctggacgctgtggacaccaggtgtcacagaaacataggtgcaggcaaagcacccattacacataattccagagaaagaaatctttaggccaccaggcagtggtggggcgcctttaatcccagcacttgggaggcagaggccagcctggtcactccgtagaccaggatcaaaccaaccccagcaaacctctgatcaccagtatcaactcatctaattaagaggaagctgagaggcacaatcctttgagtggccacctacagatagcaactgcaaggcaggagtcccttcccccactcacagctgtaggggccaccactaatctgagaaagccatctttacctacagcctccacacctgccacacaggtgaaacctctcccacagacctcacagccgtatagggtatctcacagaagagtaagccgaggactcccatagtttgccagtgcttaatgaacatccaggctcctcacaatagattgtggtaccctaagggttggccccagcataaaaacagagccagccaccttgagacacctggccaacatgccccatctagccctctcctaagtgggttgaatttgaaggctctgaatcacaatggttcttcttagtagtttgtgggggcttttctgagtcagcatcctactatgtggcccaggcctgccttggtacatggccctgccctagcccaacatatagccaggttacaagaaccaccacagcccacctggggttggcttgatcctcttctgaagctaatggtccccttctcactgagggaccattcacactggcctatgaacccatggcaccttcctgtccagccatagacttctgggaatacacccacccaggccctgccgtgttcacgcattgtaggggcatggaggactgacttagttccttgcacaagctcgtccacatagagtcctgctcactgttctgccaaatgggccttaggaaagtttccagacatggtttcactgtatcccaggctggcccggcactctctcccaagtcatggggtcactggtgtgctttactcatcctcgctctgtgggagatcaccctctctgccaccttggcaagcctgtctgcccacccagccttggcttccctgaacactctgctctttgcttcccatctgttccagtcttttggtttttacatttctttcttctcccctctccccattctaggggtagaattcagaggcttctacaggccaggcagctctgctgtcgacccatgcctccagtccctgcctcccagctccctgccctgcctttaagccagagtgcctcagagctttgggctggtgatgtagaggggcctgcttctccatgttctgttgaagggtgacttgcttctcttctccctaagtggtggcaagtatgtgctactgctttgggggccatagcccaggagtcgcagggcaagggagaactgcataaactgttgtgaggtttagcagacaagagccgctggggaggtgaggccaggcctggtcggaactggtgagtctgaccaccctctcctcctgcaggaatcctcgtggcccactacctccagagcatcacaccgtgtctggccctgggtggagagctcgtctaccaccggcggccaggagaggagggcactgtcatgtctctagctgggaaatacacacgtgagcctggggcgcacttagggaggaggctgtggcctgtatctcagggttgagagggaagagagtggggtttccagatgcccacatcccttgatacctagtcctcacccaactctgctctcctagtgaacaactggttggctacagtaacgctgggccaggcaggcatgcatgcgacgtattaccacaaagccagtgaccaggtgagccggagggagcgcctagctgtgggtcccaggctgggtttgctggtgcagttggtatgcccaggagtcctaatgggccactcacatgtgtgccgggccctctctcccccagctgcaggtgggtgtggagtttgaggccagcaccaggatgcaggacaccagtgcctcctttgggtatcagctggacctgcccaaggccaacttcctttttaaaggtaaggaaggcctcagcttccctcctggggaacaggccagataagactcagctgtctgtggtagagtccatgggaaatagggaggttgaacatgtgctggtggagtgggcggggactctgtgcagctccaaattactctgggtggcttgtcaaacagtggggctcctaccctggcatgtttagtacatgttgggggcctcgctttaagccctctcttcccattcccatctagcaagctctctggccctccccactcactcttaccttacttggagttcttctattgtgtgatgaaacactatgatggtaaacagcttagggagcaaagaggttatgttgggttacaactctcaggtggcatgcctaccactgaggagaagatggggcaggactcagcagaaagctgaaggcaagctgatgcagaaggccttgtgggagtgctgcttgttggcttgctccttatggcttcctcagcctgctcttatagcctccggaccattagcccagggtgccccactgaaaataatctgggtactcccacatcaatcacttagaaagtgccctacaggcttgcctgctgccctagctaatggagacatatgtattgaggttccctcagctggatctcttgagttcaagaccagcctggtctacagagcaagttctgggacagccagggctacccagagaaaccctgtctcagaaaagaaaaaaaagaaaaaggtgggggtggggtgactagcttgtataaaactagccagcacagcagggaagctgtgtgaatagtgacagccaggttcagaacctcattctgcgcagtgacatgggtttgtcaagcctgggcggtgttgagccacttaaagggttgctgtgatggtctggagtggccttggttgtgacttaggacatacgggtccgttgtggctaccatagagatgggtggccaggcacatcaagccacccagtctctgccccgctctcggcccacaggctctgtgaacagtaactggatcgtgggcgccacgctggagaagaagcttccgcccttgcccctgacactgtccctctgcgccttcctgaaccaccgcaagaataagttcctgtgtggcttcggcctcaccatcggctgagccctcctgtccttcctctgcagaccatcgctgggccggctgccctcccctcctctccctctctcttggggttggggcagtgggaaggaggggacctcccatgcccaaggatccccagcgccaggggacagtgcccagggggcctggggtcccggagggagtcctgggatctgaagggcattcgattgtgagcgcccaggcagaggcgcagaggcggctgtacacaggctcagaaaggaaagacttgatgtcctcctgagggcagcagaggagcgccgagccgcctgtcacttccccctccacccctccatagaaatcatgtttataagttatggaaaaccgggacattttacagaaaaaaaaaaacttaaaaaacaaaaaatatacgtggaaaaaaaaataggatctgggaggcctcggttttctccagttgttgacatggttgccagcaggcggcgccgagggttcagaaagcacagcagcaccaagcagtttagagaaagcttggccaggcatggtcacaccctctgctcttggggacttacactgccggaacatcagaggcctggcctcaccaggagggtggctccaggtcactcgcctctgtgcagtctggccccgagagctggcagaggactttgtctctgtaaacagggtgggggcagggagacggggctcaggagcctccctgtcccaaaacgggctgaggtggtagcttgtgctgactttctcccagtgggaaggtcagaggtctcagaaacttcaggaagaaacggagttcctggaagttcagcacaataaggaaagttactctgggaggaacgggccctagcaccttcccaggctgaaacaggaaatgtcaagttgttttgttttttaaattttgttgaagatgtagctctgggcctcacgtgtcaggcaggtgctgctgggttccctatagtgcttttccgtgaggcctgctctggggtgtgcgataagggcctcagattgggctctgcatctcactgctgcacctcatggcatcccaagggaagcaaagactcacgatgaactggtcagtgtcctagaccgcagcactaagaccctctctactgcctgggctggagatgggagctggcccttagcaacccatgaaaatcatctcaccacacccagtccttgccagtgttttctgaagccaaagctaacaggcctgggcctggccaggcaccctgtacgtacccttggagccaggtgttccgcctctgcccatcctgcagaatcatgttttgccgtgtctggtgccaaacactgctatgtggcttctctcctgccatcaacagctgggaacagggaaccttgtgcaggcagtgcttctagcaagcttgctgtggtctctgagccccttgtcctacctgacttcccaggtacaatggctttcccactttttgggggttttgttgttgttgggtttttttttgtttttcaagacagggtttctctgtgtagtcctgtcggtcctggaactcactttgtagaccaggctggcctccaactcagaaattcacctgcctctgcctccaagtgctgggattatgggattaaaggcatgtgccaccacgcccagctggcttttccactttttagccaggacttcattctattacctgagctcgggatcttcctgcctcagctttgcatatggctagcactatagacccatgttccagtgaatgacttatggcttgtctttttttttttttttttttttttttatgtgcattagtgttttgcctgcatgtatgccttcgtgagggtagcagatcttggtgttacagttgtgagctgctgtgtgggtgctgcgattttgaacctaggtcctgtgaaatgcagtcagtgctcctaacctctgagtcatctctccagctcctgctcttctgcttttatgaggaaaaagaaaagagaagtggcttgagagtggaaaatgcacatgcaggggtgcacacctgcagtcccagcatgctacagcagaggcagaaggacctttgtgggttagagggcagcctgagaatcttatctcaaaacaactttttaaaatgtgctctgtaggggtagctcttccctcccaaggtgacacatctggcaatcgccagaaacagatcaggagcatcaacgcttggtttcccagggcttggcttaatgtatggcttcaaacccatcgggagccaccactgaacagctcctgaaggaactggagcacgtcccagccttggaatggaaagagttcacctgtggtggaggaatcaacaacgagggatcccagaacaacgatcttcaccccagaagctgagcctcttagcccccacccacccatttccatttaggctgccagctcttttctttacaatgcaccagaccccgcggggaaagggaaggagcggttctcagtgccccagtaccaaggcctggattattcaatgaggtgtccgctccctttgttggcgggggaggggagcggggggtcacaaggcatccaaactccacctctttcctctgccctgctgtgaagggggagagaacaacccgcctcgtgacagggggctggcacagcccgccctagccctgaggagggggcgggacagggggagtcctataattggaccggtctgggatccgatcccctgctcagaccctggaggctaaggacttgtttcggaaggagctggtaagacaagctgggctggggattcacccagggaccttggtaggatgtgggctgggaaccttgagatcccccggagtccaggaaacaggcacaagaattggaaaagcaggcagcacgatagaagtcttgggggacaaactaaggactcgaggtaactagcctttgccagagtcagagcaggtggaggggttacctccaggaaggagtacgggactgtcggtgcacggcgtaccggctcaactaggaaccatcctatggcgaaaaaactcgggatgagccttaggctgcttttatataaatacctactgatttccatcacagtccccaagtaacccggactggtttcaaactgtggctcctcatggctgagctccctaagttctgtagttgtgggagggtaccacttcgcagggatggaggacgattaaaaatcgtgttaaattaacacaaaatggaaagcaggacttagccgggaagaaagaggaatgtaagctggaccacccgctggccctctgtgaagtggaatttgaaccctaggagagggagctggaatttttggcagcggatccaccccggggtgccgagatagcgaactcggcaaggggaggtaaacagacctttgggaagagcgggtgctctgttttggagatgtttgtgatggctcacagatctgagaagggaagatggggttctctgggtggccggagtccctccacccccgccccctggtgttcaaagacaatttttccctccgcagactggccaatcacaattgcgaagatgaaggctctgtgggccgtgctgttggtcacattgctgacaggtatggagcaaggacttgctgtggtgccgctttttctgctcctctgtggactctattctagccctagatctcttctgctggtgggttgaggctgaggcggttctgagacctctctgagattcaatagccctgagcagctgttttatatactctttaggccttgatttcccctaactataagaggattgatggcttagtgggtaaaggtgcttatcataaagcttgaagacttaactctgagaccaacatagtggaaggagagagccaattccctctagaactctgacctccaagggtacacacacacacacacacacacacacacacacacacaataaaaagttgatttcttagttgctcttaaaagtggggtatacattttctaattccacacctgcctagtctcggctctgaactacataggatacaagacagtgcatgcttgtagtatctaaacagactccacagcctccagacccacttcaaagagacccaaaaagactgtaggtcctgacccagccttaaacttactctacacaggatgcctagccgagggagagccggaggtgacagatcagctcgagtggcaaagcaaccaaccctgggagcaggccctgaaccgcttctgggattacctgcgctgggtgcagacgctgtctgaccaggtccaggaagagctgcagagctcccaagtcacacaagaactgacgtgagtgtccagctctttcaccctcggcaggcaccagctgatccagggttgcctcctatctgggtccccagccccttcttgtttcctttctcaattagtgtgtagcccaggttggccttgaatcctcctgccttctttagccttctggatgctgggaggaacagacatttattacttgcttggtcgattggcttttggcttcttgagacaggatcccattctgtaactcaagctggcttcgaaggctctgcaattcttatgccgcagcttctcaacttctgggaacacaagcgagtaccatcacctcttgctctgtggtttctggcccttctgtcctgccttcatctccttcctgtgtttcctctgggcctgcagggcactgatggaggacactatgacggaagtaaaggcttacaaaaaggagctggaggaacagctgggtccagtggcggaggagacacgggccaggctgggcaaagaggtgcaggcggcacaggcccgactcggagccgacatggaggatctacgcaaccgactcgggcagtaccgcaacgaggtgcacaccatgctgggccagagcacagaggagatacgggcgcggctctccacacacctgcgcaagatgcgcaagcgcttgatgcgggatgccgaggatctgcagaagcgcctagctgtgtacaaggcaggggcacgcgagggcgccgagcgcggtgtgagtgccatccgtgagcgcctggggcctctggtggagcaaggtcgccagcgcactgccaacctaggcgctggggccgcccagcctctgcgcgatcgcgcccaggcttttggtgaccgcatccgagggcggctggaggaagtgggcaaccaggcccgtgaccgcctagaggaggtgcgtgagcacatggaggaggtgcgctccaagatggaggaacagacccagcaaatacgcctgcaggcggagatcttccaggcccgcctcaagggctggttcgagccaatagtggaagacatgcatcgccagtgggcaaacctgatggagaagatacaggcctctgtggctaccaaccccatcatcaccccagtggcccaggagaatcaatgagtatccttctcctgtcctgcaacaacatccatatccagccaggtggccctgtctcaagcacctctctggccctctggtggcccttgcttaataaagattctccgagcacattctgagtctctgtgagtgattccaatcagcttcagcctcagtttattgttttttgccttacctagcacacattccatggccctgtcactatctgtagagggaggtggttttgcagcaatagaaatgaagcctaggacctagcaacataaaagaacaagtgatctaccactgagccacgcccacagcccctcactgggggattctaggcaggggctctaccactgagccacccgcagcccctcactggggaatcatatctaccactgagtcacgcccctccagcccctcactacgggaattctagtcagtagctctaccactgagccacacccacagcctctggggctcttcaccgccccctacccctggattctaggcatgggctcattttatttatttatttatttaagatttgtttatcttatgtataaggtacactgcagctgtcttcaggcgtcaggtcccattacagatggttgtgagccaccatgtggttgctgggaattgaactcaggacttatagaagagtagtcagtgctcttaactgctgagccatctctccagcacccagtacaggctcttctatttagctatatccacccttctttttagtctgaaataggatctcaactgattttccttgcactccctctagcctagtttggtcttgaatatttgaatctttgttttcaaatcaatctctacaggaactgagaaaggcatgtaccacttcatgtgggtcagttgggctacttttcccaacttcccaagcacccactgcacagctatgccttgaatcaatcaacatgtaagagaccagggtcgccaggcggtgtttacttttctggttgtcttatctctcctcctccgctctagtcttatctgacaccctctccttgccttgtctctcctctttttcccttctaggcttccttttctggcttcctgttttcctgatcctctgttatctcaccctcccgcggtttcttttgctctgggcctttggttggcggtttctacggtttctacgtggcttttggaacctcagcctttctcccttgctctgaagttagctggatctttgctccctctgggtcatggggccttagccccattctttctcccctgcctgtgctgcatgccttttgactttcccagcaagtgtatggagagtgagttcaggctggggacacaaaaccattctccccatgtcctggtactcaaaggggtcatggtggaagctggagagcccctggctggcttctcctcccaccccctcagttctcagggactcagcagggctcccactaacaggggcaggctagggcttgagctgtgtcttgggtcgggccaaggcttcagaactcaactgcctctggcacaccccgagcctgcagcttttcctggcatcaaactcagcattatctggaggcaggcaccactcccacacatgactcattaggcccaatgagaagatgggtcggtgggctagtgacagggccctagacagccacacttcatgcccaggggctaggagcacacccccagagcctcactactctcaaatatcaagatgaggggagagtatagagggaatgtctccctctgaagacctgaattattgtgatgttatttgagccacgctggccttgaactctgaaccctcctgcctcatcttcaaaggctggaattacaggttcgcgccactaggcctatctgagaacttagttaattctacagaagagagtttgttttcactggtttgaaacgaggcctcgtgtacccagagctactcttttgccaactcactgtagagccaaggatgaccttgaactctggtcttcctggctccgagtcctcggtactgggtagacaatgtgtgatcctaacccccagttttatgtggtgctatacagatggcatccagggtttcctgcatgctggacaggtcatcaaccaaccgagccacatcctcctcatcatcatcactttgttgttggttttcaatccagagctcatggagcccaagctggcctcaatctatataaccaagactgtgcctggtcttcctgtctctacctaacaaatgatggtgggatgcagggatgtacaaccaggagcagagccttacttctaaacgaagaaggaaccccacctccctgtgggcagacctggaggtggggcaaggaccacagaaagacattacagaactaggatcgtgaaggaagtcatggaggccagcctgttgtacagagtgagttccaggacagccagggctacacagaggaaaacaagaaggaaaaaaaaaaaaaaaaaaagaactgaatgactagcagttttagaaccttagctgtgtgcttcccgtaccctacctgtggcacaggaagcccttgttgctaagagtaggatgacactggaagcaccaagcactgggcagagtaagggggaaatctgttacattattcagatgggcgcttgaggactgagcaggactcctttcaagaagcaaaagggtcaggcctggtgcccacagggactggaagctagctagcgccgagttggccccagagatgtcgcaacccagccagggtcgagaatctgttccacccctttcacaaccatccccctgttgtcgtcgtccccacccccacccccgccccaactgacacgtgggttgcaggggcaccaggccagccaacctagagtctgggccccttagccaccagctgccagggggtcactgtcggtcaatgacagctctgggggagggggggagaagggccttggactctagcctgagagaaaggatgttgtggaaggagggggcagggaggcaagtttagggcctgcaggggcctaggaggccccacaagacctaaaaacgggggaaggggggttgtgccagttaggggacactatggagctctgcaagctaagaggctcttagcttctttgcagttttgactagctgaagaggcaacttctaaggaagggagatgaggggatgccaagatcccagagagcatccgaggaggtctgagggtgtgcagatgcaaaggcattggaggtgaagggagccagggtgcagcatccgggacagaatgtgagctgaggctcctggtcaaggagaaggtagagaagagctaacctgaggatgcagtgtgagctaggggtgagatgggggtgaggggagttgtttgtaagacccccccccttaaggtgggacagcctcagagagagagtgagtaggcagagcagccaaggctgggtggagatcaatgagatttggaagtgaggatgctgaccagtgacgagccttgggcctaaataaaaagcctggatgtgggatctgcctcccagtatcgaccagaatgacagaagagagtgggctggttgtgttggtgttggtgcatgcctgtaatcccagcaactcactagagaggcagaggcaggagcatcacaaattccaggccagccaaaaagcctatgtaaaaaaaaaaaaaagagaaaaaagaaaaaagaaaaagtaggtggacacagagacaagggggaggctcagggggagggcgaccagcttgctccgccccctccccaaccggttaaacctctgtgcaggatcctcccaccgccatgggcctcctgagagatccttagatccaggttagtgcataggaaagtgtccccccactacctacagctaagggattggggtggtgggatcatggtggagggcggtggtgaatactagcgatgtcccccgctacccgtgcgtctgcctccagggtgcccctccaaccaggatgaggctcttcatcgctcttcctgtcctgattgtggtcgtagccatgaccttggaaggtaagaaagagccttggaaggtaagaaagaggcttggaagtgtgaagttggccttgtgcctgcggcccaggcttagaagaccctcgaggagggctctgaggtccctttctgtgtcatcattccactaccgccctcccatcgtcccccatcccacctgccaggtgccttatttttgtgtcaaagtgggtgctgaaggaggcaactctgtccagaaaagacgcagtaaccaatgacctaggataccaccctttggaattggctaatcttcctagaaggggcggagcgtaaaaacaaggaggtgagaggtgcagtaaaatcaagtgtccaataccctcccccatgctaatgagtttgctcgcaaccctctcgcggcaggcccagcccccgcccaggcggccccggatttgtccggaacattggagagcataccggataaactgaaggagtttgggaacactttggaagacaaggcccgggcagccattgaacatatcaaacagaaggaaattttgaccaagacccggttaggacctttcagggcacgggcgggtggtgtgtgtgtgtgtgcgtgcgcgcgcgcccgtgtgtaaaagccctagcagacagttccacactgacacaatggggaaactgcaccagagtgtttgacactttccctgaagtcatagaactgtatctgaagtcattgaactggatgtcaaagtgctcgtagtgtggagacaggcggtgtaactcccagccaactgttagagatgtttccaagtcctagtgaagggccaagctaggcggctgactggttaggacagaccctgacccctccctgtgtactcttgagacaggtcatgacttgagtctccgagacagagaaagaatgtaggagagttggggcaggggcacagcagaagctgtacaggcctgggctctgcagtttacactggccaaagagagattagggcatgctgggttaagaactagccaggcagtggtggcgcacacctttgatcccagtattcatgaggcagaggcaggcagatctctttgaggccagcctgattggagctagttctaggaaagccagggctacacagagaaaccctgtctcaacaccaccaccaccccccaaaaaaaagggcccagcaaagaacagaaataggagtttgagaccagcctgggctataggcaaggttctgcctcaaattgaaaacaacaacaaaaagcaggaggtgaagacacctgagagacacctggtatgctgtaaacaggttggctagccagtttggcaagtagacaaatcgttcatttaaagtgaggtctgagtttgattacaaatatccagccaggcctaaacttggcaaaggaagtttcctttggagggaaagtgcaaaggccctggggtgggaagatctgtagataagagagaatggccttctagactcgggggagaacttgggccaaggacacaggccagagtgagcggcaacagcttgggcaagcacaggctaaagaaggggtgggcgggaagcaagagatggcaagccttgtggggtgtagctgcacatgtttttaatcccagcgaaaaataaaaacaaacaagattaaaaaaaaaaaaaaaaagataagaagatggaaggaaaccaggggaagaccaggggaaatgccagtgcggatctggttgatcccagaatccacatctttttgtttgtttgtttcgagacagggtttctctgtatagccctggctgtcctggaactcactctgtagaccaggctggcctcgaactcagaaatccacccgcctctgcctcccaagtgctgggatcaaaggcgtgcgccaccactgcccagcagaactcacatttttaaaaatcagtcatagggttcagttaagagcacttgctgctcctgcagaggaccagcagcctgtgcccctaccccaccacacacacacacacacacacacacacacacacacacacctatgtcagcacagctcacagcagccctgtaactccagctccaagggatccaatcccctctactggaactgcaggcactggagcacaaatacatgaacaaaataaagctttaagggaatgtataaatgccagacagtggtggcactcgcctttaaccccagcactccagaggcagaggcaggcaggtctctgagttccaggatacagagctagttagagtgcagacatttcaccctaccatgggaaggacagacagatgggaccctgggtcaggtgatgggaaagagagacatatggaaccctggcagccagttggctaggctaggaggttgccctttgttctctgtagttacctgctagccacctctcacacagtggctggctttgaaagccaggtcaagatgaagttctttgagttttggtttcacgatgctctgatctgggctggggatgtggctcagtacttgccttgtgtgcacaaagcccacggtaccccattgatttgggaggtgcaggcagtaagattggaagttcaaggtcttcattcttagctacatatcaagattgaggctagcctgggctacatgagaccctgtcccaaaacacccacacaaattctctggtctgtgtgagggaactgaggcagaaacaatgacacccccacccccaccccagggttttcatcccacagacaggatgaggagagataaggaaaggaaccggaggggaatgggatgcagagctctaggtccctcggagggtccagtaagcactgactcggccccgtctctctccaaagggcctggttctcagaggcatttggcaaagtgaaggagaagttgaagaccacgttctcctgagcacctggcgggccacctcgaagcatcaaggacatccacgtaatgtgccaggtccctcttcatcacagaccaataaaaaacgtgtagaaggcaaacgctccctgaagtgctttggactggggtgggggctgagggatgatgcagagactgggtgtgtcccttcgcttgttgttggtttatgtatttttatgtgtgagggtgttttgcctgcatgtgcatttatgtgcacctcgtgtgtacagtacccacagaagccagaagaaggccttacttctcctgaaactggagaaggtcctgagctgccatgtgggtgttgggaatggaacctgggtccactggaagaacaacagccagggctcttaagcgctttgacatctctccggcccccccacccctgtctgcatacttttcacgttacggttccccaaagaaccttgagaaccctattcacgtcaaacattgaggctcaaagcaggaaagctcttggtgcaaggcacccagtcagccggcagggagtagggttgaatgcatagcctgcagtgatgcatagcttgcactctcctgtttagtgtgatccagatgaggctggattggactttccagtgcagagagtagacactcattaaactgcaagtggatgatgcagaggactaggaagcagggtggacaggacgggcataggagggaaccagaaaggaggtactcatctacagatcaccatgtccccttctccagaatgcccttccagtcacctacagatcaccatgtccccttctccagaatgcccttccagtctggcttctccattgcagctttgccagctctcactacttaacttcttgaagctgttaccatgagcccccagatgacggggccaagattggtgtcaccagtgggtctatacccattgcccagtttcagctgaccacagtgccagtgttgaataatatttgctcaaaccaataactgcttaatttgtttgctttggtttttttttttttttttggtttttttgtttgtttgtttggttggttttggtttttttgtttttttgtttttttgtttttttttttgagaaggggtttcaataattggctctgaatagctttgtaggccaggcaagtctcacaccagagcttcctgctgcggccttctcagtttccaaagggttgtgactaggtatgtgccaccatgctgggcctagtcgtcttttctcttcgttattgtttagttattaagacagggtttctcagggtagccctggatgtcccagaactccccaataagccaggctggcctacaccatatgcctctgccgcctccggagtactaggattaaaggagtatgcccccgccaccacctaacgctaggcctgccttaacgcactgtgttcgcatagaaaccagggcctggcacatgctaggcaaatactctaccactgagccacgcccccagcccctcactgggggattctaggcaggggctctaccactgagccacgcccccagcccctcactgggggattctaggcaggggctctaccactgagccacgcccccagcccctcactgggcgattctttcctatctcatttcttttctcattttcaaggctgggtcttactctgtacttttctacataaaccgggctggcctggaactcacaaagatccccgactcttccattccaagtgctgggattaaaggtgtgtgccaccacctctaactctttggaaatactttcaaaaaaaccttttttttttttcattgctttttataaaaaactttgtgggagctgggcagtggtggcacacgcctttaatcccaccacttgggaggcagaggcaggtggatttctgaattccagaccagcctggtctacagagtgagttccaggacagccaggatagagaaaccctgtctcaaaaaacaaaacaacaacaaaaaaattgtagggaaactgctaattaaggctgaagtccaccataacaggatagcctagcctgtgggcttggacacagtatgggagaccctcttccttagccaatctccttctctgaccttgcctggggaatttttttttttttttttttttttatgtaaaagcatgaggtagtttaatgaagagctccaggcctacacatatctcccgcaggagacagaggtgttgaccacatggtggagccataatggcggagctcccgttcaaatcttatctcacacaggagacagtggtttcgaccacgaggcttggaagctaagggtttttatagaaaaggggtggggctgggggaggaattggcgcggtttcacatgattggtccatttaaacatcaacagactgtcagaagggctggagatagggaggcactaggccagtcaggacatgtaacaatgggcctgccccttgcctggggaattctaagcccccatagtctcctccacctgaagaatgtcacatggccccaattagattacaggatcaatttcctttttccggaccaaacctgttcagactgcactgagattcctgaaatgcttccccatgctaatgaggcattttagaatcctaagccccaagccagtgatctctgcccatcctggatgtccctgccctcagtcccccaaaacttttaagccttcagtcaccctaaggaaagttattctgcccactgacagcaggtctggtgtggtctttcaccttacaactcacaggggttttgaaccccaccccacccccagcccactcacatctctacttcctttgcccttgtgcattgcatcacaattcacagggggtggggcgacccaggtaacttattgtattatgtgtgtgcctgtacgtgtccccggtgagtgtgtaggtccaaggacaacttgcctgagttgcttctctaggtcctggggcttgaactcaggccatgggtgttggtgacaaacacctttatgagatgggctggggagattgctcaatggttaagagcacatactgacttcagttccaagcgtccataacgggcagttcccaactctctataactccagtttccacgggaacacctgtgtacaacaccctcacaacatatacataattaattccatttattttttattttgaggattagttttttgagatagggtttctctgtgtagccctggctgtcctgaaactgtcctgaaacaaggctggcctcagacttagagatttgcttgcctttgcctcctgagtgccgggattaaaggtgtgtgccaccaccacttgctgcataattaatttatgaaagacttttaaaaatatttttttatttgatacaatttcatgcagtctaggccagcctcaaacttggatgatgataaaccatgcatcttactgcctccacctcccaaatcctgggttacagacttctgcctccgtgcctagttttatgcaacgctagagacagaacgggacttcgtgtgtgcatggtaaaaggttccaccaatggagccgcatcctcagcctctctttcactccaaattcccttgccagagacctcaagcatccatctgaagaagtgagcagttagagacccgtggaagacaagaggagcgggggcgcgggggcggggaggcgtgagggctcagcgtgagtagggattctcaaccatgacaagatggggaccaagaggagggaggagagtagacacctgggagattgaggtcagaggatcaccaggagctggagaccatcctggctacagtgtaatggtctcaaaaacaaagggaggtcaaaggagagttagtgctaattttgctggcactctccaacttgaagacagttcaggtctcggggatgtgactctctctgctgccacactagggtggcaggatcaccagcccgtcccattctccttgcagatccctcttctttctccccagctccctcactggcacacttgtttttcagttgcccctggtgtccaccctgaccgaccttcagcctgcccctgcccccaggatgagcaaacattgcaggcagcaaatagcaaacagcccacagccaccttgtatgctgactttggctgaagggcaaaggacagagaccttcctcagccctacccccagccccagctccctaccttagcctacctcttgggctgtaggctttgcatcagcatggtgaaatgatgaaagacaactagattcagaccccgaccccatcaccaactactgtcttggtttcctccttttgtaaagattttttttatgtatgtatgtaagtacactgtagctgtcttcagacacaccaggtgagggcattggatcccctatggatggttgagaaccaccatgtggttgctgggaattgaactcagtacctttggaagagcagtcagtgctcttaaccactgagctatcttccatccctcaattgtctcttatgtgaaaaaagaatgctaggtagggctgggcagtggtaggacacgcttttaatcccagcacttgggaggcagaggcaggtggatttctgagttcgaggccagcctggtctatagagtgagttccaggacagccagggcaatgaggggctggggggcgtggctcagtggtagagcccctgcctagacacaaagccctctgttcaattcccatcagtgggaaaacattcctaagctgtggaaaacaccaaagcaaccccctctgggcctcgagcacagtacaccaaattaaaaacatcatactgggactcagttgatggagtacttgctaacttgcacttggccctgcattcaatccccaactgtgcattaaattcggtgtagtagggaatgctgatgatcccagcactgggaaggcaaacacaaaggccttcagagttccaggcttgcagggcttcatcaggaaacgagaaccctaatttaatgtgtgtgtgtgtgtgtgtgtgtgtgtgtgtagagagagagagggagaaagagagagtgggaatatatatatatatatggagtgtctttgagacagggcttctccatggcctcagaggcctggagctctgtagagcaggctagtctcgaccttacagtgatccctccagagcgctgggattaaaggcatgtgccaccacacttggtataaaatctttttttttttttcaaaaaaagaataaatagataaatagcacctgagcgttatagtatggctgcacctcttctgatgctctgtcctgtctcaggccagcctacaagccaggtaatggtaagacagcaagtcacattttagtgtgagctaatcagcccgcagagactcagcaaccagcaacctgcacatagcctcaatgctgaaaagagatggtgat

SEQ ID NO: 28 - DNA, 26923 bp, Mus musculus
atcaccatctcttttcagcattgaggctatgtgcaggttgctggttgctgagtctctgcgggctgattagctcacactaaaatgtgacttgctgtcttaccattacctggcttgtaggctggcctgagacaggacagagcatcagaagaggtgcagccatactataacgctcaggtgctatttatctatttattctttttttgaaaaaaaaaaaaagattttataccaagtgtggtggcacatgcctttaatcccagcgctctggagggatcactgtaaggtcgagactagcctgctctacagagctccaggcctctgaggccatggagaagccctgtctcaaagacactccatatatatatatatattcccactctctctttctccctctctctctctacacacacacacacacacacacacacacacattaaattagggttctcgtttcctgatgaagccctgcaagcctggaactctgaaggcctttgtgtttgccttcccagtgctgggatcatcagcattccctactacaccgaatttaatgcacagttggggattgaatgcagggccaagtgcaagttagcaagtactccatcaactgagtcccagtatgatgtttttaatttggtgtactgtgctcgaggcccagagggggttgctttggtgttttccacagcttaggaatgttttcccactgatgggaattgaacagagggctttgtgtctaggcaggggctctaccactgagccacgccccccagcccctcattgccctggctgtcctggaactcactctatagaccaggctggcctcgaactcagaaatccacctgcctctgcctcccaagtgctgggattaaaagcgtgtcctaccactgcccagccctacctagcattcttttttcacataagagacaattgagggatggaagatagctcagtggttaagagcactgactgctcttccaaaggtactgagttcaattcccagcaaccacatggtggttctcaaccatccataggggatccaatgccctcacctggtgtgtctgaagacagctacagtgtacttacatacatacataaaaaaaatctttacaaaaggaggaaaccaagacagtagttggtgatggggtcggggtctgaatctagttgtctttcatcatttcaccatgctgatgcaaagcctacagcccaagaggtaggctaaggtagggagctggggctgggggtagggctgaggaaggtctctgtcctttgcccttcagccaaagtcagcatacaaggtggctgtgggctgtttgctatttgctgcctgcaatgtttgctcatcctgggggcaggggcaggctgaaggtcggtcagggtggacaccaggggcaactgaaaaacaagtgtgccagtgagggagctggggagaaagaagagggatctgcaaggagaatgggacgggctggtgatcctgccaccctagtgtggcagcagagagagtcacatccccgagacctgaactgtcttcaagttggagagtgccagcaaaattagcactaactctcctttgacctccctttgtttttgagaccattacactgtagccaggatggtctccagctcctggtgatcctctgacctcaatctcccaggtgtctactctcctccctcctcttggtccccatcttgtcatggttgagaatccctactcacgctgagccctcacgcctccccgcccccgcgcccccgctcctcttgtcttccacgggtctctaactgctcacttcttcagatggatgcttgaggtctctggcaagggaatttggagtgaaagagaggctgaggatgcggctccattggtggaaccttttaccatgcacacacgaagtcccgttctgtctctagcgttgcataaaactaggcacggaggcagaagtctgtaacccaggatttgggaggtggaggcagtaagatgcatggtttatcatcatccaagtttgaggctggcctagactgcatgaaattgtatcaaataaaaaaatatttttaaaagtctttcataaattaattatgcagcaagtggtggtggcacacacctttaatcccggcactcaggaggcaaaggcaagcaaatctctaagtctgaggccagccttgtttcaggacagtttcaggacagccagggctacacagagaaaccctatctcaaaaaactaatcctcaaaataaaaaataaatggaattaattatgtatatgttgtgagggtgttgtacacaggtgttcccgtggaaactggagttatagagagttgggaactgcccgttatggacgcttggaactgaagtcagtatgtgctcttaaccattgagcaatctccccagcccatctcataaaggtgtttgtcaccaacacccatggcctgagttcaagccccaggacctagagaagcaactcaggcaagttgtccttggacctacacactcaccggggacacgtacaggcacacacataatacaataagttacctgggtcgccccaccccctgtgaattgtgatgcaatgcacaagggcaaaggaagtagagatgtgagtgggctgggggtggggtggggttcaaaacccctgtgagttgtaaggtgaaagaccacaccagacctgctgtcagtgggcagaataactttccttagggtgactgaaggcttaaaagttttgggggactgagggcagggacatccaggatgggcagagatcactggcttggggcttaggattctaaaatgcctcattagcatggggaagcatttcaggaatctcagtgcagtctgaacaggtttggtccggaaaaaggaaattgatcctgtaatctaattggggccatgtgacattcttcaggtggaggagactatgggggcttagaattccccaggcaaggggcaggcccattgttacatgtcctgactggcctagtgcctccctatctccagcccttctgacagtctgttgatgtttaaatggaccaatcatgtgaaaccgcgccaattcctcccccagccccaccccttttctataaaaacccttagcttccaagcctcgtggtcgaaaccactgtctcctgtgtgagataagatttgaacgggagctccgccattatggctccaccatgtggtcaacacctctgtctcctgcgggagatatgtgtaggcctggagctcttcattaaactacctcatgcttttacataaaaaaaaaaaaaaaaaaaaaaattccccaggcaaggtcagagaaggagattggctaaggaagagggtctcccatactgtgtccaagcccacaggctaggctatcctgttatggtggacttcagccttaattagcagtttccctacaatttttttgttgttgttttgttttttgagacagggtttctctatcctggctgtcctggaactcactctgtagaccaggctggtctggaattcagaaatccacctgcctctgcctcccaagtggtgggattaaaggcgtgtgccaccactgcccagctcccacaaagttttttataaaaagcaatgaaaaaaaaaaaaggtttttttgaaagtatttccaaagagttagaggtggtggcacacacctttaatcccagcacttggaatggaagagtcggggatctttgtgagttccaggccagcccggtttatgtagaaaagtacagagtaagacccagccttgaaaatgagaaaagaaatgagataggaaagaatcgcccagtgaggggctgggggcgtggctcagtggtagagcccctgcctagaatcccccagtgaggggctgggggcgtggctcagtggtagagcccctgcctagaatcccccagtgaggggctgggggcgtggctcagtggtagagtatttgcctagcatgtgccaggccctggtttctatgcgaacacagtgcgttaaggcaggcctagcgttaggtggtggcgggggcatactcctttaatcctagtactccggaggcggcagaggcatatggtgtaggccagcctggcttattggggagttctgggacatccagggctaccctgagaaaccctgtcttaataactaaacaataacgaagagaaaagacgactaggcccagcatggtggcacatacctagtcacaaccctttggaaactgagaaggccgcagcaggaagctctggtgtgagacttgcctggcctacaaagctattcagagccaattattgaaaccccttctcaaaaaaaaaaacaaaaaaacaaaaaaacaaaaaaaccaaaaccaaccaaacaaacaaacaaaaaaaccaaaaaaaaaaaaaaaaaccaaagcaaacaaattaagcagttattggtttgagcaaatattattcaacactggcactgtggtcagctgaaactgggcaatgggtatagacccactggtgacaccaatcttggccccgtcatctgggggctcatggtaacagcttcaagaagttaagtagtgagagctggcaaagctgcaatggagaagccagactggaagggcattctggagaaggggacatggtgatctgtaggtgactggaagggcattctggagaaggggacatggtgatctgtagatgagtacctcctttctggttccctcctatgcccgtcctgtccaccctgcttcctagtcctctgcatcatccacttgcagtttaatgagtgtctactctctgcactggaaagtccaatccagcctcatctggatcacactaaacaggagagtgcaagctatgcatcactgcaggctatgcattcaaccctactccctgccggctgactgggtgccttgcaccaagagctttcctgctttgagcctcaatgtttgacgtgaatagggttctcaaggttctttggggaaccgtaacgtgaaaagtatgcagacaggggtgggggggccggagagatgtcaaagcgcttaagagccctggctgttgttcttccagtggacccaggttccattcccaacacccacatggcagctcaggaccttctccagtttcaggagaagtaaggccttcttctggcttctgtgggtactgtacacacgaggtgcacataaatgcacatgcaggcaaaacaccctcacacataaaaatacataaaccaacaacaagcgaagggacacacccagtctctgcatcatccctcagcccccaccccagtccaaagcacttcagggagcgtttgccttctacacgttttttattggtctgtgatgaagagggacctggcacattacgtggatgtccttgatgcttcgaggtggcccgccaggtgctcaggagaacgtggtcttcaacttctccttcactttgccaaatgcctctgagaaccaggccctttggagagagacggggccgagtcagtgcttactggaccctccgagggacctagagctctgcatcccattcccctccggttcctttccttatctctcctcatcctgtctgtgggatgaaaaccctggggtgggggtgggggtgtcattgtttctgcctcagttccctcacacagaccagagaatttgtgtgggtgttttgggacagggtctcatgtagcccaggctagcctcaatcttgatatgtagctaagaatgaagaccttgaacttccaatcttactgcctgcacctcccaaatcaatggggtaccgtgggctttgtgcacacaaggcaagtactgagccacatccccagcccagatcagagcatcgtgaaaccaaaactcaaagaacttcatcttgacctggctttcaaagccagccactgtgtgagaggtggctagcaggtaactacagagaacaaagggcaacctcctagcctagccaactggctgccagggttccatatgtctctctttcccatcacctgacccagggtcccatctgtctgtccttcccatggtagggtgaaatgtctgcactctaactagctctgtatcctggaactcagagacctgcctgcctctgcctctggagtgctggggttaaaggcgagtgccaccactgtctggcatttatacattcccttaaagctttattttgttcatgtatttgtgctccagtgcctgcagttccagtagaggggattggatcccttggagctggagttacagggctgctgtgagctgtgctgacataggtgtgtgtgtgtgtgtgtgtgtgtgtgtgtgtgtgtgtggtggggtaggggcacaggctgctggtcctctgcaggagcagcaagtgctcttaactgaaccctatgactgatttttaaaaatgtgagttctgctgggcagtggtggcgcacgcctttgatcccagcacttgggaggcagaggcgggtggatttctgagttcgaggccagcctggtctacagagtgagttccaggacagccagggctatacagagaaaccctgtctcgaaacaaacaaacaaaaagatgtggattctgggatcaaccagatccgcactggcatttcccctggtcttcccctggtttccttccatcttcttatctttttttttttttttttaatcttgtttgtttttatttttcgctgggattaaaaacatgtgcagctacaccccacaaggcttgccatctcttgcttcccgcccaccccttctttagcctgtgcttgcccaagctgttgccgctcactctggcctgtgtccttggcccaagttctcccccgagtctagaaggccattctctcttatctacagatcttcccaccccagggcctttgcactttccctccaaaggaaacttcctttgccaagtttaggcctggctggatatttgtaatcaaactcagacctcactttaaatgaacgatttgtctacttgccaaactggctagccaacctgtttacagcataccaggtgtctctcaggtgtcttcacctcctgctttttgttgttgttttcaatttgaggcagaaccttgcctatagcccaggctggtctcaaactcctatttctgttctttgctgggcccttttttttggggggtggtggtggtgttgagacagggtttctctgtgtagccctggctttcctagaactagctccaatcaggctggcctcaaagagatctgcctgcctctgcctcatgaatactgggatcaaaggtgtgcgccaccactgcctggctagttcttaacccagcatgccctaatctctctttggccagtgtaaactgcagagcccaggcctgtacagcttctgctgtgcccctgccccaactctcctacattctttctctgtctcggagactcaagtcatgacctgtctcaagagtacacagggaggggtcagggtctgtcctaaccagtcagccgcctagcttggcccttcactaggacttggaaacatctctaacagttggctgggagttacaccgcctgtctccacactacgagcactttgacatccagttcaatgacttcagatacagttctatgacttcagggaaagtgtcaaacactctggtgcagtttccccattgtgtcagtgtggaactgtctgctagggcttttacacacgggcgcgcgcgcacgcacacacacacacaccacccgcccgtgccctgaaaggtcctaaccgggtcttggtcaaaatttccttctgtttgatatgttcaatggctgcccgggccttgtcttccaaagtgttcccaaactccttcagtttatccggtatgctctccaatgttccggacaaatccggggccgcctgggcgggggctgggcctgccgcgagagggttgcgagcaaactcattagcatgggggagggtattggacacttgattttactgcacctctcacctccttgtttttacgctccgccccttctaggaagattagccaattccaaagggtggtatcctaggtcattggttactgcgtcttttctggacagagttgcctccttcagcacccactttgacacaaaaataaggcacctggcaggtgggatgggggacgatgggagggcggtagtggaatgatgacacagaaagggacctcagagccctcctcgagggtcttctaagcctgggccgcaggcacaaggccaacttcacacttccaagcctctttcttaccttccaaggctctttcttaccttccaaggtcatggctacgaccacaatcaggacaggaagagcgatgaagagcctcatcctggttggaggggcaccctggaggcagacgcacgggtagcgggggacatcgctagtattcaccaccgccctccaccatgatcccaccaccccaatcccttagctgtaggtagtggggggacactttcctatgcactaacctggatctaaggatctctcaggaggcccatggcggtgggaggatcctgcacagaggtttaaccggttggggagggggcggagcaagctggtcgccctccccctgagcctcccccttgtctctgtgtccacctactttttcttttttcttttttctcttttttttttttttacataggctttttggctggcctggaatttgtgatgctcctgcctctgcctctctagtgagttgctgggattacaggcatgcaccaacaccaacacaaccagcccactctcttctgtcattctggtcgatactgggaggcagatcccacatccaggctttttatttaggcccaaggctcgtcactggtcagcatcctcacttccaaatctcattgatctccacccagccttggctgctctgcctactcactctctctctgaggctgtcccaccttaagggggggggtcttacaaacaactcccctcacccccatctcacccctagctcacactgcatcctcaggttagctcttctctaccttctccttgaccaggagcctcagctcacattctgtcccggatgctgcaccctggctcccttcacctccaatgcctttgcatctgcacaccctcagacctcctcggatgctctctgggatcttggcatcccctcatctcccttccttagaagttgcctcttcagctagtcaaaactgcaaagaagctaagagcctcttagcttgcagagctccatagtgtcccctaactggcacaaccccccttcccccgtttttaggtcttgtggggcctcctaggcccctgcaggccctaaacttgcctccctgccccctccttccacaacatcctttctctcaggctagagtccaaggcccttctccccccctcccccagagctgtcattgaccgacagtgaccccctggcagctggtggctaaggggcccagactctaggttggctggcctggtgcccctgcaacccacgtgtcagttggggcgggggtgggggtggggacgacgacaacagggggatggttgtgaaaggggtggaacagattctcgaccctggctgggttgcgacatctctggggccaactcggcgctagctagcttccagtccctgtgggcaccaggcctgacccttttgcttcttgaaaggagtcctgctcagtcctcaagcgcccatctgaataatgtaacagatttcccccttactctgcccagtgcttggtgcttccagtgtcatcctactcttagcaacaagggcttcctgtgccacaggtagggtacgggaagcacacagctaaggttctaaaactgctagtcattcagttctttttttttttttttttttccttcttgttttcctctgtgtagccctggctgtcctggaactcactctgtacaacaggctggcctccatgacttccttcacgatcctagttctgtaatgtctttctgtggtccttgccccacctccaggtctgcccacagggaggtggggttccttcttcgtttagaagtaaggctctgctcctggttgtacatccctgcatcccaccatcatttgttaggtagagacaggaagaccaggcacagtcttggttatatagattgaggccagcttgggctccatgagctctggattgaaaaccaacaacaaagtgatgatgatgaggaggatgtggctcggttggttgatgacctgtccagcatgcaggaaaccctggatgccatctgtatagcaccacataaaactgggggttaggatcacacattgtctacccagtaccgaggactcggagccaggaagaccagagttcaaggtcatccttggctctacagtgagttggcaaaagagtagctctgggtacacgaggcctcgtttcaaaccagtgaaaacaaactctcttctgtagaattaactaagttctcagataggcctagtggcgcgaacctgtaattccagcctttgaagatgaggcaggagggttcagagttcaaggccagcgtggctcaaataacatcacaataattcaggtcttcagagggagacattccctctatactctcccctcatcttgatatttgagagtagtgaggctctgggggtgtgctcctagcccctgggcatgaagtgtggctgtctagggccctgtcactagcccaccgacccatcttctcattgggcctaatgagtcatgtgtgggagtggtgcctgcctccagataatgctgagtttgatgccaggaaaagctgcaggctcggggtgtgccagaggcagttgagttctgaagccttggcccgacccaagacacagctcaagccctagcctgcccctgttagtgggagccctgctgagtccctgagaactgagggggtgggaggagaagccagccaggggctctccagcttccaccatgacccctttgagtaccaggacatggggagaatggttttgtgtccccagcctgaactcactctccatacacttgctgggaaagtcaaaaggcatgcagcacaggcaggggagaaagaatggggctaaggccccatgacccagagggagcaaagatccagctaacttcagagcaagggagaaaggctgaggttccaaaagccacgtagaaaccgtagaaaccgccaaccaaaggcccagagcaaaagaaaccgcgggagggtgagataacagaggatcaggaaaacaggaagccagaaaaggaagcctagaagggaaaaagaggagagacaaggcaaggagagggtgtcagataagactagagcggaggaggagagataagacaaccagaaaagtaaacaccgcctggcgaccctggtctcttacatgttgattgattcaaggcatagctgtgcagtgggtgcttgggaagttgggaaaagtagcccaactgacccacatgaagtggtacatgcctttctcagttcctgtagagattgatttgaaaacaaagattcaaatattcaagaccaaactaggctagagggagtgcaaggaaaatcagttgagatcctatttcagactaaaaagaagggtggatatagctaaatagaagagcctgtactgggtgctggagagatggctcagcagttaagagcactgactactcttctataagtcctgagttcaattcccagcaaccacatggtggctcacaaccatctgtaatgggacctgacgcctgaagacagctgcagtgtaccttatacataagataaacaaatcttaaataaataaataaataaaatgagcccatgcctagaatccaggggtagggggcggtgaagagccccagaggctgtgggtgtggctcagtggtagagctactgactagaattcccgtagtgaggggctggaggggcgtgactcagtggtagatatgattccccagtgaggggctgcgggtggctcagtggtagagcccctgcctagaatcccccagtgaggggctgtgggcgtggctcagtggtagatcacttgttcttttatgttgctaggtcctaggcttcatttctattgctgcaaaaccacctccctctacagatagtgacagggccatggaatgtgtgctaggtaaggcaaaaaacaataaactgaggctgaagctgattggaatcactcacagagactcagaatgtgctcggagaatctttattaagcaagggccaccagagggccagagaggtgcttgagacagggccacctggctggatatggatgttgttgcaggacaggagaaggatactcattgattctcctgggccactggggtgatgatggggttggtagccacagaggcctgtatcttctccatcaggtttgcccactggcgatgcatgtcttccactattggctcgaaccagcccttgaggcgggcctggaagatctccgcctgcaggcgtatttgctgggtctgttcctccatcttggagcgcacctcctccatgtgctcacgcacctcctctaggcggtcacgggcctggttgcccacttcctccagccgccctcggatgcggtcaccaaaagcctgggcgcgatcgcgcagaggctgggcggccccagcgcctaggttggcagtgcgctggcgaccttgctccaccagaggccccaggcgctcacggatggcactcacaccgcgctcggcgccctcgcgtgcccctgccttgtacacagctaggcgcttctgcagatcctcggcatcccgcatcaagcgcttgcgcatcttgcgcaggtgtgtggagagccgcgcccgtatctcctctgtgctctggcccagcatggtgtgcacctcgttgcggtactgcccgagtcggttgcgtagatcctccatgtcggctccgagtcgggcctgtgccgcctgcacctctttgcccagcctggcccgtgtctcctccgccactggacccagctgttcctccagctcctttttgtaagcctttacttccgtcatagtgtcctccatcagtgccctgcaggcccagaggaaacacaggaaggagatgaaggcaggacagaagggccagaaaccacagagcaagaggtgatggtactcgcttgtgttcccagaagttgagaagctgcggcataagaattgcagagccttcgaagccagcttgagttacagaatgggatcctgtctcaagaagccaaaagccaatcgaccaagcaagtaataaatgtctgttcctcccagcatccagaaggctaaagaaggcaggaggattcaaggccaacctgggctacacactaattgagaaaggaaacaagaaggggctggggacccagataggaggcaaccctggatcagctggtgcctgccgagggtgaaagagctggacactcacgtcagttcttgtgtgacttgggagctctgcagctcttcctggacctggtcagacagcgtctgcacccagcgcaggtaatcccagaagcggttcagggcctgctcccagggttggttgctttgccactcgagctgatctgtcacctccggctctccctcggctaggcatcctgtgtagagtaagtttaaggctgggtcaggacctacagtctttttgggtctctttgaagtgggtctggaggctgtggagtctgtttagatactacaagcatgcactgtcttgtatcctatgtagttcagagccgagactaggcaggtgtggaattagaaaatgtataccccacttttaagagcaactaagaaatcaactttttattgtgtgtgtgtgtgtgtgtgtgtgtgtgtgtgtgtgtacccttggaggtcagagttctagagggaattggctctctccttccactatgttggtctcagagttaagtcttcaagctttatgataagcacctttacccactaagccatcaatcctcttatagttaggggaaatcaaggcctaaagagtatataaaacagctgctcagggctattgaatctcagagaggtctcagaaccgcctcagcctcaacccaccagcagaagagatctagggctagaatagagtccacagaggagcagaaaaagcggcaccacagcaagtccttgctccatacctgtcagcaatgtgaccaacagcacggcccacagagccttcatcttcgcaattgtgattggccagtctgcggagggaaaaattgtctttgaacaccagggggcgggggtggagggactccggccacccagagaaccccatcttcccttctcagatctgtgagccatcacaaacatctccaaaacagagcacccgctcttcccaaaggtctgtttacctccccttgccgagttcgctatctcggcaccccggggtggatccgctgccaaaaattccagctccctctcctagggttcaaattccacttcacagagggccagcgggtggtccagcttacattcctctttcttcccggctaagtcctgctttccattttgtgttaatttaacacgatttttaatcgtcctccatccctgcgaagtggtaccctcccacaactacagaacttagggagctcagccatgaggagccacagtttgaaaccagtccgggttacttggggactgtgatggaaatcagtaggtatttatataaaagcagcctaaggctcatcccgagttttttcgccataggatggttcctagttgagccggtacgccgtgcaccgacagtcccgtactccttcctggaggtaacccctccacctgctctgactctggcaaaggctagttacctcgagtccttagtttgtcccccaagacttctatcgtgctgcctgcttttccaattcttgtgcctgtttcctggactccgggggatctcaaggttcccagcccacatcctaccaaggtccctgggtgaatccccagcccagcttgtcttaccagctccttccgaaacaagtccttagcctccagggtctgagcaggggatcggatcccagaccggtccaattataggactccccctgtcccgccccctcctcagggctagggcgggctgtgccagccccctgtcacgaggcgggttgttctctcccccttcacagcagggcagaggaaagaggtggagtttggatgccttgtgaccccccgctcccctcccccgccaacaaagggagcggacacctcattgaataatccaggccttggtactggggcactgagaaccgctccttccctttccccgcggggtctggtgcattgtaaagaaaagagctggcagcctaaatggaaatgggtgggtgggggctaagaggctcagcttctggggtgaagatcgttgttctgggatccctcgttgttgattcctccaccacaggtgaactctttccattccaaggctgggacgtgctccagttccttcaggagctgttcagtggtggctcccgatgggtttgaagccatacattaagccaagccctgggaaaccaagcgttgatgctcctgatctgtttctggcgattgccagatgtgtcaccttgggagggaagagctacccctacagagcacattttaaaaagttgttttgagataagattctcaggctgccctctaacccacaaaggtccttctgcctctgctgtagcatgctgggactgcaggtgtgcacccctgcatgtgcattttccactctcaagccacttctcttttctttttcctcataaaagcagaagagcaggagctggagagatgactcagaggttaggagcactgactgcatttcacaggacctaggttcaaaatcgcagcacccacacagcagctcacaactgtaacaccaagatctgctaccctcacgaaggcatacatgcaggcaaaacactaatgcacataaaaaaaaaaaaaaaaaaaaaaaaagacaagccataagtcattcactggaacatgggtctatagtgctagccatatgcaaagctgaggcaggaagatcccgagctcaggtaatagaatgaagtcctggctaaaaagtggaaaagccagctgggcgtggtggcacatgcctttaatcccataatcccagcacttggaggcagaggcaggtgaatttctgagttggaggccagcctggtctacaaagtgagttccaggaccgacaggactacacagagaaaccctgtcttgaaaaacaaaaaaaaacccaacaacaacaaaacccccaaaaagtgggaaagccattgtacctgggaagtcaggtaggacaaggggctcagagaccacagcaagcttgctagaagcactgcctgcacaaggttccctgttcccagctgttgatggcaggagagaagccacatagcagtgtttggcaccagacacggcaaaacatgattctgcaggatgggcagaggcggaacacctggctccaagggtacgtacagggtgcctggccaggcccaggcctgttagctttggcttcagaaaacactggcaaggactgggtgtggtgagatgattttcatgggttgctaagggccagctcccatctccagcccaggcagtagagagggtcttagtgctgcggtctaggacactgaccagttcatcgtgagtctttgcttcccttgggatgccatgaggtgcagcagtgagatgcagagcccaatctgaggcccttatcgcacaccccagagcaggcctcacggaaaagcactatagggaacccagcagcacctgcctgacacgtgaggcccagagctacatcttcaacaaaatttaaaaaacaaaacaacttgacatttcctgtttcagcctgggaaggtgctagggcccgttcctcccagagtaactttccttattgtgctgaacttccaggaactccgtttcttcctgaagtttctgagacctctgaccttcccactgggagaaagtcagcacaagctaccacctcagcccgttttgggacagggaggctcctgagccccgtctccctgcccccaccctgtttacagagacaaagtcctctgccagctctcggggccagactgcacagaggcgagtgacctggagccaccctcctggtgaggccaggcctctgatgttccggcagtgtaagtccccaagagcagagggtgtgaccatgcctggccaagctttctctaaactgcttggtgctgctgtgctttctgaaccctcggcgccgcctgctggcaaccatgtcaacaactggagaaaaccgaggcctcccagatcctatttttttttccacgtatattttttgttttttaagtttttttttttctgtaaaatgtcccggttttccataacttataaacatgatttctatggaggggtggagggggaagtgacaggcggctcggcgctcctctgctgccctcaggaggacatcaagtctttcctttctgagcctgtgtacagccgcctctgcgcctctgcctgggcgctcacaatcgaatgcccttcagatcccaggactccctccgggaccccaggccccctgggcactgtcccctggcgctggggatccttgggcatgggaggtcccctccttcccactgccccaaccccaagagagagggagaggaggggagggcagccggcccagcgatggtctgcagaggaaggacaggagggctcagccgatggtgaggccgaagccacacaggaacttattcttgcggtggttcaggaaggcgcagagggacagtgtcaggggcaagggcggaagcttcttctccagcgtggcgcccacgatccagttactgttcacagagcctgtgggccgagagcggggcagagactgggtggcttgatgtgcctggccacccatctctatggtagccacaacggacccgtatgtcctaagtcacaaccaaggccactccagaccatcacagcaaccctttaagtggctcaacaccgcccaggcttgacaaacccatgtcactgcgcagaatgaggttctgaacctggctgtcactattcacacagcttccctgctgtgctggctagttttatacaagctagtcaccccacccccacctttttcttttttttcttttctgagacagggtttctctgggtagccctggctgtcccagaacttgctctgtagaccaggctggtcttgaactcaagagatccagctgagggaacctcaatacatatgtctccattagctagggcagcaggcaagcctgtagggcactttctaagtgattgatgtgggagtacccagattattttcagtggggcaccctgggctaatggtccggaggctataagagcaggctgaggaagccataaggagcaagccaacaagcagcactcccacaaggccttctgcatcagcttgccttcagctttctgctgagtcctgccccatcttctcctcagtggtaggcatgccacctgagagttgtaacccaacataacctctttgctccctaagctgtttaccatcatagtgtttcatcacacaatagaagaactccaagtaaggtaagagtgagtggggagggccagagagcttgctagatgggaatgggaagagagggcttaaagcgaggcccccaacatgtactaaacatgccagggtaggagccccactgtttgacaagccacccagagtaatttggagctgcacagagtccccgcccactccaccagcacatgttcaacctccctatttcccatggactctaccacagacagctgagtcttatctggcctgttccccaggagggaagctgaggccttccttacctttaaaaaggaagttggccttgggcaggtccagctgatacccaaaggaggcactggtgtcctgcatcctggtgctggcctcaaactccacacccacctgcagctgggggagagagggcccggcacacatgtgagtggcccattaggactcctgggcataccaactgcaccagcaaacccagcctgggacccacagctaggcgctccctccggctcacctggtcactggctttgtggtaatacgtcgcatgcatgcctgcctggcccagcgttactgtagccaaccagttgttcactaggagagcagagttgggtgaggactaggtatcaagggatgtgggcatctggaaaccccactctcttccctctcaaccctgagatacaggccacagcctcctccctaagtgcgccccaggctcacgtgtgtatttcccagctagagacatgacagtgccctcctctcctggccgccggtggtagacgagctctccacccagggccagacacggtgtgatgctctggaggtagtgggccacgaggattcctgcaggaggagagggtggtcagactcaccagttccgaccaggcctggcctcacctccccagcggctcttgtctgctaaacctcacaacagtttatgcagttctcccttgccctgcgactcctgggctatggcccccaaagcagtagcacatacttgccaccacttagggagaagagaagcaagtcacccttcaacagaacatggagaagcaggcccctctacatcaccagcccaaagctctgaggcactctggcttaaaggcagggcagggagctgggaggcagggactggaggcatgggtcgacagcagagctgcctggcctgtagaagcctctgaattctacccctagaatggggagaggggagaagaaagaaatgtaaaaaccaaaagactggaacagatgggaagcaaagagcagagtgttcagggaagccaaggctgggtgggcagacaggcttgccaaggtggcagagagggtgatctcccacagagcgaggatgagtaaagcacaccagtgaccccatgacttgggagagagtgccgggccagcctgggatacagtgaaaccatgtctggaaactttcctaaggcccatttggcagaacagtgagcaggactctatgtggacgagcttgtgcaaggaactaagtcagtcctccatgcccctacaatgcgtgaacacggcagggcctgggtgggtgtattcccagaagtctatggctggacaggaaggtgccatgggttcataggccagtgtgaatggtccctcagtgagaaggggaccattagcttcagaagaggatcaagccaaccccaggtgggctgtggtggttcttgtaacctggctatatgttgggctagggcagggccatgtaccaaggcaggcctgggccacatagtaggatgctgactcagaaaagcccccacaaactactaagaagaaccattgtgattcagagccttcaaattcaacccacttaggagagggctagatggggcatgttggccaggtgtctcaaggtggctggctctgtttttatgctggggccaacccttagggtaccacaatctattgtgaggagcctggatgttcattaagcactggcaaactatgggagtcctcggcttactcttctgtgagataccctatacggctgtgaggtctgtgggagaggtttcacctgtgtggcaggtgtggaggctgtaggtaaagatggctttctcagattagtggtggcccctacagctgtgagtgggggaagggactcctgccttgcagttgctatctgtaggtggccactcaaaggattgtgcctctcagcttcctcttaattagatgagttgatactggtgatcagaggtttgctggggttggtttgatcctggtctacggagtgaccaggctggcctctgcctcccaagtgctgggattaaaggcgccccaccactgcctggtggcctaaagatttctttctctggaattatgtgtaatgggtgctttgcctgcacctatgtttctgtgacacctggtgtccacagcgtccagaggagggtatcaaattgtctgaactggacttacaggcagttctgagcggacatacaggcacttgaaattaaacaagagtcctctggaaaaccagctagtgcttccagccacctctctagggcccctgacctatttatagtcttcaaaattaaattcttgctgggcatggtggcgtatgcctttaatcccagcacttgggaggcagaggcaggcagatttctgagttcgaggccagtcttgtctacagagtgagttccaagacagccaaggctacaaagagaaaccctgcctcgtaaaaccaagagaacccctttcaataaacaacaaagggtcttgctctgaagctcaggctagccttaaatcgggtgatccttcttccttggcctcccacgcggttctgattattaaagtgtgccacactgtcttctattcaagacggcatacccactcccatcagtaattgtgcaagcatacaggtgtgtataggtcagaggacaacttgagttggttcccttcaggcttggcagcaagtgcccaacctgctcagccctgttgtccgcccaccctgttctgttgctcttattgctgtttttcactctgcgcaatcggggacagctcagaacttgtgaggattcttctgcccatgtgagccaccaagctctctaatcaaagctgatgtggaatttgctcactcattagtccaggatgaccctggaggtgagtgctgggctcaccttgagtgctgggctactttagttagttagttgctagggtctttttttttttttaaaaagatttatttattgtatatgagtacactgtagctgtcttcagacacaccagaagagggcatcagatcgcattacagatgctatgagccaccatgtggttgctggcatttgaactcagaacctttggaagaacaatcagtgctcttaaccactgagccatctccccagccctggttgctagggtcttttttttttttcttccccgagacagggtttctctgtgtagccctggctgtcctggaactcactgtatagaccaggctggccttgaactcagaaatccgcctgcctctgcctcacgagtgctgggattaaaggcgtgcaccaccattgctagggtctttttttttttttttttaaagatttatttattattatatctaattacactgtagctgtcttcagacacaccagaagagggcatcagatctcattacgggtggttgtgagccaccatgtggttgctgggatttgaactcaagaccttcggaagaacagtcagtgctcttaaccgctgagccatctcgccttccccgttgctaaggtcttaatggagggctctgtacttgctagccaagtactcaggtcagcaggtagggctttatcactgagcctcaccacagccctccatgtgcactgcttacagggtgattctgctctgcatgcccagccttttctcccatgcttttatctccacgggtctccactggagttgactatagcaccagttcccaaatgaagtcttcttgcaatgtatgaaaatgtttcagttgggtaaaacttggaaggccttgtctacatatggctacacaccacctatccaagaacagtctcgacaaagtcatgtcctaaggctggaagcccagaaacatttgaattaatttgtagtggagaggcagcccatcactagaagaaaccctgtcgaaaatcccccagcaacaggctgtggatgggggctcagtgataggacccgtgcctagaatcccccagtgagaggctggggcacagtggagagattgcatactaaggccttggttgccatctttaacactgccaatagataaacaaataacatgaagcctggcacttcagaagtgatcaacaaaatcatgttcttcaagcaaatggacaaacctaagaggctcaaagggactagaaatcactgaaactgaaaatggaagattagtaacagccaaggtatagcaggcctcagacaggctgggtcacggtggaagaaggcgggctgtaaggtcccagcaaaccccagactgttcaaggctgatagtccccctccccactcccccccctcccccagggtttctctgtgtagccctggttgtcctggaactcactctataaaccaggctggcctcaaactcagaaatccacccacctctgcctcccaagtgctgggactaaaggcgtgcaacaccactgcccagttttttgttttttgtttttttttgtttttttgagacagggtttctctgtgtagccctgtcgatcctggaactcactttgtagaccaggctggcctcgaactcagaaatccacctgcctctgcctcccaagtgctgggattaaaggcgtgcgccaccaacacgtggctcaaagatttatttattttatatatgtgaatacactgtttctgtcttcagacaccagaagagggcatcagaatccattacagatggttgtgatccaccatgtggttgctgggaattgaactcaggacgtctggaagaacagtcagtgctcttaaccattgagccatctctccaggcccttctgcccagctttattaaggctgacagttttaattcttttttctgagacagggtttctctgtgtagccatggctgtcctaaaggggtgtgcaagtacacctgtttagctgatagcatcttgaatgattaccagtcactatgcagatgtgcagttcagccccttggaggacaggcagttgtgttcccatcccagacatgccaggaatacctttttgttattgttttgattttttttgtttttttttcaagacagggtttctgtgtagccctggctggccttgaactcagaaatccgcctgcctttgcctcccaagtgctgggattaaaggtgtgcgccaccactgtccagcaggaatacctttttaaaaaacaaacaaccaaaaccaaggccacccttcttctcgcttcttgggtgaggcactggcattttggagaaactatctggcttattccagtaaagatgtggctccttgttagagaccatcatagagattaattagagcctgctgggtaagctgcagagctgatttccatccctggtacccacagtgcaatgagcatcagctcctaaaagttgtcctctgacctccacatacagtgacacactgtgataaacaaaagaatacagtagcaatcagctgctgggcagtggtggtgcacacctttaattctggcatttgggacgcagggggagggggcatcactgaatttgaggccagcctggtctacagagtgagttccaggacagccagggctacacagagaaactctggatgaaaaatcctccacctagaaagtatttgatcatttgaacttgcttcatgtatgacttatcctaacagtaacacatgcattgtacgaatatttgttttgggggttaaaatacatatttgccaggtagatttgcatattctttttttttttggaaagatttatttacttattatatgtaactacactgtactgtcttcagacactccagaagagggagtcagatctcattacgaatggttgtgagccaccatgtggttgctgggatttgaactcaggaccttcggaagagcagtcggtgctcttaaccgctgagccatctcaccaactccagggatttgtattctcttgatcttaccactcaggagaaaggtaggcaagagcttagttgagttctgggccagccctcaagaacaaaaacaattgccaggtatggtggcacacacctttaatcctagcactctggtggtagaggttggcagatatttttgggtttgaggccagtctggtctactgagcaagctccaggatagccagggctacacagtgaaattctgtcttgcaacacagaacaaaacaatatttttaaagggactataacccaaccactccatgagcacctcactggtggatctaggcaggtggcaagcctcaccccagtataccgctaaaatctgtatgtgctttttatgtggaggtccatcctgggacggacactccccagaggtgactcaggtttcttatccactaatccattatcaacgcttaagtacaccctacggggtaggctcggtacacttccactcagtggacagacaggcgatcaggaactcctgcacaccatgaagaaggaagagagaagtgcaggggggcagacgtcggtacccatcttggcccgtcctacctgtctgtctgcacgtgggaacactgtgccctgttcatgaccaaaagccaagtctaagtactacaggcaggtagactaaggacagttccatcacctgggacttaggccacgcctgaccccacagggcgcgcgctcaccaagcttcaccagtgtcactagggtgcacatggctgggcagacagcagcagcccagggctgaaccacgccccgcaatcatggttcctgcctgatggatggcactgcagggttttgctccacgaggatggaacctaggaagttaaccatggtgcctgccacacgccttctctatttaacctccattttatccctttcctttccctacctaccctacctaggtagaccaggtggtggtctgaatgagaaatgaatgccctgtagtctcaggcatcagaacacttgcaccccagttggagaggcccgggcatggcctgcttgaggaaatacgttactgggggcagactgaagtgtcaaagctaatgtcatttttaatggtctctcttgctttgcttctgccacttgctgtcatgtcccattgtcaggacagggtcttatctttctggatctatacacctaaacaaatccaaccctttccagtgtggcactgggcatggtgtttgaccacaccaactgaacactcacagggcaggctggctctccttgcacaagtcttcctgagcgttgaaatgagaggtttgcatcatcacgctcagatttctttgttttagagacagtctcactatgcagaccaggctggccttcaactcaggcaatctagtgtctctgcctccctagggctggggctaaaggcttgtttcaccaggccagaacagtggtccagcggttaggagcactgtcatctctttcagaagatctagatatcaccagcacccagaaggtgactggcagtagtctctaattccagtctctaaggactggacacactctgctggtgcttgagggcaataagcaggctccatgcatgtgcacactcacacacatgctgcacacaaacacaccaaataatgtgaagaaaaaaaaaaaaaagccgagcagtggtggtgcacacctttaatcccagcacttgggaggcagaggcaggcggatttctgagttcaaggccagcctggtctacagagtgagttccaggacagccagggctacatagagaaaccctgtctcgaaaaaccaaaaccaaaccaaaacaaacaaaaaaaaaggtacccaacctggaaagggatccaacatctctctttgaccctccccagtcctgagattacaggtgtggccatacctggctttgtggtttgcctttcatttgctcctgtgaatcagctcatgctgccagaactcacaactgccctgactttttgagtgttgggaccacaagcttgtggcagcacccaagatctcaagtcactcctcccctgccgcctctcagaggcaaggccatgtcaggtgccttgtgggaaaggggatctggatcacggcttcgtgagcaccactgagccccacctcttacctgaacccaccaagacatctgggttgcccagggtgacagcagctgtgaagtcagaaccacggtactcgccatccacctgccagttcacgaacttggactgctgggtctgtgggggaggggcagtgtgaggaccacgggggagggagcacctgtgggggtgacaggccacgtccatccagactcacctggatggccattttggacctgaggcctgggctcagctggtggatgacctgtgcattgaggctgccactattgtccatgtcacccaccagcacggggaacgcctgcgggacagagggaaggttagaggttaagcatcagtcccattggcatggtctccaccatgaagccccctcggtgctcacaccgcacccacttgggtcgtcatttcagtgacacacctgcccctggagcaagtgtgaaccctgcag

SEQ ID NO: 29 - DNA, 26901 bp, Homo sapiens
ttcactctgtcatccaggctggagtgcagtggtgcgatctcagctcactgcaacctctgcctcctgggttcaagggattcttctgcctcagcctcctgagtagccgggactataggcatccatcaccatgccctgcaattttttgtatttttagtagagaaggggtttcaccatgtcagccaggctggtctcaaacttctgacctgaagcgttctgcctgccttggccacccaaagtgctgggattacaggcatgagccactgcgcccggccttcagacccttctcactgggctgctccagtggcgaaggaacccctcactccaaataattactgggcacacaggtaatactttctgtttggatatttgtgggatgacctgatttttcatatttatcaaactaaagtcaactaaagcaatgtttatcaaagcgggttgtgacccatttgtgggtcacagcttcttaaaaaaagaaaaagccaggcgcggtggctcacgcctgtaatcccagcactttgggaggctgaggcgggcagatcacgaggtccagagatcaagaccatcctggctaacatggtgaaaccctgtctctactaaaaatacaaaaaattagccaggcgtggtggcacatgcctgtagttccagctactctagaggctgaggcaggagaatcgcttgaaccagggaggcggaggttgcagagagccgagattgtgccactgcactccagcctgggcgacagagcgagtccgtctcaaaaaacaaaaacaacaacaaaaaaaataaggctgggtgtggtggctcacgcctataatcccagcactttgggaggccgaggcaggtcagtctcttgagcgcaggagttcgagaccagcctaggcaacatggcgaaatcccatctctacaaaaaatataaaaagttatctgggcatggtggcacaaaactgtggtcccagctacttgggaggctgaggtgggaggatgacctgagcccaggagggggaggttgcagtgagctgagatcacgccagtgcactccagcctgggcgacagagcaagaccttgtctaaaaaaagaaaagaaaaagaaaaaagaacccaagttttaaaaaaagtgcaacttaaatggtggtgtttttattgcagatgtttttgttttttttgaggcagagtctctatctcctaggctggagttcagtagcacaatcttggctcactgcaacctctgcctcccaggttcaagcgattctcctgtctcagcctcctgagtagctggaattataggcgtgtgccaccacgcctggctaatttttgtatttttagtagagatggggtttcgccatgttgtccaggctgatttcaaactcctgacctcaggtgatccacccacctcagcctcccaaaatgccgggattacaggtgtgagccactaggcctggccagcaaatttttcagttaggcatgtgtgtatatatatatatatatatatatgtactataataggatgtacattgtgttttttaccgtttgaggtcataagagtttaagagcctctgatttacaggttaggaacagaatttcactctaattcaaggaaggtagtttggtttggaggtctgaagatcagtcttctaattcatcaaaatcccttcctctggcatctgcgtatgaaatggtccctatgttcaaggagctcgccatctaattgggaaggtggacacataattttttgtgaatgagtaagatgtgtgagacataagagtagcaatgataaggaaatgtggagatggaaagggctaataacttcctggtgggacccaaaatggtttcactcacctttgatctgggtgttgaaggatgtataggagtttgccaggcagaaaagaagggagatggcatatttggcagagagatcacagtggggcggggagatgggtggatttggctgggaatggtggccatgcctgtaatcccagcactttggaaggccgaagagagaaaattgctagagctcaggagtttgagaccagcctgggcaatagagtaagactttgtctctatcaaaaatttaaaaattaactgggcttggcggtgtgcacctgtggtccagctactcaggaggctgaggtgggaggattgcttgagcccaagaggttgaggctgcagtaagccgtgactgagggcttgtgaaacagcaagaacctgtctcaaaaaacagtgggcagggaggggattaatgaataggcagctacgttctgggactggagggactcgaggtggctagaaagcaagaggtactgggagacaaggctgcagacatttcttttttttttttttttttttgagacagagtctctatcgccaggctggagtgcagtggcgtgatcttcgctcactgcaacctccgactccctggttcaagcgattctcctgcctcagcctcccaagtagctgagtagctgggattacaggtgcgcaccaccacacccagctaatttttgtatttttagtaaagacggggtttcaccatgttggccaggatggtctcgatctcctgacctcgtgatctgcccgcctacggcctcccaaagtgctgggataacaggcgtgagccaccgtacctggctggctgcggacatttctatcaggccacatcctttccatcagcctgactgcaaggcttccttgcccgggagccccccagtagccgagcggggagccggcaggaagctggatggagctgtgtctccctgcacgtatgtgctccgggcctgagcccagcagaggtggtggcaggcagcctttcccatctggtttgttttggcagttccctcctgcagcctatttgtttgttgtttctactccatgttttctcactgcttgccagtggggcttccctcagtggcagttctgcagaaacagacctccacattgccactgaaggaagagtggggcctggggctcactcttttgtgtgtgggggggcgtgaaccaggctcctgcatctactagagtccatgcagggcaggtggggcagggaaccctgcctgcaggcccgaccgtagggaggctagctccagcctctgttctcctccctctactggctctccaaagtgacttccatcaaagcttgggaggccagaaacagtgagccacgtctctttgtaatcccagcactttgggaggcccaggcaggcagatcacctgaggttaggagttcaagaccagcctggccaacatggtgaaaccccgtctctactgaaaatacaaaattagctgggcgtggtggcaggcgcctgtaatcccagctactcaggaggctgaggcaggagaactgcttgaacccgggaggtggaggttgcagtgcaccaagattgtgccattgcactccagcctgggtgacagagggagactcagtctcaaaaagaaaaaagcttgaaaaacgggagaggggtgaggagatggaggcagaaggtgtgtgcaaatgcaatgccctgccctcctttttacattttatttatttatttatttattttagagacagggtctcactctgtagcctaggctggagtgcaatggtacaatcatagctcactgcaacctcaaacttctaggctcaagcaatcctgcctcagcctcccaggtagttaggactacaggcaaaaaaaaaaaaaaaagagctactattgttttctttgtttgtttatctgtttgttttgagacggagttgtgctcttgttgcccaggctggaatgcaatggcgtgatctcagctcactgcaacctccgcctcctggattcaactgattctcctgcctcagcctcctgagtagctgggattacaggcacgttccaccaagcccggctactttttgtatttttagtagaggcagggtttctccgtgtttgccaggctggtctcgaactcgtgacctcaggtgatccgcctgcctcagcctcccaaagttctgagattacaggcgtgagccactgcgcccggccaagagctagtattgtttagtatgaagccattttgctaagaaatggttttaggcttcttaataggaatggggagaagtgaaggaaggcaattttgtgtgcgtttaattctcaagtctgagttattagtagaaactaacaactgagccagactcagttgtggctcgcatagcagggaaggggacgggaccttgaaatattaagtggtttgatcaggctgatgatcctgctagagaagcccagcactttgtcccaggtgagtttctggtgcttggtcaggagttgagggaaaaatggtgtttcacaaaccctcaaaccactagagaggttggacgagaacgtgtcaattgtagttccttaggaaacagatgtccaattgcacagagatttgggatgaggcaaaggtcatcctaccagaaggaagcctgtgaaaatggccacttaaggtcccaagaccctaatgacattatgggtgtttttcagtttatgtgtttgagtttagcgctgttttctaattttggtcacgtattgtttttgtaatgagcaaaagttcatcataaaagttgctttttttttttttttgagacagagtctggctctgtcgcccaggctggagtccagtggcacaatcttggctcaccgcaacctccgcctctcgagttcaagtgattcttctgcctcagcctcctgagtagctgggactataggtgtgcgccaccatgcccagctaatttttgtatttttagcagagatggggtttcaccatattggccaggctggtcttgaactcctgacctcgtgatccgcccgtctcagcccccaaagtgctgggattacaggcgtgagccaccgtgcccggcctaagtgagctcttctgctcgtgtcttagttcatcaaccagcaaataatttttcccttttcagggaagtatatttgtctaatagcaaacaagactaatagactgagttggaaggaatctagcaggtcctgtgaaggcgaaagtccaccctctgtttgcattcttcaagtgacaagacggttgccttttcttaagggagcagaggcttgttatagaggagacagcaagccattctcctctgcatcatccatgtatccactgacccattcattcatcagatatttattagttagtggaacgggcaataaaataacttcttgaggtatctcatcagttttatttttacttatttagagatgggtcttgctcagttccccaggctcgagtgcagtggcatgatcatagctcactgcaacctcgacctcctaggttcaaatgatcatccttcctcagcctcccaagtagctgtgacaccaggcatgtgccgccatgcctggctaacttctttattttttatataaaaaatataactctataaaaaataacttctttattttttatagagccagggtctcactgtgttgccccggctggtcttgaactcctggcctcaaatgatcaccttagctttccaaagtgctgaaattataggtgtgagccacctcacccggcccctcatcagtttgataactaactccttgatcaccttacttagagaacaaaggatcagtcaggaataggcttcataaaactttggtaggccaggtgcggtaaaggattttcctttgaggactttggcaaaggattttcctttggttctccagcaggaatcccttcttcagcatctttttttttttttaagaaagggtgttgttctttcgcccaggctggagtgcagtggtgcgatcatagctaactgcagcttccaactcctgggctcaagcaatcctccaacctcagcctcccgagtagctgggactacaggcatgtgccagcatgcctaacaaattttctgtagagacagggtctccctatgttgcccagactggtctcaaactcctgggctcaagggatcctccctccttagcctcctaaagtgctgggattccaggcgtgagctaccgtgcctggccctccagcattcttgcttccttcacagttccccaaaggccacccaacaaggtccccagccacctcccctcccagcacagaaggtcttctgggcctctggctgaactcgagctgagctgagaagccactgcttggaaatgaggagggaaagagaagccaggaggccccccttcccaagtccgactccaggcagctggggctccgtgctgcctgggggtctgggacagctcggggggctgtaaatttgcttctgcttggatttccaatctgaatccactgccaggaggaatccgtggagcagagcctgcctccacacccgccatcctcctgtcacaactggcccttttcaaaccctgcctcagtggctgcctgctcaggaagtgcatggaagcttcacacgccccaggatcccagggagctgggttgaccgggggatggctcagtgccccctctaggttgggttcttctctgagcatgtagtggagggaccacataatgcaatccacacttgggtggttaccacagaaaagggacatgctggacgcttggtagacagaaaaatgcatcagaacttccatacgcagcccttcgctctcttcgatgactagggcacctgcactacgtgactccagacggtaccattcccttcagagtctctatggatgcccctgggagttgggcagtgctcatctttgacggctgtccatggcggtcctgccagtgagatgcctaagacatgtacataaatgacggcagtgccagggaaggagacgatttcctgctgggagatcaagaaaggcttcatggaggaggcgatgcacagatttgggctttaaagaaaacgaggagatggtgtgggagggtaatccaggatgagccaagggcaggaaggcacaaaccatctcctgtggtggagggagtgggagtgagcaaagcgggagaacagcctggaacatgaagtgaatggtagaccttggagggtctcagttctgaggcaataggaagccgtgacaggttcctgctcagggaattagcacaaatgaggctgttcagtgggaaagttaattgagcagcagggttagggattaactggaggggtcaatgaggagatgctctgcagtggtcctgggcctgtgggtcagcatctgctagaagatgaagagcaggcagatgacgggggtggggggcactgggcagggggatggtgggcattggtcggggagccccatggagcttcttgttttcttcctgttcctcaaggacagatgaatggaccctgcattgctcagtatccaagaggctctgggctccaaaccagcctctcccctcttagcagaattactatggcttcaagccgggtgtggtggctcacgcctgtaatcccagcactttgggaggccgaggcgggcggatcacttgaggttgggagttcgagaccagcctggccaacatggcgaaaccccatctctactgaaaatacaaaaattaccgggcgtggtggcacatgcctgtaattccagctactcgggaggctgaggcaggagaattgcttgaacccgggaggtggaggttgcagtgagctgagataatggcaccactgcactccagcctgggcaatagagtgagactccatctcaaaaagagaattactatggcttcggattgggtatggggtggaccaagatcctctcctccctcccaagctgcaatcacagctctctctccagaagccccaggggacaaggcagtcactactcctatccagcaggctacagcatttagaggctggtgcccctggcccatctctcactcctcttcaactgcagacaaggatgcagggacccccgagaagctgtgtgaggggaggggcaggtcccacagcccaaaaggctcctcctcctccagctgtgtccaccccacccatctgtctccggccccctctccatggttaggtcagggcattgacgcaggagtcagggtcctgggagagcagaggctggggaaggggagcagccaagacagaacgcacgtgcggccatgtgtggatgtgagtgtgatggtgcacgtcccaggactctggaagggatcagaaccaggagccgagtggggctgggggagcctggacagcagttttgggaaggctcaaggtgagcagaggatgcaggggagcagggtctgagggaattaggccagccagaagcataccagcctctgtctcctgacccccacccaaccatcttgccaaaccactcattttttcttttttttttttgagacagggtctccctttgttgcccagtctagagtgcagtggcgtgatcatagctcactgcagcctcaacctcccgggctcaagagatcctctgacctcagcctcctgagtagctgggactacagatgtgcaccaccatgcccagctagctaaacaaaaataaaaattatagacatgggatctcactatgttgcccaggctggtctcaaactcctggcctcaagcaatcctcctgcctcagcctcccaaaatgttgggattacaggtgtgagccactacacttggcccaaatccccctcccatcaagctcttcacctcaccacaccctcatggtccctcacccccaacaggtctttattcaagtcagtttctcagcctagtgtctctgactaccttattttagataaccctgcctgtgccttttctccttagttctggctatttgaaatcctctatcttttcttttcttttctttcttttttttttttttttttgagacagggtctcattctgttgcccagggtggagtgcagtagcaaaaccacagctcactgcagcctcaacttcctgggctgaagtgatcctcccacctcagcctcccaagtagctgggactataggcacatgccatcatgcccagctaatttttgtatttttttgtaaagatggggtttcaccatgttgcccaggctggtcaagccaactcctgggctcaagtgatcctcttgccttggcctcccgaagtgctgggattacaggcatgagccacctcacccagccaaaatcctctgtcttgtacccatttttgtgttcatcattggcaaccccactagaacatcagctccaccagggcaggcattcctggctgtatcattcactgctctatccccaggtccttggccaggggtaggtaggaaatccataaatatcttttgaatgaatgagtgaatgtttcccactctttccaaacaaaatccaaattcttcagagaggcattcaaggccatagacagcctgactcctccctaagcagcaccctggcctcatcttccacctctctcttctccatcttcccttctgctcacctgtagggagaccccctgaaactactgctacggaataaaagatgaaatgctcctgattattgtaaatacaaaattgcatgcaggattgtgtacaaacaatgccaggttggactgccagaatgagccaacagcctgtgatgtgcttccgcctgcggagagcctatgaacggacctgcagtcagggaggtttcacatcaccaagatttctatcccagaaaagcagatgttcatagctctgggaatggaatgcgacccttgtggagagcctataaacggacgcatgggggcggggggcacctgtccatatggataagatagggctataaacgccctcatcttgccatggctcttctaggcctctttagggttaaggcatactcccttctgagaatttctggtctaactggttgtctagcttcatgtcctgtttccatggattgtctgtaaccagcttttgttgcaattgttactgctgattagtatcttgctaatcataggttatggaaagattgtgtttctgttttaaggctctgttagaaattactgatgcacacactatattgtaaattcttatctctgtatactgtacttctgcatacaaatgtactgtacttctacatataaatgttatgttaaagaattaattcatccccatgtgaccatctcacctcataatcaaatgaccctaaatccctcactaacctacccccgccctcactaaacttaataataaatgatggtacatctggtgcattgttgacaccacgggaccagaaggcggtgaccccccggaccagctttcactatcttgtgtgtgtctattatttctcaacctgctgatccgcctgggaacaaagagagagccctgttgcattgcgggctgctggccagatcccgcaatactcacctgactctccattcactttgctgaatcgacaatcccccacccacctcatacctcttcccattgatgtcctaccccccttcaaggctgaggtcattgtcacctcctccctcaaatctttcttgatttctcccggctaactcttacagctcagatctacacattccagtctttttttgtttttgagacaggctctcactctgtcgcccaggctgcagtgcagtggcacgatcatggctcactacggcctcgaactcctgggctcaggtgatcctcctgccttagcctcctgcatatttgggactacaggcgtgagccaccacacctgactaattattttttatttatttatttattttagagacaaggtcttgccatgttgtccgggctggtctcgaactcctgggctcaaaggatcttcctgccttggtctcccaaagtgctgggattataggtgtcagctgcggcgcctggacctttcctgtcttttatgaaacctgaatgggataggctggtagtttcaccacacccatttgacagatgaggacattgagggctcaaggacgaggccactttctaaggtgtgagagaccagctagtcttggtctcctgctctgggaatctcactcctctggctcagggtttccagaagccataaaaccttagctgtaaatcccagcccccatcactcttggtgttagctgtatttcagtgttcttaagaactcagcaatgcagcctagctaacctacaccacaggtcaaataaacagatgtcaaggtgcatgtgtgtcctgcacaatggactgtgtgctctgtgcactaaaagttaagtgtctggggtgggggctgggtgcggtggctcacgcctgcaatcccagcactttgagaggccgaggagggtggatcacctgaggtcaggagttcaagaccggtatgggcaatatggcaacaccccatctctactaaaaatacaaaacatagccgggtgtaaaggtgtgcctgtagtcccagctgctccagaggctgaagcaggagaattgcttgaacccaggaggcagaggttgtagtgaacgggagatggcaccactgcactgcctgggcaacatagggaggctacatctccagaaaaaaaaaaaaaagttaagtgtctgggtttgcagagtactagacggtgaggagtgaggtggggaggaagaaccccaaatttcttgccctatttgcccccatcaaattcctcaacatggtcaacattgtttctagaacatgtcctgggattgtgggaagggagaccactcatttgcccctccctaaagcttctgggcttccagacccagctactttgcggaactcagcaacccaggcatctctgagtctccgcccaagaccgggatgccccccaggggaggtgtccgggagcccagcctttcccagatagcacgctccgccagtcccaagggtgcgcaaccggctgcactcccctcccgcgacccagggcccgggagcagcccccatgacccacacgcacgtctgcagcagccccgctcacgccccggcgagcctcaacccaggcgtcctgcccctgctctgaccccgggtggcccctacccctggcgacccctcacgcacacagcctctcccccacccccacccgcgcacgcacacatgcagataacagccccgacccccggccagagccgcagagtccctgggccaccccggccgctcgctgcgctgcgccgcaccgcgctgtcctcccggagccggaccggggccaccgcgcccgctctgctccgacaccgcgccccctggacagccgccctctcctccaggcccgtggggctggccctgcaccgccgagcttcccgggatgagggcccccggtgtggtcacccggcgcgccccaggtcgctgagggaccccggccaggcgcggagatgggggtgcacggtgagtactcgcgggctgggcgctcccgcccgcccgggtccctgtttgagcggggatttagcgccccggctattggccaggaggtggctgggttcaaggaccggcgacttgtcaaggaccccggaagggggaggggggtggggcagcctccacgtgccagcggggacttgggggagtccttggggatggcaaaaacctgacctgtgaaggggacacagtttgggggttgaggggaagaaggtttgggggttctgctgtgccagtggagaggaagctgataagctgataacctgggcgctggagccaccacttatctgccagaggggaagcctctgtcacaccaggattgaagtttggccggagaagtggatgctggtagctgggggtggggtgtgcacacggcagcaggattgaatgaaggccagggaggcagcacctgagtgcttgcatggttggggacaggaaggacgagctggggcagagacgtggggatgaaggaagctgtccttccacagccacccttctccctccccgcctgactctcagcctggctatctgttctagaatgtcctgcctggctgtggcttctcctgtccctgctgtcgctccctctgggcctcccagtcctgggcgccccaccacgcctcatctgtgacagccgagtcctggagaggtacctcttggaggccaaggaggccgagaatatcacggtgagaccccttccccagcacattccacagaactcacgctcagggcttcagggaactcctcccagatccaggaacctggcacttggtttggggtggagttgggaagctagacactgcccccctacataagaataagtctggtggccccaaaccatacctggaaactaggcaaggagcaaagccagcagatcctacggcctgtgggccagggccagagccttcagggacccttgactccccgggctgtgtgcatttcagacgggctgtgctgaacactgcagcttgaatgagaatatcactgtcccagacaccaaagttaatttctatgcctggaagaggatggaggtgagttcctttttttttttttttcctttcttttggagaatctcatttgcgagcctgattttggatgaaagggagaatgatcgagggaaaggtaaaatggagcagcagagatgaggctgcctgggcgcagaggctcacgtctataatcccaggctgagatggccgagatgggagaattgcttgagccctggagtttcagaccaacctaggcagcatagtgagatcccccatctctacaaacatttaaaaaaattagtcaggtgaggtggtgcatggtggtagtcccagatatttggaaggctgaggcgggaggatcgcttgagcccaggaatttgaggctgcagtgagctgtgatcacaccactgcactccagcctcagtgacagagtgaggccctgtctcaaaaaagaaaagaaaaaagaaaaataatgagggctgtatggaatacattcattattcattcactcactcactcactcactcattcattcattcattcattcaacaagtcttattgcataccttctgtttgctcagcttggtgcttggggctgctgaggggcaggagggagagggtgacatgggtcagctgactcccagagtccactccctgtaggtcgggcagcaggccgtagaagtctggcagggcctggccctgctgtcggaagctgtcctgcggggccaggccctgttggtcaactcttcccagccgtgggagcccctgcagctgcatgtggataaagccgtcagtggccttcgcagcctcaccactctgcttcgggctctgggagcccaggtgagtaggagcggacacttctgcttgccctttctgtaagaaggggagaagggtcttgctaaggagtacaggaactgtccgtattccttccctttctgtggcactgcagcgacctcctgttttctccttggcagaaggaagccatctcccctccagatgcggcctcagctgctccactccgaacaatcactgctgacactttccgcaaactcttccgagtctactccaatttcctccggggaaagctgaagctgtacacaggggaggcctgcaggacaggggacagatgaccaggtgtgtccacctgggcatatccaccacctccctcaccaacattgcttgtgccacaccctcccccgccactcctgaaccccgtcgaggggctctcagctcagcgccagcctgtcccatggacactccagtgccagcaatgacatctcaggggccagaggaactgtccagagagcaactctgagatctaaggatgtcacagggccaacttgagggcccagagcaggaagcattcagagagcagctttaaactcagggacagagccatgctgggaagacgcctgagctcactcggcaccctgcaaaatttgatgccaggacacgctttggaggcgatttacctgttttcgcacctaccatcagggacaggatgacctggataacttaggtggcaagctgtgacttctccaggtctcacgggcatgggcactcccttggtggcaagagcccccttgacaccggggtggtgggaaccatgaagacaggatgggggctggcctctggctctcatggggtccaagttttgtgtattcttcaacctcattgacaagaactgaaaccaccaatatgactcttggcttttctgttttctgggaacctccaaatcccctggctctgtcccactcctggcagcagtgcagcaggtccaggtccgggaaacgaggggtggagggggctgggccctacgtgctgtctcacacagcctgtctgacctctcgaccctaccgggcctgaggccacaagctctgcctacgctggtcaataaggtggctccattcaaggcctcaccgcagtaaggcagctgccaaccctgcccagggcaaggctgcagtgcgctgagattgtcatcaaggagagggaggccagaggacgggtccttttgggagttttgggggctggtaacagctgccaaccctggtcactggcccttgttaatttctgcctcttctttggtctcttcggctgatgccacactcccagcatcagccttccgcctcaatgcacatcctcgctaagtccagctgcctcctttactcacctggggactgtcaccatgaatactcgcctctgaaattcacaaaaggggcggtacacacaggtgcggttggagccacctctataaacagcatctgctcggggacaagggccactctaggtggtccatttatatatttgtgattttgtttgtttgtttgtttttagtgacagtgtcttgctctgttgcccaggctggagtgcagtggtgcaatcatgggtcactgcagcctcaaactcctgggctcaagcaatcctctagtcccagcctcatgagtagatgtgactaaaggcatgcatcgccatgccctgctaatttttaaattatttttatcttattttttttagagatggggtcttgctatgttgcccaggctggtctcaaactctgggttcaagtgatcctccctccttagcctcccaaagtgctgggattataggtgtgagccattgcgcctggtttattccttctacctaatccctacctgctcctttactcccctggggtgggggacatggaacaaatgaactctacttccactcttgatttctacttctcattttcccctttactctgaccacaacttcagattccttctcaaaaataatgcttcagcgggaaaggaccactgaggagggacctgtgcagacagcaaaagctgtcataaaactgtatgggaggccaggcacggtggctcatgcctgtaatcccagcactttgggaggctgaggtgggtggatcatctgaggtcaggtgtttgagaccagcctggccaacgtggtgaaaccccatgtctactaaaaatacaaaaaattagccgggtgtggtggtgggctcctgtaatcccagctattctggaggctgaggcaggagaatcactgaacctgggaggcggaggttgcagtgagccgaggtcgtgccactggactccagcctgggcgacaagagcgaaactctgtctcaaaaacaaaacaaaaacaaacaaacaaaaacaactgtatgggaccccgatcctggttgttatcccatatgtgagggccggtctttctgcttgtatcatcaactgtagagaagtcagcctgtgttcccctgcacatatgcaaacgggagagaatgttttgcaatccgcagcaggaaaaattacgggaaggttttggaggttggagggtacttgacaggtgtgtagggagcggggcggtaggtgtggagctgggatgcgaggagtcgccaaaggggaggacccaagagaattttccctctgttctaaccggctcgtgggctacagtgccctcttcaggtcttactaggaactgctagagaaacctacaagcgatagatccttagggctctgaccttgtacatttcttttcttttcttttcttttcttttttttcaatggagtctcactctgtcactcaggctggagtgcagtggcgcgatctcggctcactgcaacctccgcctcccgggttcaagcgattctcctgcctcagcctcccgagtagctgggactacagacgcctgctaacacacctggctaattttttgtatttttagtagagatggagtttcaccaggtcgaccaggctggtctcaaactcctgagctcagaggatccgcccacctcggcctcccaaagtgttgggtttacaggcgtgagccaccgcgcccggctgtgaccttgtacatttcaatacacatttatattgtggtttccacagatggcatttgattcttgcaccaggaatgctgtgagtcagtaaaggagaaatctccctcttaggctgctgacatcggagctaagaggcttgttcttaagccgaaggaatctggctaataagagactgagctagaacctgagcacaggatttaggactcctaatcccaaaggctgtccacctcttagcctgatttgtagtctaaggctcaaacatctcatcaatgagcaacccgcttttgcctccctcctctccgtctgcaggattcagggtcactgatcttattccacaactgtcttcagacttctcactgctttcagtttctaaaatataataaaaaaatagtaattttcaaccagatgttgtggctcacgcctgtaatcccagcactttgggaggctgaggtgggaggatcccttgagctcaggagtttgagaccaccctgggcaacatagtgagacccccatctctacaaaaaaatttaaacattagctggatgtggtggcatgcagctgtagtgccagctactcaggaggctgaggtgggagaatcactcaagcctgggaggttgaggctgcagtgagctgtgatcacaccactgcattctagcctgggtgacagagcaagatcccatcccctcccccacaaaaagagtagttatcaaacctgaactgtctgaccactcctgggatggatgtgagaggcaagtacgttagaaacatttaaaacatttattccaagtttatagaatggctactgtgaaccaagcctttgcactaagtgctaggagacatgaaatgacactcatagcccagtggccagtgggcagcctcctgggggcaaaaaaaggcacacattaattcattttattttatttatttattttttgagacagggtcttgttgtgtcacccaggctggagggcagtggcacaatctcagctcactgcaacctccacctcctgggttcaagcaattcttgtgcctcagcctcccgagtagctgggattacaggcacatgccaccacacccggctagtttgtgtgtgtgtgtttgtgtttttttgtttgtttgtttttgttttgttttttggtagagatggggtttctccatgttggccagcctggtctcgaactcctgatctcaggtgatccactcatcagtctcccaaaatgctgggattacatgcatgagccactgcacctggccttgacgcacattaattcagacgtagtcattttggtatgggactgagtgctaagctgtgcaatgccaagaggccggggaagggaagaaccacaggatttagaagaactaagcgaggcccagagtctgtgctgagaggcagattcccaaggagggtgttgccagatttcagaggttcttcgagtgcaggccaggaaaggaactttcctctgaactgtgatcatggttataattaacaacacattcaatctgtggcatctgcatgctgcgattctcacccgaactccacgaagcaggaatacaatgagtatcatccccatttgtcagatggggaactaagttctgctggaaagtgacagagccaacacttttgactttctggtggggacaggagccagcaaagcctagttctgagtcaaggggttacataattgtttaaagatgatgccttctgtttgtagagagcttggctatttacatgaaaagcatgtgatttcctggcatgcttttcatttgctctcctaacgccaagaggaaggcagggatgatggagggtccccattttgcagaggaggaaactgaggcccaaagagattatgggccttgcccaggtcataaaacacggagatggggctggacgaagtggctcatactagtaatcccagcactttgggagactgaggcaggaggagggcttgagcacaagagttccagactggccccagaaacatagggagaccctgtctctaaaaaaaattttaaagcagtggggcatgatggtgtgcacctgtaggcccagcagaagcaggagggatcacttgaacccagggatttgagactgcattgagctatgattgcagcgctgcactccagccagggtgacagagcaagaccctggctcaaaagagagaaaaaaaaaaagtccgggtgtggtagctcaagtctgtaatccctgcactttgggaggccaaggtgggtggatcacttgaggtcaggaatttgagaccagcctggccaacatggtgaaaccccatctctactaaaattacaaacattagccaggtgtggtggtgcatgcctgtaatcccagctacttgggaggcagaggcacgaggattgcttgaacctgggaggcagaggttgcagtgagctgagagatcgagtcactgcactccatcttgagcaacaagagcgagactccgtctcaaaaagaaaaaaaaaagagagagagagagagtcccttttctctctgacccaggatcaccagggagaggaaagagaagagatggagtgaatgagacagctgtggtcagcaaggcgtgtccatcttccacgaccgactccttcccattcaatcccctgccttgggatcctgcttcttccctgcataggcagaaagtacctaccaacttcccttcttcccaactccctgctctgagtactgcgctaggagccaactcagccacctcctgcagccccagctctccatcttaactgcagcctctcgctcttgggtactcactgactcaaatcctccctctgggcccaagcatcaggctgaacaaagacctgtccctagttcacaggtcacctaggattctttttttttttctttgagatggggtttcgctcttgttgcccaggctggagtgcaatggcgcgatctcagctcactgcaaactttgcctcccgggttcaaatgattctcctgcctcagcctcctgagtagctgggattacaggcatgtgccaccacacctggttaattttgtatttttagtacagacagggtttctccgtgttggtcaggctggtctcgaaccccgacctcaggtgatccacctgcctcaacctcccaaagtgctgggattacaggcgtgagccactgtgcctggccagtcacctagggttctgctggaactactgaactgtagttcagtaggtgatcttaccacagtagggtttgttgctggagttgcattagctaaacagggtcttttagacactggaatctaagctgaaggctaataatattatttgaagatggtgaaagttaattctactaaaattccatcataaaactgtggcattgtgaaggattgttggcaacaaataaatagacgatagtatagtttctcaatttatgggagtcatggccaaatgtctctaaactcccttctttatttaagaaaattgattattaaaaatggccagtggttcacgcctgtaatcccaacactttggggggccaaggtgggcggatcacctgaggtcaggagttcgagaccagcctgaccaacatggtgaaatcccgtctctactaaaaataaaaaattagctgggtgtggtggtgcatgcctgtaatcccagctagttggaaggttgaggcaggagaattgcttgaacctgggaggcggaggttgcagtgagccaagatcgtaccattgcactccagcctgggcaacaagggcaaaacaagataaaaaaaaaattacgtgaccgggcgcggtgatgtacacttgtaataccagcactgtgggaggccaaggtgagaggatcacttgaggctggtagtttgagaccagcctagtcaacatagtgagatccctgtttctataaaaaatttgctgggctactaaaaaatagactgtagttccaactacttgggaggctgaggttgtagtgagctatgattgagccactgaactctaacctgggtgatagagcaagacactgtctcaaaaaaaaaagtgactgccacacataaatttctttcttttattattattattattattattttttgagacagagtctcactctgtcacccaggctggagtgcagtggtgcgatctcggctcactgcaacctacccctcctgggttcaagagattctcctgcctcagcctcctgagtagctgggactacaggtgcgcaccaccatgcccagctaattttgtatttttagtacatacggggtttcaccatgttggccaggctgatcttgaactcctggcctcaggtgatctgcccaccttggcctcccaaagtgttgggattataggtgtgagccactgcacccagccaacatcatagatttctggctttaaaaaaatcttggctgtactgattgagcctcctccccaatcttacagaggaaggaactaagacacagagagggtgagaaaagttcccaaagacacacagcaaatttaggactgggctccagttctctcaagggcttttccacagcccaaggtctctcacacctgttcccacagctgccagtcttgtcaaggttgccagtctctggggcgttgctggttcctggctccctaaaatacagggcccaagggtcctcccccactttcctgtcctgccgtgagccccccacccccacttccagacggattgggagctgtgacccccagctctgtggtcccaaagggaggtcagctaaagcagctaccaggggacttattgcccaacagggagtggctatgatcaatgtcttctgctcctcttccctgggttaaccatttcctggccctggcccctctgttaattcctctgctaacctggtatggaggaagggtggacaagggcttgggatggacaccattgatatccccaggtctgacataaacaggcaggggggtgctctcagtcctcagatgtgatccctgcctgagctctgttggcattccatggcgaggctcttcagcctcatttgggcagaagcggtcctggggattgcaaaagggctttctttttcttttatttatttctttttagaaacagagtctccttgtgttgcccaggctggagtgcaatggtacaatcatagctcactgcagccttgaactcctgggctcaggcgaccctcccgcctcagccttctttgtaactggaactacaggtgtgcaccaccatgcttagataatttttgtattttttgtgtagagggtgggttctcgctatgttgcccaagctggtctcgaactcctgggctcaagcaatcctcctaccttggcctcccaaagttctgggattacaggcacaagccaccgcgcccggccatttcttttcttttcttttcttttcttttcttttcttttcttttcttttctttttgagacagatttttgctcttgttgcccaggctggagtgcaatggcgcgatcttggctcactgcaacctctgcctcccaggttcaagcaattctcctgcctcagcctcccgagtagctgggagtacaggcatgcaccaccatgcccaactaattttttgtatttagtagagatggagtttcaccatgttagttaggctagtcttgaactcctgacctcaagtgatctgtcaacctcggcttcccaaagtgctgggattacaggcatgagccaccgtgcccggcctccggccatttcttaatatgatccaattacatacctactgataaatatttatcataacttttcctattgtaaacaatgttgcaattaatatctttgggtatccgcaaatttgtgcaaagtgcatgtatttctgtagcaagtttcctagaaatgttaggtcaaagatatgcacatttgaaagttcaacagtcattgtcaaatgccttctaagaagttttctggccaggcactgtggctcacacctgtaatcccaacactatgggaggccaaggtgggtggatcacctgaggtcagaagttcgagaccagcctgaccaacatgatggaaccccatctccactaaaaatacaaaattagccgggtgtgatggcacatgcctgttaatcccagctacttgggaggctgaggcaagagaattgcttgaactcgggaggtggaggtttgcagtgagctgagattgtgccattgctctctaggctgggttgactcctcccccaaaacaaacaaacaaaccaaaaaacaaatgccttctaagaagttttcaccggctgggcacagtggctcatgtttgtaatctcagcactttgggaggctgaggcaagcggatcactggagcccaggagtttgagaccagcctgggcaacatagtgagaccctatctctacaatacaagcaagcaaaaaaaacaaacagaaattagctaggcatggtggcttgtgcctgtaatcccagacaccccgggaggctgaggtgggagaactgcttgagcctgggaggttgagactgcagtaagctgtgacggcaccactgcactccagcctgggcaacagagtgagacgctgtctcaaaaaaaaaaaaaaagttttcaccaacattctttttttgttttgttttgagacagggtctcgctctgttgctctggctggagtacagtggcttgatcatagctcactgcagccttgaacgcgtaagtcctcccgcctcaacctcacaaccagctgggacctacaggcacatactgccatgcttggttaatttttaaattttttgtagagacagggtctcactgttttgcccaggctggtctctagcctcaagcggtcctaccatctcggcctccaaaaagcacttgggattaccagcatgagccactgcacctggccaccaacctacagtcttatcatcactgagttcgtatctacctgcatcctgtccaatactccgtactaccaatctttcaaatttttgtcggctgggcacagtggctcatgcctgtaattccagcactttggaaggccaaggcaggcagactgcttgagcccaggagtttaagaccagcccgggagacatggcaaaaccccatttctgcaaaatatacaaaaattagctgggcttggtggcatgcactggtagtcccagctactccagaggctaagatgggaagatcacctgaccccgggggtttgaggctgtaatgagccaagtcatgctgctgcgctccagcctgggtgacagaacgaggccctgtctcaaaaaaaagaaaaaaaaatttttttttggtcaatataagagtcatagttttgattagcatttcccttattactagtgaagcagaacagcttttcaaatgtttgctgcctgtttgtatctcttcctctgtgacttatctttctccgtgatttgccagtaggcatttgcagtcctttttttcttttttttttgacttggagtctcgcgatctcggctcactacaacctccgcctaccaagttcaagtgattcttgcgcctcagcctcctgagtagctgggattatgagcatgtgccaccacccctagctaattttttgtatttttagtagagatggggttttgccatgttggccaggctggtctcgaactcctgacctcaagtgatccacccgccttggcctcccaaatgctgggattacaggtgtgagccaccacgtccagccgtttgcagtccttccttcacctaactctccagttgccactgttgccagttatagaattttaggtttgaaatggttttctgttggaattctgcagacaatgttccactggctcttagactccatggttgctattgaaaagctggatgccatgttgatttctgatccttggtatatgacttgttattttctatctgaaagtgtttcagatcttctcttcacccctgatagtctgaagtccagtgcttccatgggtctctatgctttcatcaccctggacacctttttaatctagagacttgtatatttcagttctggatattttcttgtgcgtttttctttttaaaataataatttcttttcctttgttctctctttttgaactcctttcgtttgaggttagacttcctggattgatcctccaaacctgtttcctttttgtttctttctctttttttttctcttctctctagtttatttccctcgatttcaatctacgatgcttctactggatggtaactttcaactctcataattttaatttcccagagcttttctgtgtttctctgttcattcttcatggcatccttggaaggatgccaagctaaggaggccaggggggaataaaaggagtccaggctcccaactgtgcccttcccctctcccctgggagcaaccacttagggtcctcatggttcctccagtctggactctgctgcttctggtgggggctgcccttttcaggtaagctgggcccagggggtaatgataaaccagggtcagctgagggtggctgtaaggaatatggaaggacagagctggagggggcgagcaggctaactacaaaagatctggagagaggccaggcacggtggctcacgcctgtaatcccagcactttgggaggctgaggtgggcagatcacgaggtcaggagatcgagaccatcctggccaacatggtgaaacctcgtctctactaaaaatacaaaaaattagccaggcgtggtggtgtgcacctgtagtcccagctacccaggaggctgaggcaggagaatcgcttgaacctgggaggcggagtttgcagtgagctgagatcatgccattgcactccagcctggatgacagagcgagactccgtctcaaaaaaaaaaaaacaaaaaaaaagaccttgagaggaagggggaaacccggtgggatggaaatgggttgaccttgactgctgaacaggaattaaggggcgggttctgggagcgggacagggctacaatgtgagaagggacggaggaggtgcagagctggaagacagatctaagcctaggagagaaggattgaggggtcaggccctcaggaaacggacaagacccagggtggacccagctgatgagagagacttaagtacgaggcagcaaagaaatgacggatgacaggccaagcgcggcggctcacccctgtaatcccagcactttgggaggccgaggcgggcggatcacctgaggtcaggtgttgagaccagcctgaccaacatggtgaaaccctgtctctactaaaaatataaaattagccaggcatggtggtgcatgcctgtaatcccagctacttgggaggctgaggcaggagagtcacttgaacccgggaggcggagactgcagtgagcggaaattgcaccattgcactccagcctgggcaacaagagcaaaactccatctcaaaagaaaaaaaaaaagaaatgatggatgtcttggtgtcctgcagtgtgtttgggagaatttgaacaagtagaacttcaacaacaacaaaaaacagagggctgagcacagtggctcccaccggtaatcccagcactttgggaggccaaagtgggaggattgcataaggccaggaggtcatgaccagcctgtgcaacatagaaagaccccatctctataaaaaataaaaataaattagctgggcgtggtggcatgctcctgtagtcccagctactggggaggttgaggtgggaggattgctggagcccagaggtttgaggctgcagtgagctgtgattgtatcactgcactctagcctgggtgccggaaaaaaaaaaaaagaaaagaaaaaaagaaaaaaagtcaagtcagacacattcactgcataaacactgatcatccttacgtgaccactcagaaagctcacagtcactgaatcttataattcttgataatgacacgagttgcatttttgctt

SEQ ID NO: 30 - DNA, 26901 bp, Homo sapiens
aagcaaaaatgcaactcgtgtcattatcaagaattataagattcagtgactgtgagctttctgagtggtcacgtaaggatgatcagtgtttatgcagtgaatgtgtctgacttgactttttttctttttttcttttctttttttttttttccggcacccaggctagagtgcagtgatacaatcacagctcactgcagcctcaaacctctgggctccagcaatcctcccacctcaacctccccagtagctgggactacaggagcatgccaccacgcccagctaatttatttttattttttatagagatggggtctttctatgttgcacaggctggtcatgacctcctggccttatgcaatcctcccactttggcctcccaaagtgctgggattaccggtgggagccactgtgctcagccctctgttttttgttgttgttgaagttctacttgttcaaattctcccaaacacactgcaggacaccaagacatccatcatttctttttttttttcttttgagatggagttttgctcttgttgcccaggctggagtgcaatggtgcaatttccgctcactgcagtctccgcctcccgggttcaagtgactctcctgcctcagcctcccaagtagctgggattacaggcatgcaccaccatgcctggctaattttatatttttagtagagacagggtttcaccatgttggtcaggctggtctcaacacctgacctcaggtgatccgcccgcctcggcctcccaaagtgctgggattacaggggtgagccgccgcgcttggcctgtcatccgtcatttctttgctgcctcgtacttaagtctctctcatcagctgggtccaccctgggtcttgtccgtttcctgagggcctgacccctcaatccttctctcctaggcttagatctgtcttccagctctgcacctcctccgtcccttctcacattgtagccctgtcccgctcccagaacccgccccttaattcctgttcagcagtcaaggtcaacccatttccatcccaccgggtttcccccttcctctcaaggtctttttttttgtttttttttttttgagacggagtctcgctctgtcatccaggctggagtgcaatggcatgatctcagctcactgcaaactccgcctcccaggttcaagcgattctcctgcctcagcctcctgggtagctgggactacaggtgcacaccaccacgcctggctaattttttgtatttttagtagagacgaggtttcaccatgttggccaggatggtctcgatctcctgacctcgtgatctgcccacctcagcctcccaaagtgctgggattacaggcgtgagccaccgtgcctggcctctctccagatcttttgtagttagcctgctcgccccctccagctctgtccttccatattccttacagccaccctcagctgaccctggtttatcattaccccctgggcccagcttacctgaaaagggcagcccccaccagaagcagcagagtccagactggaggaaccatgaggaccctaagtggttgctcccaggggagaggggaagggcacagttgggagcctggactccttttattcccccctggcctccttagcttggcatccttccaaggatgccatgaagaatgaacagagaaacacagaaaagctctgggaaattaaaattatgagagttgaaagttaccatccagtagaagcatcgtagattgaaatcgagggaaataaactagagagaagagaaaaaaaaagagaaagaaacaaaaaggaaacaggtttggaggatcaatccaggaagtctaacctcaaacgaaaggagttcaaaaagagagaacaaaggaaaagaaattattattttaaaaagaaaaacgcacaagaaaatatccagaactgaaatatacaagtctctagattaaaaaggtgtccagggtgatgaaagcatagagacccatggaagcactggacttcagactatcaggggtgaagagaagatctgaaacactttcagatagaaaataacaagtcatataccaaggatcagaaatcaacatggcatccagcttttcaatagcaaccatggagtctaagagccagtggaacattgtctgcagaattccaacagaaaaccatttcaaacctaaaattctataactggcaacagtggcaactggagagttaggtgaaggaaggactgcaaacggctggacgtggtggctcacacctgtaatcccagcatttgggaggccaaggcgggtggatcacttgaggtcaggagttcgagaccagcctggccaacatggcaaaaccccatctctactaaaaatacaaaaaattagctaggggtggtggcacatgctcataatcccagctactcaggaggctgaggcgcaagaatcacttgaacttggtaggcggaggttgtagtgagccgagatcgcgagactccaagtcaaaaaaaaaagaaaaaaaggactgcaaatgcctactggcaaatcacggagaaagataagtcacagaggaagagatacaaacaggcagcaaacatttgaaaagctgttctgcttcactagtaataagggaaatgctaatcaaaactatgactcttatattgaccaaaaaaaaatttttttttcttttttttgagacagggcctcgttctgtcacccaggctggagcgcagcagcatgacttggctcattacagcctcaaacccccggggtcaggtgatcttcccatcttagcctctggagtagctgggactaccagtgcatgccaccaagcccagctaatttttgtatattttgcagaaatggggttttgccatgtctcccgggctggtcttaaactcctgggctcaagcagtctgcctgccttggccttccaaagtgctggaattacaggcatgagccactgtgcccagccgacaaaaatttgaaagattggtagtacggagtattggacaggatgcaggtagatacgaactcagtgatgataagactgtaggttggtggccaggtgcagtggctcatgctggtaatcccaagtgctttttggaggccgagatggtaggaccgcttgaggctagagaccagcctgggcaaaacagtgagaccctgtctctacaaaaaatttaaaaattaaccaagcatggcagtatgtgcctgtaggtcccagctggttgtgaggttgaggcgggaggacttacgcgttcaaggctgcagtgagctatgatcaagccactgtactccagccagagcaacagagcgagaccctgtctcaaaacaaaacaaaaaaagaatgttggtgaaaactttttttttttttttgagacagcgtctcactctgttgcccaggctggagtgcagtggtgccgtcacagcttactgcagtctcaacctcccaggctcaagcagttctcccacctcagcctcccggggtgtctgggattacaggcacaagccaccatgcctagctaatttctgtttgttttttttgcttgcttgtattgtagagatagggtctcactatgttgcccaggctggtctcaaactcctgggctccagtgatccgcttgcctcagcctcccaaagtgctgagattacaaacatgagccactgtgcccagccggtgaaaacttcttagaaggcatttgttttttggtttgtttgtttgttttgggggaggagtcaacccagcctagagagcaatggcacaatctcagctcactgcaaacctccacctcccgagttcaagcaattctcttgcctcagcctcccaagtagctgggattaacaggcatgtgccatcacacccggctaattttgtatttttagtggagatggggttccatcatgttggtcaggctggtctcgaacttctgacctcaggtgatccacccaccttggcctcccatagtgttgggattacaggtgtgagccacagtgcctggccagaaaacttcttagaaggcatttgacaatgactgttgaactttcaaatgtgcatatctttgacctaacatttctaggaaacttgctacagaaatacatgcactttgcacaaatttgcggatacccaaagatattaattgcaacattgtttacaataggaaaagttatgataaatatttatcagtaggtatgtaattggatcatattaagaaatggccggaggccgggcacggtggctcatgcctgtaatcccagcactttgggaagccgaggttgacagatcacttgaggtcaggagttcaagactagcctaactaacatggtgaaactccatctctactaaatacaaaaaattagttgggcatggtggtgcatgcctgtactcccagctactcgggaggctgaggcaggagaattgcttgaacctgggaggcagaggttgcagtgagccaagatcgcgccattgcactccagcctgggcaacaagagcaaaaatctgtctcaaaaagaaaagaaaagaaaagaaaagaaaagaaaagaaaagaaaagaaaagaaatggccgggcgcggtggcttgtgcctgtaatcccagaactttgggaggccaaggtaggaggattgcttgagcccaggagttcgagaccagcttgggcaacatagcgagaacccaccctctacacaaaaaatacaaaaattatctaagcatggtggtgcacacctgtagttccagttacaaagaaggctgaggcgggagggtcgcctgagcccaggagttcaaggctgcagtgagctatgattgtaccattgcactccagcctgggcaacacaaggagactctgtttctaaaaagaaataaataaaagaaaaagaaagcccttttgcaatccccaggaccgcttctgcccaaatgaggctgaagagcctcgccatggaatgccaacagagctcaggcagggatcacatctgaggactgagagcacccccctgcctgtttatgtcagacctggggatatcaatggtgtccatcccaagcccttgtccacccttcctccataccaggttagcagaggaattaacagaggggccagggccaggaaatggttaacccagggaagaggagcagaagacattgatcatagccactccctgttgggcaataagtcccctggtagctgctttagctgacctccctttgggaccacagagctgggggtcacagctcccaatccgtctggaagtgggggtggggggctcacggcaggacaggaaagtgggggaggacccttgggccctgtattttagggagccaggaaccagcaacgccccagagactggcaaccttgacaagactggcagctgtgggaacaggtgtgagagaccttgggctgtggaaaagcccttgagagaactggagcccagtcctaaatttgctgtgtgtctttgggaacttttctcaccctctctgtgtcttagttccttcctctgtaagattggggaggaggctcaatcagtacagccaagatttttttaaagccagaaatctatgatgttggctgggtgcagtggctcacacctataatcccaacactttgggaggccaaggtgggcagatcacctgaggccaggagttcaagatcagcctggccaacatggtgaaaccccgtatgtactaaaaatacaaaattagctgggcatggtggtgcgcacctgtagtcccagctactcaggaggctgaggcaggagaatctcttgaacccaggaggggtaggttgcagtgagccgagatcgcaccactgcactccagcctgggtgacagagtgagactctgtctcaaaaaataataataataataataataaaagaaagaaatttatgtgtggcagtcacttttttttttgagacagtgtcttgctctatcacccaggttagagttcagtggctcaatcatagctcactacaacctcagcctcccaagtagttggaactacagtctattttttagtagcccagcaaattttttatagaaacagggatctcactatgttgactaggctggtctcaaactaccagcctcaagtgatcctctcaccttggcctcccacagtgctggtattacaagtgtacatcaccgcgcccggtcacgtaattttttttttatcttgttttgcccttgttgcccaggctggagtgcaatggtacgatcttggctcactgcaacctccgcctcccaggttcaagcaattctcctgcctcaaccttccaactagctgggattacaggcatgcaccaccacacccagctaattttttatttttagtagagacgggatttcaccatgttggtcaggctggtctcgaactcctgacctcaggtgatccgcccaccttggccccccaaagtgttgggattacaggcgtgaaccactggccatttttaataatcaattttcttaaataaagaagggagtttagagacatttggccatgactcccataaattgagaaactatactatcgtctatttatttgttgccaacaatccttcacaatgccacagttttatgatggaattttagtagaattaactttcaccatcttcaaataatattattagccttcagcttagattccagtgtctaaaagaccctgtttagctaatgcaactccagcaacaaaccctactgtggtaagatcacctactgaactacagttcagtagttccagcagaaccctaggtgactggccaggcacagtggctcacgcctgtaatcccagcactttgggaggttgaggcaggtggatcacctgaggtcggggttcgagaccagcctgaccaacacggagaaaccctgtctgtactaaaaatacaaaattaaccaggtgtggtggcacatgcctgtaatcccagctactcaggaggctgaggcaggagaatcatttgaacccgggaggcaaagtttgcagtgagctgagatcgcgccattgcactccagcctgggcaacaagagcgaaaccccatctcaaagaaaaaaaaaaagaatcctaggtgacctgtgaactagggacaggtctttgttcagcctgatgcttgggcccagagggaggatttgagtcagtgagtacccaagagcgagaggctgcagttaagatggagagctggggctgcaggaggtggctgagttggctcctagcgcagtactcagagcagggagttgggaagaagggaagttggtaggtactttctgcctatgcagggaagaagcaggatcccaaggcaggggattgaatgggaaggagtcggtcgtggaagatggacacgccttgctgaccacagctgtctcattcactccatctcttctctttcctctccctggtgatcctgggtcagagagaaaagggactctctctctctctcttttttttttctttttgagacggagtctcgctcttgttgctcaagatggagtgcagtgactcgatctctcagctcactgcaacctctgcctcccaggttcaagcaatcctcgtgcctctgcctcccaagtagctgggattacaggcatgcaccaccacacctggctaatgtttgtaattttagtagagatggggtttcaccatgttggccaggctggtctcaaattcctgacctcaagtgatccacccaccttggcctcccaaagtgcagggattacagacttgagctaccacacccggactttttttttttctctcttttgagccagggtcttgctctgtcaccctggctggagtgcagcgctgcaatcatagctcaatgcagtctcaaatccctgggttcaagtgatccctcctgcttctgctgggcctacaggtgcacaccatcatgccccactgctttaaaattttttttagagacagggtctccctatgtttctggggccagtctggaactcttgtgctcaagccctcctcctgcctcagtctcccaaagtgctgggattactagtatgagccacttcgtccagccccatctccgtgttttatgacctgggcaaggcccataatctctttgggcctcagtttcctcctctgcaaaatggggaccctccatcatccctgccttcctcttggcgttaggagagcaaatgaaaagcatgccaggaaatcacatgcttttcatgtaaatagccaagctctctacaaacagaaggcatcatctttaaacaattatgtaaccccttgactcagaactaggctttgctggctcctgtccccaccagaaagtcaaaagtgttggctctgtcactttccagcagaacttagttccccatctgacaaatggggatgatactcattgtattcctgcttcgtggagttcgggtgagaatcgcagcatgcagatgccacagattgaatgtgttgttaattataaccatgatcacagttcagaggaaagttcctttcctggcctgcactcgaagaacctctgaaatctggcaacaccctccttgggaatctgcctctcagcacagactctgggcctcgcttagttcttctaaatcctgtggttcttcccttccccggcctcttggcattgcacagcttagcactcagtcccataccaaaatgactacgtctgaattaatgtgcgtcaaggccaggtgcagtggctcatgcatgtaatcccagcattttgggagactgatgagtggatcacctgagatcaggagttcgagaccaggctggccaacatggagaaaccccatctctaccaaaaaacaaaacaaaaacaaacaaacaaaaaaacacaaacacacacacacaaactagccgggtgtggtggcatgtgcctgtaatcccagctactcgggaggctgaggcacaagaattgcttgaacccaggaggtggaggttgcagtgagctgagattgtgccactgccctccagcctgggtgacacaacaagaccctgtctcaaaaaataaataaataaaataaaatgaattaatgtgtgcctttttttgcccccaggaggctgcccactggccactgggctatgagtgtcatttcatgtctcctagcacttagtgcaaaggcttggttcacagtagccattctataaacttggaataaatgttttaaatgtttctaacgtacttgcctctcacatccatcccaggagtggtcagacagttcaggtttgataactactctttttgtgggggaggggatgggatcttgctctgtcacccaggctagaatgcagtggtgtgatcacagctcactgcagcctcaacctcccaggcttgagtgattctcccacctcagcctcctgagtagctggcactacagctgcatgccaccacatccagctaatgtttaaatttttttgtagagatgggggtctcactatgttgcccagggtggtctcaaactcctgagctcaagggatcctcccacctcagcctcccaaagtgctgggattacaggcgtgagccacaacatctggttgaaaattactatttttttattatattttagaaactgaaagcagtgagaagtctgaagacagttgtggaataagatcagtgaccctgaatcctgcagacggagaggagggaggcaaaagcgggttgctcattgatgagatgtttgagccttagactacaaatcaggctaagaggtggacagcctttgggattaggagtcctaaatcctgtgctcaggttctagctcagtctcttattagccagattccttcggcttaagaacaagcctcttagctccgatgtcagcagcctaagagggagatttctcctttactgactcacagcattcctggtgcaagaatcaaatgccatctgtggaaaccacaatataaatgtgtattgaaatgtacaaggtcacagccgggcgcggtggctcacgcctgtaaacccaacactttgggaggccgaggtgggcggatcctctgagctcaggagtttgagaccagcctggtcgacctggtgaaactccatctctactaaaaatacaaaaaattagccaggtgtgttagcaggcgtctgtagtcccagctactcgggaggctgaggcaggagaatcgcttgaacccgggaggcggaggttgcagtgagccgagatcgcgccactgcactccagcctgagtgacagagtgagactccattgaaaaaaaagaaaagaaaagaaaagaaaagaaatgtacaaggtcagagccctaaggatctatcgcttgtaggtttctctagcagttcctagtaagacctgaagagggcactgtagcccacgagccggttagaacagagggaaaattctcttgggtcctcccctttggcgactcctcgcatcccagctccacacctaccgccccgctccctacacacctgtcaagtaccctccaacctccaaaaccttcccgtaatttttcctgctgcggattgcaaaacattctctcccgtttgcatatgtgcaggggaacacaggctgacttctctacagttgatgatacaagcagaaagaccggccctcacatatgggataacaaccaggatcggggtcccatacagttgtttttgtttgtttgtttttgttttgtttttgagacagagtttcgctcttgtcgcccaggctggagtccagtggcacgacctcggctcactgcaacctccgcctcccaggttcagtgattctcctgcctcagcctccagaatagctgggattacaggagcccaccaccacacccggctaattttttgtatttttagtagacatggggtttcaccacgttggccaggctggtctcaaacacctgacctcagatgatccacccacctcagcctcccaaagtgctgggattacaggcatgagccaccgtgcctggcctcccatacagttttatgacagcttttgctgtctgcacaggtccctcctcagtggtcctttcccgctgaagcattatttttgagaaggaatctgaagttgtggtcagagtaaaggggaaaatgagaagtagaaatcaagagtggaagtagagttcatttgttccatgtcccccaccccaggggagtaaaggagcaggtagggattaggtagaaggaataaaccaggcgcaatggctcacacctataatcccagcactttgggaggctaaggagggaggatcacttgaacccagagtttgagaccagcctgggcaacatagcaagaccccatctctaaaaaaaataagataaaaataatttaaaaattagcagggcatggcgatgcatgcctttagtcacatctactcatgaggctgggactagaggattgcttgagcccaggagtttgaggctgcagtgacccatgattgcaccactgcactccagcctgggcaacagagcaagacactgtcactaaaaacaaacaaacaaacaaaatcacaaatatataaatggaccacctagagtggcccttgtccccgagcagatgctgtttatagaggtggctccaaccgcacctgtgtgtaccgccccttttgtgaatttcagaggcgagtattcatggtgacagtccccaggtgagtaaaggaggcagctggacttagcgaggatgtgcattgaggcggaaggctgatgctgggagtgtggcatcagccgaagagaccaaagaagaggcagaaattaacaagggccagtgaccagggttggcagctgttaccagcccccaaaactcccaaaaggacccgtcctctggcctccctctccttgatgacaatctcagcgcactgcagccttgccctgggcagggttggcagctgccttactgcggtgaggccttgaatggagccaccttattgaccagcgtaggcagagcttgtggcctcaggcccggtagggtcgagaggtcagacaggctgtgtgagacagcacgtagggcccagccccctccacccctcgtttcccggacctggacctgctgcactgctgccaggagtgggacagagccaggggatttggaggttcccagaaaacagaaaagccaagagtcatattggtggtttcagttcttgtcaatgaggttgaagaatacacaaaacttggaccccatgagagccagaggccagcccccatcctgtcttcatggttcccaccaccccggtgtcaagggggctcttgccaccaagggagtgcccatgcccgtgagacctggagaagtcacagcttgccacctaagttatccaggtcatcctgtccctgatggtaggtgcgaaaacaggtaaatcgcctccaaagcgtgtcctggcatcaaattttgcagggtgccgagtgagctcaggcgtcttcccagcatggctctgtccctgagtttaaagctgctctctgaatgcttcctgctctgggccctcaagttggccctgtgacatccttagatctcagagttgctctctggacagttcctctggcccctgagatgtcattgctggcactggagtgtccatgggacaggctggcgctgagctgagagcccctcgacggggttcaggagtggcgggggagggtgtggcacaagcaatgttggtgagggaggtggtggatatgcccaggtggacacacctggtcatctgtcccctgtcctgcaggcctcccctgtgtacagcttcagctttccccggaggaaattggagtagactcggaagagtttgcggaaagtgtcagcagtgattgttcggagtggagcagctgaggccgcatctggaggggagatggcttccttctgccaaggagaaaacaggaggtcgctgcagtgccacagaaagggaaggaatacggacagttcctgtactccttagcaagacccttctccccttcttacagaaagggcaagcagaagtgtccgctcctactcacctgggctcccagagcccgaagcagagtggtgaggctgcgaaggccactgacggctttatccacatgcagctgcaggggctcccacggctgggaagagttgaccaacagggcctggccccgcaggacagcttccgacagcagggccaggccctgccagacttctacggcctgctgcccgacctacagggagtggactctgggagtcagctgacccatgtcaccctctccctcctgcccctcagcagccccaagcaccaagctgagcaaacagaaggtatgcaataagacttgttgaatgaatgaatgaatgaatgagtgagtgagtgagtgagtgaatgaataatgaatgtattccatacagccctcattatttttcttttttcttttcttttttgagacagggcctcactctgtcactgaggctggagtgcagtggtgtgatcacagctcactgcagcctcaaattcctgggctcaagcgatcctcccgcctcagccttccaaatatctgggactaccaccatgcaccacctcacctgactaatttttttaaatgtttgtagagatgggggatctcactatgctgcctaggttggtctgaaactccagggctcaagcaattctcccatctcggccatctcagcctgggattatagacgtgagcctctgcgcccaggcagcctcatctctgctgctccattttacctttccctcgatcattctccctttcatccaaaatcaggctcgcaaatgagattctccaaaagaaaggaaaaaaaaaaaaaaaggaactcacctccatcctcttccaggcatagaaattaactttggtgtctgggacagtgatattctcattcaagctgcagtgttcagcacagcccgtctgaaatgcacacagcccggggagtcaagggtccctgaaggctctggccctggcccacaggccgtaggatctgctggctttgctccttgcctagtttccaggtatggtttggggccaccagacttattcttatgtaggggggcagtgtctagcttcccaactccaccccaaaccaagtgccaggttcctggatctgggaggagttccctgaagccctgagcgtgagttctgtggaatgtgctggggaaggggtctcaccgtgatattctcggcctccttggcctccaagaggtacctctccaggactcggctgtcacagatgaggcgtggtggggcgcccaggactgggaggcccagagggagcgacagcagggacaggagaagccacagccaggcaggacattctagaacagatagccaggctgagagtcaggcggggagggagaagggtggctgtggaaggacagcttccttcatccccacgtctctgccccagctcgtccttcctgtccccaaccatgcaagcactcaggtgctgcctccctggccttcattcaatcctgctgccgtgtgcacaccccacccccagctaccagcatccacttctccggccaaacttcaatcctggtgtgacagaggcttcccctctggcagataagtggtggctccagcgcccaggttatcagcttatcagcttcctctccactggcacagcagaacccccaaaccttcttcccctcaacccccaaactgtgtccccttcacaggtcaggtttttgccatccccaaggactcccccaagtccccgctggcacgtggaggctgccccacccccctcccccttccggggtccttgacaagtcgccggtccttgaacccagccacctcctggccaatagccggggcgctaaatccccgctcaaacagggacccgggcgggcgggagcgcccagcccgcgagtactcaccgtgcacccccatctccgcgcctggccggggtccctcagcgacctggggcgcgccgggtgaccacaccgggggccctcatcccgggaagctcggcggtgcagggccagccccacgggcctggaggagagggcggctgtccagggggcgcggtgtcggagcagagcgggcgcggtggccccggtccggctccgggaggacagcgcggtgcggcgcagcgcagcgagcggccggggtggcccagggactctgcggctctggccgggggtcggggctgttatctgcatgtgtgcgtgcgcgggtgggggtgggggagaggctgtgtgcgtgaggggtcgccaggggtaggggccacccggggtcagagcaggggcaggacgcctgggttgaggctcgccggggcgtgagcggggctgctgcagacgtgcgtgtgggtcatgggggctgctcccgggccctgggtcgcgggaggggagtgcagccggttgcgcacccttgggactggcggagcgtgctatctgggaaaggctgggctcccggacacctcccctggggggcatcccggtcttgggcggagactcagagatgcctgggttgctgagttccgcaaagtagctgggtctggaagcccagaagctttagggaggggcaaatgagtggtctcccttcccacaatcccaggacatgttctagaaacaatgttgaccatgttgaggaatttgatgggggcaaatagggcaagaaatttggggttcttcctccccacctcactcctcaccgtctagtactctgcaaacccagacacttaacttttttttttttttctggagatgtagcctccctatgttgcccaggcagtgcagtggtgccatctcccgttcactacaacctctgcctcctgggttcaagcaattctcctgcttcagcctctggagcagctgggactacaggcacacctttacacccggctatgttttgtatttttagtagagatggggtgttgccatattgcccataccggtcttgaactcctgacctcaggtgatccaccctcctcggcctctcaaagtgctgggattgcaggcgtgagccaccgcacccagcccccaccccagacacttaacttttagtgcacagagcacacagtccattgtgcaggacacacatgcaccttgacatctgtttatttgacctgtggtgtaggttagctaggctgcattgctgagttcttaagaacactgaaatacagctaacaccaagagtgatgggggctgggatttacagctaaggttttatggcttctggaaaccctgagccagaggagtgagattcccagagcaggagaccaagactagctggtctctcacaccttagaaagtggcctcgtccttgagccctcaatgtcctcatctgtcaaatgggtgtggtgaaactaccagcctatcccattcaggtttcataaaagacaggaaaggtccaggcgccgcagctgacacctataatcccagcactttgggagaccaaggcaggaagatcctttgagcccaggagttcgagaccagcccggacaacatggcaagaccttgtctctaaaataaataaataaataaaaaataattagtcaggtgtggtggctcacgcctgtagtcccaaatatgcaggaggctaaggcaggaggatcacctgagcccaggagttcgaggccgtagtgagccatgatcgtgccactgcactgcagcctgggcgacagagtgagagcctgtctcaaaaacaaaaaaagactggaatgtgtagatctgagctgtaagagttagccgggagaaatcaagaaagatttgagggaggaggtgacaatgacctcagccttgaaggggggtaggacatcaatgggaagaggtatgaggtgggtgggggattgtcgattcagcaaagtgaatggagagtcaggtgagtattgcgggatctggccagcagcccgcaatgcaacagggctctctctttgttcccaggcggatcagcaggttgagaaataatagacacacacaagatagtgaaagctggtccggggggtcaccgccttctggtcccgtggtgtcaacaatgcaccagatgtaccatcatttattattaagtttagtgagggcgggggtaggttagtgagggatttagggtcatttgattatgaggtgagatggtcacatggggatgaattaattctttaacataacatttatatgtagaagtacagtacatttgtatgcagaagtacagtatacagagataagaatttacaatatagtgtgtgcatcagtaatttctaacagagccttaaaacagaaacacaatctttccataacctatgattagcaagatactaatcagcagtaacaattgcaacaaaagctggttacagacaatccatggaaacaggacatgaagctagacaaccagttagaccagaaattctcagaagggagtatgccttaaccctaaagaggcctagaagagccatggcaagatgagggcgtttatagccctatcttatccatatggacaggtgccccccgcccccatgcgtccgtttataggctctccacaagggtcgcattccattcccagagctatgaacatctgcttttctgggatagaaatcttggtgatgtgaaacctccctgactgcaggtccgttcataggctctccgcaggcggaagcacatcacaggctgttggctcattctggcagtccaacctggcattgtttgtacacaatcctgcatgcaattttgtatttacaataatcaggagcatttcatcttttattccgtagcagtagtttcagggggtctccctacaggtgagcagaagggaagatggagaagagagaggtggaagatgaggccagggtgctgcttagggaggagtcaggctgtctatggccttgaatgcctctctgaagaatttggattttgtttggaaagagtgggaaacattcactcattcattcaaaagatatttatggatttcctacctacccctggccaaggacctggggatagagcagtgaatgatacagccaggaatgcctgccctggtggagctgatgttctagtggggttgccaatgatgaacacaaaaatgggtacaagacagaggattttggctgggtgaggtggctcatgcctgtaatcccagcacttcgggaggccaaggcaagaggatcacttgagcccaggagttggcttgaccagcctgggcaacatggtgaaaccccatctttacaaaaaaatacaaaaattagctgggcatgatggcatgtgcctatagtcccagctacttgggaggctgaggtgggaggatcacttcagcccaggaagttgaggctgcagtgagctgtggttttgctactgcactccaccctgggcaacagaatgagaccctgtctcaaaaaaaaaaaaaaaaaagaaagaaaagaaaagaaaagatagaggatttcaaatagccagaactaaggagaaaaggcacaggcagggttatctaaaataaggtagtcagagacactaggctgagaaactgacttgaataaagacctgttgggggtgagggaccatgagggtgtggtgaggtgaagagcttgatgggagggggatttgggccaagtgtagtggctcacacctgtaatcccaacattttgggaggctgaggcaggaggattgcttgaggccaggagtttgagaccagcctgggcaacatagtgagatcccatgtctataatttttatttttgtttagctagctgggcatggtggtgcacatctgtagtcccagctactcaggaggctgaggtcagaggatctcttgagcccgggaggttgaggctgcagtgagctatgatcacgccactgcactctagactgggcaacaaagggagaccctgtctcaaaaaaaaaaaagaaaaaatgagtggtttggcaagatggttgggtgggggtcaggagacagaggctggtatgcttctggctggcctaattccctcagaccctgctcccctgcatcctctgctcaccttgagccttcccaaaactgctgtccaggctcccccagccccactcggctcctggttctgatcccttccagagtcctgggacgtgcaccatcacactcacatccacacatggccgcacgtgcgttctgtcttggctgctccccttccccagcctctgctctcccaggaccctgactcctgcgtcaatgccctgacctaaccatggagagggggccggagacagatgggtggggtggacacagctggaggaggaggagccttttgggctgtgggacctgcccctcccctcacacagcttctcgggggtccctgcatccttgtctgcagttgaagaggagtgagagatgggccaggggcaccagcctctaaatgctgtagcctgctggataggagtagtgactgccttgtcccctggggcttctggagagagagctgtgattgcagcttgggagggaggagaggatcttggtccaccccatacccaatccgaagccatagtaattctctttttgagatggagtctcactctattgcccaggctggagtgcagtggtgccattatctcagctcactgcaacctccacctcccgggttcaagcaattctcctgcctcagcctcccgagtagctggaattacaggcatgtgccaccacgcccggtaatttttgtattttcagtagagatggggtttcgccatgttggccaggctggtctcgaactcccaacctcaagtgatccgcccgcctcggcctcccaaagtgctgggattacaggcgtgagccaccacacccggcttgaagccatagtaattctgctaagaggggagaggctggtttggagcccagagcctcttggatactgagcaatgcagggtccattcatctgtccttgaggaacaggaagaaaacaagaagctccatggggctccccgaccaatgcccaccatccccctgcccagtgccccccacccccgtcatctgcctgctcttcatcttctagcagatgctgacccacaggcccaggaccactgcagagcatctcctcattgacccctccagttaatccctaaccctgctgctcaattaactttcccactgaacagcctcatttgtgctaattccctgagcaggaacctgtcacggcttcctattgcctcagaactgagaccctccaaggtctaccattcacttcatgttccaggctgttctcccgctttgctcactcccactccctccaccacaggagatggtttgtgccttcctgcccttggctcatcctggattaccctcccacaccatctcctcgttttctttaaagcccaaatctgtgcatcgcctcctccatgaagcctttcttgatctcccagcaggaaatcgtctccttccctggcactgccgtcatttatgtacatgtcttaggcatctcactggcaggaccgccatggacagccgtcaaagatgagcactgcccaactcccaggggcatccatagagactctgaagggaatggtaccgtctggagtcacgtagtgcaggtgccctagtcatcgaagagagcgaagggctgcgtatggaagttctgatgcatttttctgtctaccaagcgtccagcatgtcccttttctgtggtaaccacccaagtgtggattgcattatgtggtccctccactacatgctcagagaagaacccaacctagagggggcactgagccatcccccggtcaacccagctccctgggatcctggggcgtgtgaagcttccatgcacttcctgagcaggcagccactgaggcagggtttgaaaagggccagttgtgacaggaggatggcgggtgtggaggcaggctctgctccacggattcctcctggcagtggattcagattggaaatccaagcagaagcaaatttacagccccccgagctgtcccagacccccaggcagcacggagccccagctgcctggagtcggacttgggaaggggggcctcctggcttctctttccctcctcatttccaagcagtggcttctcagctcagctcgagttcagccagaggcccagaagaccttctgtgctgggaggggaggtggctggggaccttgttgggtggcctttggggaactgtgaaggaagcaagaatgctggagggccaggcacggtagctcacgcctggaatcccagcactttaggaggctaaggagggaggatcccttgagcccaggagtttgagaccagtctgggcaacatagggagaccctgtctctacagaaaatttgttaggcatgctggcacatgcctgtagtcccagctactcgggaggctgaggttggaggattgcttgagcccaggagttggaagctgcagttagctatgatcgcaccactgcactccagcctgggcgaaagaacaacaccctttcttaaaaaaaaaaaaagatgctgaagaagggattcctgctggagaaccaaaggaaaatcctttgccaaagtcctcaaaggaaaatcctttaccgcacctggcctaccaaagttttatgaagcctattcctgactgatcctttgttctctaagtaaggtgatcaaggagttagttatcaaactgatgaggggccgggtgaggtggctcacacctataatttcagcactttggaaagctaaggtgatcatttgaggccaggagttcaagaccagccggggcaacacagtgagaccctggctctataaaaaataaagaagttattttttatagagttatattttttatataaaaaataaagaagttagccaggcatggcggcacatgcctggtgtcacagctacttgggaggctgaggaaggatgatcatttgaacctaggaggtcgaggttgcagtgagctatgatcatgccactgcactcgagcctggggaactgagcaagacccatctctaaataagtaaaaataaaactgatgagatacctcaagaagttattttattgcccgttccactaactaataaatatctgatgaatgaatgggtcagtggatacatggatgatgcagaggagaatggcttgctgtctcctctataacaagcctctgctcccttaagaaaaggcaaccgtcttgtcacttgaagaatgcaaacagagggtggactttcgccttcacaggacctgctagattccttccaactcagtctattagtcttgtttgctattagacaaatatacttccctgaaaagggaaaaattatttgctggttgatgaactaagacacgagcagaagagctcacttaggccgggcacggtggctcacgcctgtaatcccagcactttgggggctgagacgggcggatcacgaggtcaggagttcaagaccagcctggccaatatggtgaaaccccatctctgctaaaaatacaaaaattagctgggcatggtggcgcacacctatagtcccagctactcaggaggctgaggcagaagaatcacttgaactcgagaggcggaggttgcggtgagccaagattgtgccactggactccagcctgggcgacagagccagactctgtctcaaaaaaaaaaaaaaagcaacttttatgatgaacttttgctcattacaaaaacaatacgtgaccaaaattagaaaacagcgctaaactcaaacacataaactgaaaaacacccataatgtcattagggtcttgggaccttaagtggccattttcacaggcttccttctggtaggatgacctttgcctcatcccaaatctctgtgcaattggacatctgtttcctaaggaactacaattgacacgttctcgtccaacctctctagtggtttgagggtttgtgaaacaccatttttccctcaactcctgaccaagcaccagaaactcacctgggacaaagtgctgggcttctctagcaggatcatcagcctgatcaaaccacttaatatttcaaggtcccgtccccttccctgctatgcgagccacaactgagtctggctcagttgttagtttctactaataactcagacttgagaattaaacgcacacaaaattgccttccttcacttctccccattcctattaagaagcctaaaaccatttcttagcaaaatggcttcatactaaacaatactagctcttggccgggcgcagtggctcacgcctgtaatctcagaactttgggaggctgaggcaggcggatcacctgaggtcacgagttcgagaccagcctggcaaacacggagaaaccctgcctctactaaaaatacaaaaagtagccgggcttggtggaacgtgcctgtaatcccagctactcaggaggctgaggcaggagaatcagttgaatccaggaggcggaggttgcagtgagctgagatcacgccattgcattccagcctgggcaacaagagcacaactccgtctcaaaacaaacagataaacaaacaaagaaaacaatagtagctcttttttttttttttttgcctgtagtcctaactacctgggaggctgaggcaggattgcttgagcctagaagtttgaggttgcagtgagctatgattgtaccattgcactccagcctaggctacagagtgagaccctgtctctaaaataaataaataaataaataaaatgtaaaaaggagggcagggcattgcatttgcacacaccttctgcctccatctcctcacccctctcccgtttttcaagcttttttctttttgagactgagtctccctctgtcacccaggctggagtgcaatggcacaatcttggtgcactgcaacctccacctcccgggttcaagcagttctcctgcctcagcctcctgagtagctgggattacaggcgcctgccaccacgcccagctaattttgtattttcagtagagacggggtttcaccatgttggccaggctggtcttgaactcctaacctcaggtgatctgcctgcctgggcctcccaaagtgctgggattacaaagagacgtggctcactgtttctggcctcccaagctttgatggaagtcactttggagagccagtagagggaggagaacagaggctggagctagcctccctacggtcgggcctgcaggcagggttccctgccccacctgccctgcatggactctagtagatgcaggagcctggttcacgcccccccacacacaaaagagtgagccccaggccccactcttccttcagtggcaatgtggaggtctgtttctgcagaactgccactgagggaagccccactggcaagcagtgagaaaacatggagtagaaacaacaaacaaataggctgcaggagggaactgccaaaacaaaccagatgggaaaggctgcctgccaccacctctgctgggctcaggcccggagcacatacgtgcagggagacacagctccatccagcttcctgccggctccccgctcggctactggggggctcccgggcaaggaagccttgcagtcaggctgatggaaaggatgtggcctgatagaaatgtccgcagccagccaggtacggtggctcacgcctgttatcccagcactttgggaggccgtaggcgggcagatcacgaggtcaggagatcgagaccatcctggccaacatggtgaaaccccgtctttactaaaaatacaaaaattagctgggtgtggtggtgcgcacctgtaatcccagctactcagctacttgggaggctgaggcaggagaatcgcttgaaccagggagtcggaggttgcagtgagcgaagatcacgccactgcactccagcctggcgatagagactctgtctcaaaaaaaaaaaaaaaaaaaagaaatgtctgcagccttgtctcccagtacctcttgctttctagccacctcgagtccctccagtcccagaacgtagctgcctattcattaatcccctccctgcccactgttttttgagacaggttcttgctgtttcacaagccctcagtcacggcttactgcagcctcaacctcttgggctcaagcaatcctcccacctcagcctcctgagtagctggaccacaggtgcacaccgccaagcccagttaatttttaaatttttgatagagacaaagtcttactctattgcccaggctggtctcaaactcctgagctctagcaattttctctcttcggccttccaaagtgctgggattacaggcatggccaccattcccagccaaatccacccatctccccgccccactgtgatctctctgccaaatatgccatctcccttcttttctgcctggcaaactcctatacatccttcaacacccagatcaaaggtgagtgaaaccattttgggtcccaccaggaagttattagccctttccatctccacatttccttatcattgctactcttatgtctcacacatcttactcattcacaaaaaattatgtgtccaccttcccaattagatggcgagctccttgaacatagggaccatttcatacgcagatgccagaggaagggattttgatgaattagaagactgatcttcagacctccaaaccaaactaccttccttgaattagagtgaaattctgttcctaacctgtaaatcagaggctcttaaactcttatgacctcaaacggtaaaaaacacaatgtacatcctattatagtacatatatatatatatatatatatacacacatgcctaactgaaaaatttgctggccaggcctagtggctcacacctgtaatcccggcattttgggaggctgaggtgggtggatcacctgaggtcaggagtttgaaatcagcctggacaacatggcgaaaccccatctctactaaaaatacaaaaattagccaggcgtggtggcacacgcctataattccagctactcaggaggctgagacaggagaatcgcttgaacctgggaggcagaggttgcagtgagccaagattgtgctactgaactccagcctaggagatagagactctgcctcaaaaaaaacaaaaacatctgcaataaaaacaccaccatttaagttgcactttttttaaaacttgggttcttttttctttttcttttctttttttagacaaggtcttgctctgtcgcccaggctggagtgcactggcgtgatctcagctcactgcaacctccccctcctgggctcaggtcatcctcccacctcagcctcccaagtagctgggaccacagttttgtgccaccatgcccagataactttttatattttttgtagagatgggatttcgccatgttgcctaggctggtctcgaactcctgcgctcaagagactgacctgcctcggcctcccaaagtgctgggattataggcgtgagccaccacacccagccttattttttttgttgttgtttttgttttttgagacggactcgctctgtcgcccaggctggagtgcagtggcacaatctcggctctctgcaacctccgcctccctggttcaagcgattctcctgcctcagcctctagagtagctggaactacaggcatgtgccaccacgcctggctaattttttgtatttttagtagagacagggtttcaccatgttagccaggatggtcttgatctctggacctcgtgatctgcccgcctcagcctcccaaagtgctgggattacaggcgtgagccaccgcgcctggctttttctttttttaagaagctgtgacccacaaatgggtcacaacccgctttgataaacattgctttagttgactttagtttgataaatatgaaaaatcaggtcatcccacaaatatccaaacagaaagtattacctgtgtgcccagtaattatttggagtgaggggttccttcgccactggagcagcccagtgagaagggtctgaaggccgggcgcagtggctcatgcctgtaatcccagcactttgggtggccaaggcaggcagaacgcttcaggtcagaagtttgagaccagcctggctgacatggtgaaaccccttctctactaaaaatacaaaaaattgcagggcatggtgatggatgcctatagtcccggctactcaggaggctgaggcagaagaatcccttgaacccaggaggcagaggttgcagtgagctgagatcgcaccactgcactccagcctggatgacagagtgaa

SEQ ID NO: 31 - DNA, 26797 bp, Mus musculus
ctcctggctcaacacctacagtggagatgtgctggagagatggcccagtgattagcatcgagtactgtttttgcagatgactcaagtcgagtggctctcaactgtctgtaactccagttcccaagagtctgaggtcctctcacacctccacagaatttgtacctactcacatatacctggacacaaacatacacataatttaaaacaaatccaatcttcaagaataaatctatcttccagctatggtaattcggactcttcatccctgtactcaagaggcagaagcaggtagatctctgtgagttggagaccagcctgctctacatagaatgttctagcccagccgtgactacatagtgagaccctgttcaagcaaacctatacaagtgttgttttcttagcattattccctaggcaacacagatcatggattatctacataatattctgtatttttagatgtcaagagctgagagagtggccacgggttccaggaagtccctgtatgggctcatttgcttatgcacatatggatttatgaggggttgtgtgaatgtgggcagtgtgtacacacatttgaacgtatgcaggtacacatcagtgtggaggcccaaagttgacactggacagcttccttagttgctctacattttatttattgaggttttgttctccactcagagcttgctaattccagctagtaaagatagccagctgccctaggcatccctgtctctgcctcctgaacactgggattactagtgggcaactatacctgcccgacatttatatgtgggctctgaagcaccagactccggtcctcatgctcacacagcaagtggtccttctactgtatcatcttcccagcctgtttgttggtttggtttaaggtcctgtaatgtagctctggctggcctggaatttactacgttagctcaggctaagcccagacttgtgagctatccttacacgtctgcctcccaagtgctagaggtatatattaggtgtatactaccatatctgaattaaattaattagttagttaattacttatagttttaattgaggcagggtcttgctggtagatcaggatggctttatatcaagaccctcttgccttagtgacatgggtactgggcctgaaaaacaagcctacacctgctcagttctttatcagggacttgagtatcctgtgtttgtgattcttggggtggggtggggtctccacatccaccccccttggagatatgtaattcagggtggcctgaaactcatgatgtagttcaggctatagattgtatcttttacaaatgtttaggtcacaagtaagagtcaggaagggaatcttactccaagtattgtggcgtggcactgaaaactagttctagttggccaaaatcccttcccatggcttcggcatgacatagctcattatgtagctgggagagtgtacacatacagaatttcttttttcttttcttttcttttcttttcttttcttttcttttcttttcttttcttttcttttttttatgtttttttgagaccgggtttctctgtgtagccctggctgtcctagaactcactctgtagaccaggctggcctcgaactcagaaatccacctgcctctgcctcccaagtgctgggattaaaggcgtgtgccaccacgcccggctccagactgcatttcttatgaacagatgagatatgtaagagatgtaggctgccatgatgtatacctgagggaacagaaagattaaattctttgtggggaccaacacgctttaacctttgacttgggtactgaagcatgaagaggagtttgatgggcagaagaaaggaaagaggacctcctgggcagaggtatcaagagagggatatatgaacaggcacattgtgggccaagagggacacagagtgactgtggagactaaggaaacaaggttgatgacatttatattgtgacagccctctccatcacccttggttttgtttttgtggttttttttttcagatttatttacttatttgtttaataggcgtacactgtcactttcttcaaacaccccagaaaagggcatcagatcccattacagatggttgtgagccaccatgtggtcgctgggatttgaactcaggactttcggaaaagcagtcagtgctcttaactactgagccatctctctctccggctccacccttcttttttgttgttcatggtaggatctgtgtacctattcctgtgtgtgaaagtgcacatgaacaagtgtttctgtgcatgtgccagacccacctttccttccttccttccttccttccttccttccttccttccttccttccttcctccttctttcactcttccctccctccctccctttctccctttctccctccctccctcccttcttccctttctccctcccttcctttctgcctttgtttctttctgagacaaggcctctcaccagtctgcctggcttgaactctcttcatagaccaggctgtccttgaattcccagagctctgcctgtctctttctcccaagtgctggtttgcagcaacactcctggccactttgctttggagacagggtctctccacttttacttgtactcgatgacttggttatggtgacagccagcaagcccagaaggtctcctgcttcagtcttctcagcaattgggttacacacacacacacacacacacacacacacacacacacacctgtgcccagctcttttatgtgagcacgagaggtagaactcagtccccctcactgggtagcaagcattttactgactgaaccatagtctcagatcttcctttcttttttctttctttctttctttctctttctttctttctttctttctttctttctttctttctttctttccttccttccttccttccttccttccttccttccttcctccttcctgtctgacaggatctcagtatgtaatacagactgccctaaaactcattatacagtccagcctagtccccaacacatgtcaatcctcctgcctcagctttccaagtgataggcttgcaagtgcaccatcccacttggttctattatttattttaaaagattttattttatttttaattatgtatatgtctctatgtgagtttatgcacacaagttcaagtgctctcagaggctagagctgttacttcccctggaactggagtataggtggttgtgagccagctgatgtaggtgatgccaaccaaactttttaagagcaatgtgtattctttgctttgttttgttttgtttttcaggacaaggtttttctgtgtagccctggctgttctaaaactcactctgtagaccaggctggcctcgaactcacagagatccgcctgcctctgcctcccgagtgctgggattaaaggcgtgcgccaccacgcccggctagcagtacacattcttaactgctgggttgtgtctccatgtcttttgttgccctctggagacagggtttcattatccaggctgactggtctcaaacatactatctcctgccttcatttcgttaagtgctaggactataggcatgtgccatcgtacttagctggctagccctccatcgacctcctcagggcttccttgccttgaaacctcctagaagctgagcccgtatgaagctcagctgcagttgtgtctccctgcacgtatgtgttcttgactctgctctcctggctggagcccagcagagctggtggcaggcagccctcttgcatccctcgtacacccgctcggtttgtcttggcagctctctgtctcacacggcctccgtttgttgtttctagtccgtgtttccacacggcttgcagttagggcttccctgggtcactgtccgcaggcgtagccttcaatgatgctactgaaggcagaccagcccctggggatttcctgtttgaaaacttggctggggaggtgtggagtcgggaaccatgacagacatagctacgaggaaggtttctgcatgtacggtggtctgtatggcgtgtgaggccaggaagcccagggattgacagctttcacaggtgccctcagggaagccagcaccatctctgttccctttgacttccactaaaacttaaatggtcagcatgggtcaggagtagaaagtctgcctcagcacgctgtctcctttcattgaacagttacagagcccaccgtgcccagggaacgatttcctcctataaagacatagtcccaagctaggcaccgtgactcatgctggtaatccaggaggccaaggtaggaggactgtttgttacaagttcaagactagcctgggctgcatagtaagttatgggatagcttgagcatcttagagaccctgcttcaaaaaattggaaagacgatgtgtcaggataaacatgtatttttcaaccaatttattttttaaatgtatccataattgcacactcgcgtgtatgtgtgtgcgcgcgcgcacgcgagcacatgctgtagtatgcgtgtaggagtcagagagcagtttgagggagtctgtcctctccctccaccatgtgggtatgggggattggggattgaactcaagttgtcagccttggcagcaagcatctctacccactgagccatcttgccactagatgcctgtttagcatctatggcatttagtgaacatctgcttgttgtaggtaagtgtattaggtaccagttctgccgaaagagttatacttgattctgtgacatctaacaggaatggggaaaaaagaataatttatttatcccaaagacagggtctcatgcagttcaggctagcccagaaattgctatttagctgaggatgacccagaactcttgatcctcctgcctccacatcctgagtgccaggattataggcacacaccattatatgcatggctcttttctttctttttgtgtgtgtgggagggggtatgtgcacatatgcatggaggacagaggtcagcctcaggtgtcattcctcaggaactgtcagctctgtgtgttttgagagagtctgtcactgagacctggaacctggaacctggggcctggggcctggggcctgggagctgggacctggcacctgggagctgggagctgggacctgggacctgggacctgggacctggggcctgggacctgggacctgggacctggggcctggggcctgggacctgggacctggggcctgggttaggctagcttgccagagaaatccatcaatctgcctgcctctcacttcctaataatgctgggactgcaaagagaagctcctacacccagctacagtctgttagagcttaaaatcagggcctcgcaggacgtggtggcgcatgcctttaatcccagcactcgggaggcagaggcaggcagatttctgagttcgaggccagcctggtctacagagtgagttccaggacagccagggctatacagagaaaccctgtctcgaaaaaacaaatcaaatcaaatcaaatcaaatcaaatcaaatcaaatcaaatcaaatcaaatcaaatcagggcctcatacttgagcagccatgcttcaccaactgagccatatccctagcttctctctctctctctctctctttcccaagacaaggggtttctctgtatagccctggctatcttggaactcgctttgtagaccaggctggccttgaactctcagagatccacctgcctctgcctcctgagcagaggaactaaaggcatgagccactaccaaatggctaacctttttttttctttttgagataggtcctgctatgaagtccaggttggcttggaactcacaattctctttagcctcccgaacagctgaaatcacagatgtgcgccaccaccccaggctgtcaaccgacagaattcccttctccagcattctcatttccttccaggtctccaagggccaaaagtctcccctcaaaacactcttccagccctctccccgcccagccaactcactttccagcacagaaggtctcctaggctgttggctggcctcccaagctgaaaaaccagtgcttggaaactggttctgaaaagctcagagccttcccccaccccatccccctcagcccagctccaggcagctggggctccgtgctgcctgaggtttgtaacagctcatgggggttgtaaaatttgtttcccttttgggacctgtagagtacagtctgcttccagctcctctctgggtttcatctctgcaatatctttagagcccagttcacaccagtcacctgctctgaaattaatagcaacttctccagcccaaaagcacagcgagcaagggtggatcggtgtagtctactctccttctccaggtctcccacatagagaggagcctggcatggaacagagaacacaacccccaactgagaccggcgctgggtgcaggacaggcacagagaggcataagaccacccatatactatcctttactctcatctctgtgtaccagggcacacacagggaggcagagggttctactcccagtggggacattttatgaatatgcaactcccgacgctgagcagtgatcaacttggacagattcttaactttgtcatacacagtggccctggtatagcaaacgctaacacatgaacataagcaatggcttcctgctggggtgttgggaaaggctttatggaggaaaggccgcttggatttgagatctgaagaaaagagggagacagagtgcggagggcaagccagatggaagccacagctaaaaagaagaccccacaaactgtctaaacaagccccagtgatgggaggccatagtatagggctggcaagatggctcagctcataagggtgcttgctgtcaagcccgatgacctgtgttcaattcctgcatccaactcttgtatgttgacctctgacctccacacccatgctgtgacacacatgagcatgcccatgcccccccccccccccacacacacacacgcacatgtatacacatacacatactgaataaataaattaataagaaggaaagaccatggctggtccagcaggtcttacttctggggagtggggaatccctgcaaagtcctgctcaaggcatcttggggtgtgagtcagttggcaaagcgcttgcctagactgaaccccaggctccatccaaagcatgatggtgcatgactcgaatgctagtacttaggaggtgaaggcagtggtaaccacaagttcaagattgtctctgactacataaggagttcaagcccagcctgggacagatgagaccttatcattcaaagaacaacaacaaccaaaaagtaaaagattcctgctcggggtcatgacataggtgagaatattcatgggaaaacaaatggagaagcagggttaggaaggactagaacggctttggggttctatatggtgatggtggacagtgacagagctacgagggggggacctagatagaggtttgttttttgtttgtttgtttttgttttgttgccgtcttttatttctttctctttttgagagagggtctcatgtagctcaggctggcttccaattcactatgtatcagaagatagccctgaactccgattcttctttcctctcgccccgttgacaggtgtgcacagctctaccccagctgtttaggtttttttgttgttgttgttgttgttttgagacagatcttgggacgcagccctggctggcctggagcatgcgctgtaacccaggctgccttgaacttgccgcgaaccttctgccccttccattcacgtcctatgagcagcttccggttctgtttccttcccgtcccctcagtgtcacctgccatcagatggtgtacaccagtgtgtttgagatgatgttgcatccccagagcccctcagcacccagggggattatgtggcattagaactgggtgtgccatggattgatttgcccacgtcttgtaccccacaaatacaatggtagctctctctccgaggtgggtctggcccctctcccagggttctctgaaaagttgtgacagagaaggaacaggtcctgcagtccccaaaggctcctccttctaagactcaggccatgtcaggccatgttgtccctgccctgatctgtccccggccctctctccggtggataggtcagagctgtgacgcaggagtcaggggccctggaaagagcaggctgttgggaggggtgcggtggtcgggtctgagctcccatgcggacgtgtgtggacgtgtgtgttcgtttgcatgcctcacagctgggccacagttggggagcagagctgggtgctaagcctggatagcaggttcaggggaaaccctgaaaaagcccgaggtgacaacagtccagggaagagtcaggctcaggttcatctgactttcggctagctcactagctggcttggcctctgctcctcctcttcatgcttctacagcttgttttgttttgtttgtttgtttgtttgtttgtttgtttgtttgtttttccagacagggtttctccgtgtagccctggctgtgctggaactccctctgtagaccaggctgacctggaatctgcctgcctctgtctcccaagtgctgggattaaaggtgtacgccaccactgcccggctctacagcttgttttgatcatgttcttccagctaaatcctatggctcccttcttcctccagcatgtcagaatcgatgcactggcgaccctgactgcctattgactgaataggcaactgcaacttctggtgcatctttctgagcctttgctccttagctagtgtgtgtgtgtgtgtgtgtgtgtgtgtgtgtgtgtgaatgtctctttctgtgtgtgtatgtatgtgtatgtatgtgtgtgtatatgtgtattgtgtgtgtatgtgtgtatatgtgtatgtgtgtgtataagtgtatgtgtgtctctttctatgtgttggctgtgtgtatgtgtgtatttatgtgtgtatgtgtgcgtatgtgtattgtgtgtgtatgtgtgtatgtgtgtgtgtatgtgtgtatatgtgtgtgtgtatgtgtgtatgtgtgtatatgtgtgtgtatgtgtgtatatgtgtgtgtgtatgtgtgtgtgtatgtgtgtgtgtgtatgtgtgtgtatgtgtgtgtgtgtatgtgtgtgtgtatgtgtgtgtgtgtacatgcatgtggtgcaagactggaggccaagagtccacctttcatatgtcttactcagttgcttctccatttcacttttgttacattaattaattattaattacatgtgcatctatgtgtacgagttttacatggcacacacgtggaggtcttagatcagcttcagcggttgagtctcttctttcactacgtgggtctcaggccacaagtactcactgggtaacactgagtcatgatctcactggtcttccgctcggtttttgaggcaggatcttagtgaacctggaagttactgatttggttaaattagctgtccagtgagctccaggaatcctcctgtctctgcctcccaaacactggggatactatcaaccacatgctagcatgctttttgttgttattttgattttgttttctttttttgagacaggctctctgtgtagccctggcagtcttataacttgctctgtagaccaggctggcctcgaactcatggagatctgcctgcccctgcctgccgagtgctgaattaaaggtgtgtgccacgacctctcggtttatgcccagcttctaatgtgggtgctggggaacctaagtcaggtccttgtacatatgaagcaaacatttactgactaaatcatctcctccgctccttccccttattctcatatatatttgtatgtgtatatgtattgtctatagtatatgtgatatatatgaaatacacataatattatatagtaaagattatttattttgattatacgggtggatttttacccatgagtctatgcagcacatgtacacagtatcttcggagtccagaagagggcgctagatccttgatctgcagttacagatagttgttagtggccatatggttgctagcaactgaacttgggtcctctgaacaaagagcaagcgcttttaactccggccacctctacttagttctaagtgccatctaaatgccatctgcccgttgtctgtctccccactagcatgtcaccagggcaggcactcttgtctgcaccactgatgaccctgtcctcgggtcccttcctggtaggtggaacagagtccatagacatttcttttatctttacatttttattaggttcatgttttatttgatgtgttttgcctacatatgtgtctgtgtactatgcatatgcccgatgctcaaagaagtcagaagagggcatcggattccttggaactggagtgatggatggttgtgaaccaccatatgagtgctgggaatagaacctgggccctcaacaagagtaacaggtgctcttaaccactgagccatctcttcagcccttcttttatcttttgagatggagttttactatgtagcttcccctagcctcctaagtgctgggatgactggagcacactaccacaccagcactgggatgactgactggagcacaccaccacaccagcatttgaagatttcctgaaagaattgagtgaatttcccccactttctctctctttttaatctgagttattcagaacagcattctaggctattttacagcctggttcttcctaaagagcactctggcttcatctcattccacattccccactttccccatatacctgagtctcctcccatacctattagaattacgttccatccaaactgctcaatcctcaattctgagctcatagtgattctggccatcccatctgccttaacttccctggttgaatatgagctcgttcaccctcagctcttacacctcagatctgcacactccagttccgatacactgcctgccatgttcagaacttgtcttgctgtatagatctcgaaggagattaaaatgtatctctttttatcctgcaaagggtcttgcacaaaatacacattggatctggagacctggctcatctgtagagcccctgcctagaatcccccagtgaggggctgggggtgtggctcagaagtagagcccctgcctagaatcccccagctcagtgggagctcagttacagagtatttgcacggggttccagtctcagcactgcataaacaaaagcaagaacccactatcaacctgcccacccgtcctcagtaatgccccacaggcctgttctgaaagttacctttctgggtttttagggattatagaaaaacgaggagagggaggggaggaggccccattcattattcaacagggaaaaccctgacccttagaacaagtcgtaagactgtaagaagaaaaagcatccgagccccttctagactccagccttagttgtttctgatctaaatccctgcctcaagacaaggatgctcccaccccccacacacccccgcccccaggtgttccggcgcccaacttttcataggtcaattatccttacctcagccttaggcttaccttcccgcaaatctctcagatgcgcacccccctggtctaccctcctggaaatcagaacctccccccccccaaaacccccctgacggcgtgtgtgcctggaacagcctgctccaccccagcaagcaccagacccaggcgtcctgccccttgctctgaccccaggtggcccccacctctggcgacccctcacgcacacacagcttcacccccacccccacccgcgcacgcacacatgctgataacatccccgacccccggccggagccacagtgtcccgggaccaaccctggccggtggctgtgtctcactgtgttcccgaacggacccttggccagggccaccgcgtccccactctgcccgcgccccctggacagtgaccactttcttccaggctagtggggtgatctggccctacagaacttccaaggatgaagacttgcagcgtggacactggcccagccccgggtcgctaaggagctccggcagctaggcgcggagatgggggtgcccggtgagtactcacaggctaaggacctgtgacctccagggctcctgtttgagtaaggatttacatctaaagctattggtcaggaaaccgaccgtgttcaaggacctgcgactctccaaggatcaaggaagagggggggtggggcagcctccacgtgcactaaggggtttggggagccccctgtgaatgacaaaaaaggcggggggatccagaacagggacaaaatttaggattttggggagatgaggcgctgctctgtgagtgaaaggctgctaaaggaattacctgcgtccaggagtccctgcttcccaggatctgccagcctctggcgcgcacccacagtgaagtttggccgagaagtggatgccggtcgcttggggggtggggtgtgcagcgcggagggattgaatgaaggccactcaggcagagcctaagcaattgcaaggtcggggtcagcagagactataagggcagaggggtctcgctgagccaaccggcccctgcagtcccacggccccctcccctctcggcctcacactcagcctgcctttcttccagaacgtcccaccctgctgcttttactctccttgctactgattcctctgggcctcccagtcctctgtgctcccccacgcctcatctgcgacagtcgagttctggagaggtacatcttagaggccaaggaggcagaaaatgtcacggtaagctccctggccccacaaaagaaagaaactggttctcagggatctgggaatttgggttccttcctggaactacctttagggacaagataagatgtttacccttaaacctctttcatccccccgacaagaatgataaaactgggcaggggatgtggcccagttggtaaagagcttgcaaagtgtgcaagacgccctaggttcgattccaagtactgcacaaaacattttgggtggcataaacctacaatcccagtagttgggaggtggtggtaggagaatcagaaattcaaggtgatccttagctacatatcaagtgtgaggccaacctgggttacatgaaactatgtctaaaataaagaatgacaaagctggtggttcccaaagcatgccggtaaaattcaaagacagagtgtctgatggctttttgtggacattttgacctggggctgtgtcttttagatgggttgtgcagaaggtcccagactgagtgaaaatattacagtcccagataccaaagtcaacttctatgcttggaaaagaatggaggtgagttgcattgtgtctggtccctgtccttgtccccatctgtctgtctgtctgaccgcccatccatgcccccaccctctccacccttggttcttagaggttggtgggtctcattttcacatctttatagtgtgggagaaaatatcagagacaatggttcatgggatagagtagctcataatatattcattcattcattcattcattcattcattcagtaaaccttactgcttgcttttctgttccttctttcagtcctgtataatagccagggaggatagggaatgacattggttggctgtttctaagtctttgactcccctaggtggaagaacaggccatagaagtttggcaaggcctgtccctgctctcagaagccatcctgcaggcccaggccctgctagccaattcctcccagccaccagagacccttcagcttcatatagacaaagccatcagtggtctacgtagcctcacttcactgcttcgggtactgggagctcaggtgagtgtgagtgcctgtggaccctgctacttgcccttctacaggatgcactaagaactgttaaagaaccctgaggtctgagccagggagagctcagcggggaaatgagctcgatgctaagcctgatgccctgggacccacaagctgaaagtcctctaagcgaattaatgtaataacaaatttaaaacaaagactactgacagctcagtctgcggagatgaatcaagggatggcatgctggctgcacaagtgtgaggagccaagttcgatctccagcacttccatttaaaaaaaaagaaaatgagatgaggtggaaggtacacatgatcccagagctggggaggcagactcgcaaggactcctgggactcactggccagccagtctggatcagtgagctccaggctttactaagagagatgctgtctcgaaacattagacgcagggctggaggcatggctcaatgattaggagcgcttgctgctcttgcagggttcaatacccagcatccatatcgggtgcctcatagctgcctttacacccatctctagggaatctaagggtgtattctggatgccccgggcacctgcatacattcacatccacatatccaaataaaaataatgtggagactgcctgaagaagacacacctctgcacacacccacctcccattctggaccaggtcacatcttatctgtagccctccacactccagtgacatcctattctctcttgacagaaggaattgatgtcgcctccagataccaccccacctgctccactccgaacactcacagtggatactttctgcaagctcttccgggtctacgccaacttcctccgggggaaactgaagctgtacacgggagaggtctgcaggagaggggacaggtgacatgctgctgccaccgtggtggaccgacgaacttgctccccgtcactgtgtcatgccaaccctccaccactcccaaccctcatcaaacgggtcattaccttcttaccagtctgtcccatggacactccagcaccagcagtgacatcctcggggccagaagaacttcccagagctccattctgaaatctaaagatgtcgctggacaagcccgaggccccagagaagaagagcctcagaatcagctcggatttgtttaggtttttttttttttttttgaaacaggaaggtctcacatagcccaggctggcctggaactcgctgtgtagttaaaggacagcattgaattcctgatctttccgcttctggttctcaagtgctgagattacaggcaccctgtccccgtttatggggtgttagagatggaagctggggcttcctgcatgctaggcaagcactctattaactgaactatgtcctcagctcccagagaccgacttagacctcagggacagagatgtccaaactcaactagtgccctgccagaactgtaaccagtcccctctccccaccccccacaggacaagctttggggtccaatctttgtgggatctatgaagaatacaggacctggagaatttagggggcaagacgtgaattctttagatctcatgggggtttccccagacagcacgagccctgcactggacaacagagggtcaaggagccatagacagaatggccgctgactctcagcgttcatgggagggaaagggtttgacattttgtgtcttttaaaaataccactggcaacagctgaaatcaccaaccagactcctggcttgtctctcttcatgactgtacacaccacacaactctcctagctgtacctcaccccatctggtcgcaaggcatcagatctgggaaaccagaggtggagggggttgggccctacgtgctgcctcgcatggcccggctgacctcttgacccctctgggcttgaggccacaatgcctgcccacgctagtcaataagcaggctccattcaaggctgtctctcagtgggcagctgccaacccgctaggacaagtgctgagtgagctggggccaccgttgaggaaacaggagccagtacagaggggttcccctttaggggttggtggcaatgggcgaccctggttaatggatcattatgtccgtagtcacttacctcaggacataaaccccttgtgagtccatctatcttttgtgtcccgatgggtatcactctgggaatttctccttgccactagacagagtcaatagactgagaagtgctaagtatggcagcaggggacacgggtgactccaagtcgttccttggattcctttcccatagtgcttcatgtgggaaagcatgcttaggagagagacccacacagccgaccagtcaaagatggtgcacagagtaccaggaccccaatcctggcttttattctatgtggctgtcattcattctgttcccaaaacaagacatttagaatccagccggaaagccttcaaagtccactgcaggaaaaattacatgtaggttgaaggagttgggggctggagggaatttgctgggagtgagtgtgtgtgtgtgtgtgtgtgtgtgtgtgtgtgtgtgtgtgtgtgtgtctataattcaggtgggaggaggcagcaaaggggaggactcaaaagaattttgggggaggtgaacttagttcctggactacagtgccctcttgaggtgcagttgggaactgttagggaactttgccagcaatctccttcctctgggatccttcccttcagtgatttttttttttttttttttttttttttttgacttccacaacagacatcccattgccacccctgttgctatgaaagagcaaggttgaggtatcttttttgggctgttggagctggaatattaattctatatcaagtctattgtaacttgagagggaggcttgttttgttgtttgtctgtgtttttttgagacagaggctaaattgcccaggcaggcctggaacttagaattttcctgcctcaggtgctgggagtacaggcctggaccattatatctggcttagttttgaaatttttttcttaaaaagatttattttattttatttttagtgtgtgtgtgtgtgtgtgtgagagagagagagagagagagagagagagagagagagagagagagagaagagggtgtctgattccctaaaactggatttatgagcagttgtgagccacccatgtgggtactgggaactgacctctgcttgtccttaagagcagcaagcacttttaaccatttgttgctttgtttgttcttatttttcgaaacaagacatctctgtgtagcgctggctgtcttggaactcactctgtaggccaggcttaccttgaactcacagagatttgccctcctctgcttcctgagtgctgggattaaaggcacgcgctaacatgccaggcttttgtcttgcttttcagagcaagaaaacgcactgaaaaccagttggcatctgaccatgagcttaacattcatcagccaacatcctgtccacatctctcatcgctataaccaaacacagacaagaggcaactcagaggacggaggctttattttagctcacacttctgggaacacagtctgtcatggcggggaaggcaggacatcaggagcttgtggtcgctggtcccatggcatccacagtcagggagcagaggctgctggtgccccgcttgctctctcttttttccctttctttgtgtctttgttctttttttctttgtttatttgtttagggttttgttttgttttgagacagggtttctctgtgtagccctggctgtcctggaactccctctgtagaccaggctggcctcaactcccatagatccacctgcctctgcctcccaagcactgggataaaaggcatgcgccaccactgcctggcttgagtgtcaccctctgacacagaataggacatggagaagaaaactgcttttttgcctgcatgctctcactcttgctggtcagcctgcatttctgttgctgcggcaatccttcaccaatgttagaaccatcttccttgggattccaacatggactgaaggccaggcctctggtgccagatcagggtcactgagacagcatcctcgtgcaccggatgattgctaggttcttggtctctctagtgtgagactgaaagtagaattaggtagaaaagagcaattatcggatactgacttatgattatttagtgatttacttaaagcactgcctatttgccaagagtgacttcacttgctacagagcagaatgacctggaggaacagctgaaacaatgggttgttgcccttaacaacctgctgacaaatagccgcatatgcttctataaaatctcacttccttgacccacctggtggttttagaaaaatgatgagaatataaatggcccaggatcaaagcctttcaggacctgtcctggtttcagtccactggtgacatcttctctcctccactctcagtgttggatgcttattccagaaagatttctgaaatgagacagccagtgccaggttacctggattatatatatatatatatatacacacatatatatatatatacacatatatatatacatgtacatatatatatatacacacacacatatatatacatacatacatatatatacatatatacatacacatatatatgaatgtattttgttattatatatgcatgtatatatgtatatgtgtatatgtatatgtgtgtttatgtatatgtatgcatatgtgtgtatgtatgtatatgtgtatatatgtatgtatatattcattctagcagttctgttccttttttttttttttttttttttttttttttttttttttttggtttttcgagacagggtttctctgtatagccctggctgtcctggaactcactttgtgggccaggctggcctcgaactcagaaatccgcctgcccctgcctcccgagtgctgggattaaaggcgtgcgccaccacgcccggctctagttctgttcctttttaaaaccctggactaagacaaacatggactctagagcttcctctgagacagcaaaaagaagtcctgctggaacagatcagccagcagaatgctttcctggtaaacatgagggcccgggtttgcatgtctagaaccatgtaaaaagatgaatgtggaggtgtgtgcctgtaatcccagcgatgacaagaagggaaggagatgggtgggtccctgggcttactggctactactagcccagactactaggagagctccggacaaatcagaggcacacacatacacacacactgcgtatgtcacatatacatatagtcatgtatatttggtataattgtgactatatatatatgtagtcactatgttatagacataatatgtagtctaggtgttttttaatttgaaaattaattttaacaaaatactaaaaaactacaggggactggagagatggtttggtggttcaaagtacttgctactcttgcagaggactaggttttgtccccggtgcccaggtgaacagctcatagtcacctataactccagttcctggggatctgatggccttctctggcctctctgaacacctccactcgcctggacacatactgcacataaataaatctttaaggtgtgtgcccctatgtgcatctgcgagcatgtgtggtgcccagataggatcgctgaatcttacccgcactagctgtgtactccccactggctaaattccacactcatgtttcctttaatgttttctttcatgacaaggtttcaataagttgcccaggttgcctttgaacttgcaatcttcttgcctcagtctgctgaatagctgggactgcagcacttgagaggctgagatgggagaactgccacgagtttgaaggtggcttgggactagacaacgaggtccggcctggattacacagaccctgtctgaaaaaacaaaagaaaagactggggatgtggctcagttggtgaggagcttgcctagtatgatacctagggtttgattctcaataccacataaactggcatggtggcatgccagtcacaattggaggctaacctgggctataagactgtcttagagaaataggggtcgacaagatggctcaacttgctgccaaatctaacagtttgattctcagaatccatgaagtaaaaggacagaattactgaaaggtgtcctctgacttacatgcacacagacccaaacacacacacacagacagacacacagataaacacagggacacacaaacacagagacatacacacagacacagacaggcacagacacacataaacatacacacacagatacagacaggcacagacacacataaacatacacacacaggcaggtacacacacacacacagagacacacaacagagacacatacacacagagacatatacatagacaggcacatacacacacataaacacacagacacacacacacatagacacacagacacacacagacatatacacagataggcacatagacacacacacacactctttctttctttctttctttctttctttctttctttctttctttcttttcttggtttttcgagacagggtttctctgtgtagccctggctgtcctggaactcactctgtagaccaggctggcctcgaactcagaaatccacctgcctctgcctcttgagtgctgggattaaaggcgtcaccatgcccggctccacatacacactttcaatgcttcctggccacttgcatttcttcctctctgagtaagtaagtccttcaattctctgtccctcatttccagccattcatgtgactctcaacagcatctgccactgtcttcagttgtagaatgttaagtttgaatgattttcccatcagcattctgcagctagtgttctgctgcctttagaacctatggttgctaccgaggagactgaggaggccatgaggatccccggtccttagtatgtgacttgatcctcactgtctaaaagggtcttccatcttcctgtcagccctgatattctgaaatttcacaaagccgtttctgtgggtctctgaatccagcacactaggtaccttttaattaagagacccgagtgtctcagctctgggagacctcgatagtgcttgcttagtggctatcatgattataatcccagcatttggaggtggaagcttcagggatttcaaggctagccttgcctacatcatgaatctgaggctagcctgggctctgcgagactctatctctcggtcttcttttcctttgttgtttcttatccaactccttgttgcttgatgttagaacttcctggatctgtttctatctccctttttatttctgtctataacttttttattgggttttccacttcaactttgataactttatattcctagggacttctcaaattctgtgatttttttttaatggcctcctcagaagggtgacaagagaggagggccaggtgtttataaagtggcctgggatcctcattgtaatcttctccacctgagggccacctccgaggtccctcatggctctgccagtttggaccctgatgctgctggtgggggctgcctggggccaggaacaagtgcctgcgtggtaagctggactggggagagcagtgataaatgggtcaggggtttaccaggttgaccctgactcaaaacggaagtcaggagactggggagggaggtaaggagacggtcagtggggctggaaagaaggtggcctactggccaggacagggagagcctcacatccccaggtcctgaaattgaggtgacattccaggctgggagggaaagacaaaaaatttacaccctccaaaaccccacagtaggcaaagctgataggtcagagttcaagacggaaggtggcaaggaatgagaggtgtttttgattccttgaacttgggtgcagggctttggacaagtagcagttgaattgtaggaaattctgacccaagttgatggaagaggaaggttttttaaattgagtttgtaaggtggggaggggagctgagtgtggtggtgcaaacttataatcctagcactaaaggtgagggaggcaagaagattgaacacttgaggctagcctaggctactcatcaaaagactgtctctaaaagaaataagccagatgcggtggtgaactcctgtaaccccagtacttagaaggtggaggcaggagaatcatgagcttaattaaggtcatccttggtcacttaggggcgtttgaggctagcctgggttacatgagaccctgtcttaaaagaaaaaaaagacacaacataatcatagtattaatgataatttgaataatgacaaaggtgacattctttgctttctccaaaccaatcccaaggagaccgaactctccagacctggggccgatggtgcacacttcgagggaggattgtgagttggaaccagacctgctcaggcctccttcccctccttacaacctgctctaaccgtgaactctcctcctgtcctagtacagggctcgtagtcaggggacagcaatcacataaacatgggatacatacgccaagggcagttcctgaactgaagggtggagggaacagtgggaaaactgggcctaactccacctgtaagatccctgttcaaattaattatgacaatcactgcatatgatgacacaggcttgccaagccagcactgggaagccaaagcaggatcacaaggtcctggttagccagggttacatagcagcattttgagcacattgtctcaaaataacaaaacagtaggcttgggtattgttgtgcacacctgtaatcccagctctcaggaggctgaggcaggaggatgtggagttcaaggccaccttgggctgcatgagaacatgaggcaggggtgctgggagataactcagtagcctccttgctgcacaagcttaaggaccctaaggacccgagctccatctctagcatccatgtaaagagcttgcagtggtaggtgctgtagttccagcactgtagaggcacacacaggaggatctctagggttccttggccagccaggatagttgaatcggcgaatcctgtctcaaaacataaagtggagagaaatggaggaagacatctgatattgacctctaacttctacatgcatgcacatctgcacacacacacacacacatgcatgcacacaccaagataacagtaactgccacgactaaacacattgctaccaagacaaagcctgtctgtctgaatcagcctggaccttagtttgtgctccccaactttgtcatctactctctctactctccagctttgcctccctccccccccagttctgtgtctcccacatctctgctctggatctgagctcttagtggcagccttctccatacttagtgaccctgctgacccccacctcccagtgtggctctgtgacctaacccttgccctctgccctttctgaggcctcacagagactctttcttcccagccattctctccaagtgtgactttgaagacaattccagacctttctgtgactggtctcaaatgtctgcagatgatggggactggattcggactactggaccctccctgacgggcacttctggcccccctggggggtaccccaatggaggtaagtggtttgagggaagcctaaagtttggagaggggataaagttgggaggggactgctggaagcagagctgagcagggggtggatgggatggctcctgcggacagcaaagactcagccctttccactctgtctccccacagaggggtattacctgcacatggatcccaagaccttccctcagggcggagtggcacgcctgcgtagccctgacatatgggagcaaggccccctttgcgtccattttgctttccacatgttcgggctgtcatggggcgcccagctcagactgctgctgctcaggggccggaagcacctccggccctatgtactctggaaacatgtgaacacccagagtccctcttggatgcccaccactgtcactgtaccagcagatcatgatataccaagctgggtgaggttaagagcagacctaaaagtctggtgaggaagggatctaagggaggtggcttaggaagggaggccgagggggagctcagagggccatcatggagttttcttgcatcaagcctggtgacctgagatcatctccaggacccatgtggtagaaggctagaacccactcccaaaacgtgtcctctgacccacgcttatgcactttttaaaaagaggggacctggagccccagccatctgagttcaggatggaaaccagcagtcacagagaaaggaggccagtcatgtggctcacaggatcagggtctctttgtccctaattccgcagctgatgtttgaaggcatgagaggaaacaccgcctacctggacatctctttggatggcctctctatccagcggggtacctgcaatcagggtgagttcctgaccctcttcagtgcctctcctcctcctgactgctctctctctctctctctctctctctctctctctctctctctcacacacacacacacacacacacacacacacacccgtcaaactttccaaactaggggtgagactgctcagcaagcaggaccctggtttctcatgaattgaagcttctggtttcttggtgctacttcatcctgcacccctggctcctcaagcagtcactatgcaagagatcccctttcaacatggttatctagtctacagtgactgaccaggacccatggccacacgctggcctagcttagcctgtgtgtgtgtccataaacccttggtgggctgggagatggatcttagtaaagcacttggccagcatgcacggttcccttgtgatggcatacattctggacgtagaggcaggaggatcctaaattcaagattatcctaggccacatggcaattttgaggcaagcctgggctgcattccatgctgtctctaaaacaaaagaagtcttcggtgtcttgaaaatctgactgtaaagtcatcgaaggggttaccccacactactactctgatatatgcagagtgttccttttaggctggctggaagggaaaaatccagccctatacaaggaacttagactcgctgaacatgggctagatgctccacaaacatcatttaatttacagctttacacagagacaatgcccagtttatagactgggcagggtatgtaatttgtaccaagagcagaactcttgagcagtaggatataggttggcctcaaagcttgctaacacaccctgcagccttgagagtgggcctcagagttctggctgaggcatttttttcctaagcttcctcttgcgacagaaatcacacagccccttccttttgatatcgaggtttaatcagggctttgtagacattgggcaaatgctctatcactgagccacacccccagattctcactggagaattctagacaagggcactaccactgaacaatggctctagtttttcattggtaggttttaggagaatactttattgctgagtgttgttgctaggccccatattagaggatattagataagggctctatggctacactgtactttcagccttttgatagagggattctaggcaggggctccaccactgagccacgcccccagcccctccctgggggattctagggaggggctctctcactgagccacgcccccagctccatctctttttctctctcctctcagtctgcatgtcccagatgtgcacctttgatactctaaatgatctctgcggctggagctgggtcccaactgccactggggctaagtggacccagaagaagggaccaacagggaagcagggtgtggggcctgctgaagacttctctaaccctggtagtgagtattgtatatattcctacaatctctgggctccagtgacctgtgtatctcctacaatgacatccctaggtcaggccaggaacccagcagtctcatgcttccttcagttccggatcatggcaagaagcatgatgtcaagaattctttagttccctctactgccaaaatggctgccaagcagacctgtaccacttgcttctcacagtctttccttgtagtcattcattcattcattcattcattcattcttcatccagtattacttactgaatagccaccctgtacaatagcccagaaagttaagaactgctgtgtaaaacctgcaagaagccaggtatggtggcataagcctgtaaccgcaggactcaggaggctgaggcaggaggatgtgaggttcaataactgcctagtctacttagtgatttcaagtgcaacctgggaactgatcctgttttagaaacaaatgaaaaataagggctggggatgtaggtcagttgtaaagttcttgtgtggcatgcataaggccctgggttccattctctgcccatggaaggaacagcaagagaggaaaggggcaagcagagagagggaggcatggtgtggctcacctgtaatccaactacctgggaggataaggcaggaggatcgtgagttcaggccagcctggactggtcagtaagatcctgactgcatgtcactcggggttcctgaagaagccactgtttggaacagccagggcagataagaactgctaaggaagagttgctgtcagttaagccaaacaactcctttctgttcattccgttcatggtgatgatgccttcctgcttctcgcctccctgtactcctgcctgggctttctcatcctgtttcagccatccccgccttcctcgtctctccttcacagtgcccatctcctcctcgccaccacatagttcttgcacccagcaagttttggaggtcaaacaccaagtgatgtttgatttccattcccagtttacttattgttatgatcattcatcttcctgctctgggaggcttaccttctagaaagttcttaaacaacccc

SEQ ID NO: 32 - DNA, 26797 bp, Mus musculus
ggggttgtttaagaactttctagaaggtaagcctcccagagcaggaagatgaatgatcataacaataagtaaactgggaatggaaatcaaacatcacttggtgtttgacctccaaaacttgctgggtgcaagaactatgtggtggcgaggaggagatgggcactgtgaaggagagacgaggaaggcggggatggctgaaacaggatgagaaagcccaggcaggagtacagggaggcgagaagcaggaaggcatcatcaccatgaacggaatgaacagaaaggagttgtttggcttaactgacagcaactcttccttagcagttcttatctgccctggctgttccaaacagtggcttcttcaggaaccccgagtgacatgcagtcaggatcttactgaccagtccaggctggcctgaactcacgatcctcctgccttatcctcccaggtagttggattacaggtgagccacaccatgcctccctctctctgcttgcccctttcctctcttgctgttccttccatgggcagagaatggaacccagggccttatgcatgccacacaagaactttacaactgacctacatccccagcccttatttttcatttgtttctaaaacaggatcagttcccaggttgcacttgaaatcactaagtagactaggcagttattgaacctcacatcctcctgcctcagcctcctgagtcctgcggttacaggcttatgccaccatacctggcttcttgcaggttttacacagcagttcttaactttctgggctattgtacagggtggctattcagtaagtaatactggatgaagaatgaatgaatgaatgaatgaatgaatgactacaaggaaagactgtgagaagcaagtggtacaggtctgcttggcagccattttggcagtagagggaactaaagaattcttgacatcatgcttcttgccatgatccggaactgaaggaagcatgagactgctgggttcctggcctgacctagggatgtcattgtaggagatacacaggtcactggagcccagagattgtaggaatatatacaatactcactaccagggttagagaagtcttcagcaggccccacaccctgcttccctgttggtcccttcttctgggtccacttagccccagtggcagttgggacccagctccagccgcagagatcatttagagtatcaaaggtgcacatctgggacatgcagactgagaggagagagaaaaagagatggagctgggggcgtggctcagtgagagagcccctccctagaatcccccagggaggggctgggggcgtggctcagtggtggagcccctgcctagaatccctctatcaaaaggctgaaagtacagtgtagccatagagcccttatctaatatcctctaatatggggcctagcaacaacactcagcaataaagtattctcctaaaacctaccaatgaaaaactagagccattgttcagtggtagtgcccttgtctagaattctccagtgagaatctgggggtgtggctcagtgatagagcatttgcccaatgtctacaaagccctgattaaacctcgatatcaaaaggaaggggctgtgtgatttctgtcgcaagaggaagcttaggaaaaaaatgcctcagccagaactctgaggcccactctcaaggctgcagggtgtgttagcaagctttgaggccaacctatatcctactgctcaagagttctgctcttggtacaaattacataccctgcccagtctataaactgggcattgtctctgtgtaaagctgtaaattaaatgatgtttgtggagcatctagcccatgttcagcgagtctaagttccttgtatagggctggatttttcccttccagccagcctaaaaggaacactctgcatatatcagagtagtagtgtggggtaaccccttcgatgactttacagtcagattttcaagacaccgaagacttcttttgttttagagacagcatggaatgcagcccaggcttgcctcaaaattgccatgtggcctaggataatcttgaatttaggatcctcctgcctctacgtccagaatgtatgccatcacaagggaaccgtgcatgctggccaagtgctttactaagatccatctcccagcccaccaagggtttatggacacacacacaggctaagctaggccagcgtgtggccatgggtcctggtcagtcactgtagactagataaccatgttgaaaggggatctcttgcatagtgactgcttgaggagccaggggtgcaggatgaagtagcaccaagaaaccagaagcttcaattcatgagaaaccagggtcctgcttgctgagcagtctcacccctagtttggaaagtttgacgggtgtgtgtgtgtgtgtgtgtgtgtgtgtgtgtgagagagagagagagagagagagagagagagagagagagagagcagtcaggaggaggagaggcactgaagagggtcaggaactcaccctgattgcaggtaccccgctggatagagaggccatccaaagagatgtccaggtaggcggtgtttcctctcatgccttcaaacatcagctgcggaattagggacaaagagaccctgatcctgtgagccacatgactggcctcctttctctgtgactgctggtttccatcctgaactcagatggctggggctccaggtcccctctttttaaaaagtgcataagcgtgggtcagaggacacgttttgggagtgggttctagccttctaccacatgggtcctggagatgatctcaggtcaccaggcttgatgcaagaaaactccatgatggccctctgagctccccctcggcctcccttcctaagccacctcccttagatcccttcctcaccagacttttaggtctgctcttaacctcacccagcttggtatatcatgatctgctggtacagtgacagtggtgggcatccaagagggactctgggtgttcacatgtttccagagtacatagggccggaggtgcttccggcccctgagcagcagcagtctgagctgggcgccccatgacagcccgaacatgtggaaagcaaaatggacgcaaagggggccttgctcccatatgtcagggctacgcaggcgtgccactccgccctgagggaaggtcttgggatccatgtgcaggtaatacccctctgtggggagacagagtggaaagggctgagtctttgctgtccgcaggagccatcccatccaccccctgctcagctctgcttccagcagtcccctcccaactttatcccctctccaaactttaggcttccctcaaaccacttacctccattggggtaccccccaggggggccagaagtgcccgtcagggagggtccagtagtccgaatccagtccccatcatctgcagacatttgagaccagtcacagaaaggtctggaattgtcttcaaagtcacacttggagagaatggctgggaagaaagagtctctgtgaggcctcagaaagggcagagggcaagggttaggtcacagagccacactgggaggtgggggtcagcagggtcactaagtatggagaaggctgccactaagagctcagatccagagcagagatgtgggagacacagaactggggggggagggaggcaaagctggagagtagagagagtagatgacaaagttggggagcacaaactaaggtccaggctgattcagacagacaggctttgtcttggtagcaatgtgtttagtcgtggcagttactgttatcttggtgtgtgcatgcatgtgtgtgtgtgtgtgtgcagatgtgcatgcatgtagaagttagaggtcaatatcagatgtcttcctccatttctctccactttatgttttgagacaggattcgccgattcaactatcctggctggccaaggaaccctagagatcctcctgtgtgtgcctctacagtgctggaactacagcacctaccactgcaagctctttacatggatgctagagatggagctcgggtccttagggtccttaagcttgtgcagcaaggaggctactgagttatctcccagcacccctgcctcatgttctcatgcagcccaaggtggccttgaactccacatcctcctgcctcagcctcctgagagctgggattacaggtgtgcacaacaatacccaagcctactgttttgttattttgagacaatgtgctcaaaatgctgctatgtaaccctggctaaccaggaccttgtgatcctgctttggcttcccagtgctggcttggcaagcctgtgtcatcatatgcagtgattgtcataattaatttgaacagggatcttacaggtggagttaggcccagttttcccactgttccctccacccttcagttcaggaactgcccttggcgtatgtatcccatgtttatgtgattgctgtcccctgactacgagccctgtactaggacaggaggagagttcacggttagagcaggttgtaaggaggggaaggaggcctgagcaggtctggttccaactcacaatcctccctcgaagtgtgcaccatcggccccaggtctggagagttcggtctccttgggattggtttggagaaagcaaagaatgtcacctttgtcattattcaaattatcattaatactatgattatgttgtgtcttttttttcttttaagacagggtctcatgtaacccaggctagcctcaaacgcccctaagtgaccaaggatgaccttaattaagctcatgattctcctgcctccaccttctaagtactggggttacaggagttcaccaccgcatctggcttatttcttttagagacagtcttttgatgagtagcctaggctagcctcaagtgttcaatcttcttgcctccctcacctttagtgctaggattataagtttgcaccaccacactcagctcccctccccaccttacaaactcaatttaaaaaaccttcctcttccatcaacttgggtcagaatttcctacaattcaactgctacttgtccaaagccctgcacccaagttcaaggaatcaaaaacacctctcattccttgccaccttccgtcttgaactctgacctatcagctttgcctactgtggggttttggagggtgtaaattttttgtctttccctcccagcctggaatgtcacctcaatttcaggacctggggatgtgaggctctccctgtcctggccagtaggccaccttctttccagccccactgaccgtctccttacctccctccccagtctcctgacttccgttttgagtcagggtcaacctggtaaacccctgacccatttatcactgctctccccagtccagcttaccacgcaggcacttgttcctggccccaggcagcccccaccagcagcatcagggtccaaactggcagagccatgagggacctcggaggtggccctcaggtggagaagattacaatgaggatcccaggccactttataaacacctggccctcctctcttgtcacccttctgaggaggccattaaaaaaaaatcacagaatttgagaagtccctaggaatataaagttatcaaagttgaagtggaaaacccaataaaaaagttatagacagaaataaaaagggagatagaaacagatccaggaagttctaacatcaagcaacaaggagttggataagaaacaacaaaggaaaagaagaccgagagatagagtctcgcagagcccaggctagcctcagattcatgatgtaggcaaggctagccttgaaatccctgaagcttccacctccaaatgctgggattataatcatgatagccactaagcaagcactatcgaggtctcccagagctgagacactcgggtctcttaattaaaaggtacctagtgtgctggattcagagacccacagaaacggctttgtgaaatttcagaatatcagggctgacaggaagatggaagacccttttagacagtgaggatcaagtcacatactaaggaccggggatcctcatggcctcctcagtctcctcggtagcaaccataggttctaaaggcagcagaacactagctgcagaatgctgatgggaaaatcattcaaacttaacattctacaactgaagacagtggcagatgctgttgagagtcacatgaatggctggaaatgagggacagagaattgaaggacttacttactcagagaggaagaaatgcaagtggccaggaagcattgaaagtgtgtatgtggagccgggcatggtgacgcctttaatcccagcactcaagaggcagaggcaggtggatttctgagttcgaggccagcctggtctacagagtgagttccaggacagccagggctacacagagaaaccctgtctcgaaaaaccaagaaaagaaagaaagaaagaaagaaagaaagaaagaaagaaagaaagaaagagtgtgtgtgtgtgtctatgtgcctatctgtgtatatgtctgtgtgtgtctgtgtgtctatgtgtgtgtgtgtctgtgtgtttatgtgtgtgtatgtgcctgtctatgtatatgtctctgtgtgtatgtgtctctgttgtgtgtctctgtgtgtgtgtgtgtacctgcctgtgtgtgtatgtttatgtgtgtctgtgcctgtctgtatctgtgtgtgtatgtttatgtgtgtctgtgcctgtctgtgtctgtgtgtatgtctctgtgtttgtgtgtccctgtgtttatctgtgtgtctgtctgtgtgtgtgtgtttgggtctgtgtgcatgtaagtcagaggacacctttcagtaattctgtccttttacttcatggattctgagaatcaaactgttagatttggcagcaagttgagccatcttgtcgacccctatttctctaagacagtcttatagcccaggttagcctccaattgtgactggcatgccaccatgccagtttatgtggtattgagaatcaaaccctaggtatcatactaggcaagctcctcaccaactgagccacatccccagtcttttcttttgttttttcagacagggtctgtgtaatccaggccggacctcgttgtctagtcccaagccaccttcaaactcgtggcagttctcccatctcagcctctcaagtgctgcagtcccagctattcagcagactgaggcaagaagattgcaagttcaaaggcaacctgggcaacttattgaaaccttgtcatgaaagaaaacattaaaggaaacatgagtgtggaatttagccagtggggagtacacagctagtgcgggtaagattcagcgatcctatctgggcaccacacatgctcgcagatgcacataggggcacacaccttaaagatttatttatgtgcagtatgtgtccaggcgagtggaggtgttcagagaggccagagaaggccatcagatccccaggaactggagttataggtgactatgagctgttcacctgggcaccggggacaaaacctagtcctctgcaagagtagcaagtactttgaaccaccaaaccatctctccagtcccctgtagttttttagtattttgttaaaattaattttcaaattaaaaaacacctagactacatattatgtctataacatagtgactacatatatatatagtcacaattataccaaatatacatgactatatgtatatgtgacatacgcagtgtgtgtgtatgtgtgtgcctctgatttgtccggagctctcctagtagtctgggctagtagtagccagtaagcccagggacccacccatctccttcccttcttgtcatcgctgggattacaggcacacacctccacattcatctttttacatggttctagacatgcaaacccgggccctcatgtttaccaggaaagcattctgctggctgatctgttccagcaggacttctttttgctgtctcagaggaagctctagagtccatgtttgtcttagtccagggttttaaaaaggaacagaactagagccgggcgtggtggcgcacgcctttaatcccagcactcgggaggcaggggcaggcggatttctgagttcgaggccagcctggcccacaaagtgagttccaggacagccagggctatacagagaaaccctgtctcgaaaaaccaaaaaaaaaaaaaaaaaaaaaaaaaaaaaaaaaaaaaaaaggaacagaactgctagaatgaatatatacatacatatatacacatatacatacatacacacatatgcatacatatacataaacacacatatacatatacacatatacatatatacatgcatatataataacaaaatacattcatatatatgtgtatgtatatatgtatatatatgtatgtatgtatatatatgtgtgtgtgtatatatatatatgtacatgtatatatatatgtgtatatatatatatatgtgtgtatatatatatatatatataatccaggtaacctggcactggctgtctcatttcagaaatctttctggaataagcatccaacactgagagtggaggagagaagatgtcaccagtggactgaaaccaggacaggtcctgaaaggctttgatcctgggccatttatattctcatcatttttctaaaaccaccaggtgggtcaaggaagtgagattttatagaagcatatgcggctatttgtcagcaggttgttaagggcaacaacccattgtttcagctgttcctccaggtcattctgctctgtagcaagtgaagtcactcttggcaaataggcagtgctttaagtaaatcactaaataatcataagtcagtatccgataattgctcttttctacctaattctactttcagtctcacactagagagaccaagaacctagcaatcatccggtgcacgaggatgctgtctcagtgaccctgatctggcaccagaggcctggccttcagtccatgttggaatcccaaggaagatggttctaacattggtgaaggattgccgcagcaacagaaatgcaggctgaccagcaagagtgagagcatgcaggcaaaaaagcagttttcttctccatgtcctattctgtgtcagagggtgacactcaagccaggcagtggtggcgcatgccttttatcccagtgcttgggaggcagaggcaggtggatctatgggagttgaggccagcctggtctacagagggagttccaggacagccagggctacacagagaaaccctgtctcaaaacaaaacaaaaccctaaacaaataaacaaagaaaaaaagaacaaagacacaaagaaagggaaaaaagagagagcaagcggggcaccagcagcctctgctccctgactgtggatgccatgggaccagcgaccacaagctcctgatgtcctgccttccccgccatgacagactgtgttcccagaagtgtgagctaaaataaagcctccgtcctctgagttgcctcttgtctgtgtttggttatagcgatgagagatgtggacaggatgttggctgatgaatgttaagctcatggtcagatgccaactggttttcagtgcgttttcttgctctgaaaagcaagacaaaagcctggcatgttagcgcgtgcctttaatcccagcactcaggaagcagaggagggcaaatctctgtgagttcaaggtaagcctggcctacagagtgagttccaagacagccagcgctacacagagatgtcttgtttcgaaaaataagaacaaacaaagcaacaaatggttaaaagtgcttgctgctcttaaggacaagcagaggtcagttcccagtacccacatgggtggctcacaactgctcataaatccagttttagggaatcagacaccctcttctctctctctctctctctctctctctctctctctctctctctctctcacacacacacacacacacactaaaaataaaataaaataaatctttttaagaaaaaaatttcaaaactaagccagatataatggtccaggcctgtactcccagcacctgaggcaggaaaattctaagttccaggcctgcctgggcaatttagcctctgtctcaaaaaaacacagacaaacaacaaaacaagcctccctctcaagttacaatagacttgatatagaattaatattccagctccaacagcccaaaaaagatacctcaaccttgctctttcatagcaacaggggtggcaatgggatgtctgttgtggaagtcaaaaaaaaaaaaaaaaaaaaaaaaaaaaatcactgaagggaaggatcccagaggaaggagattgctggcaaagttccctaacagttcccaactgcacctcaagagggcactgtagtccaggaactaagttcacctcccccaaaattcttttgagtcctcccctttgctgcctcctcccacctgaattatagacacacacacacacacacacacacacacacacacacacacacacacactcactcccagcaaattccctccagcccccaactccttcaacctacatgtaatttttcctgcagtggactttgaaggctttccggctggattctaaatgtcttgttttgggaacagaatgaatgacagccacatagaataaaagccaggattggggtcctggtactctgtgcaccatctttgactggtcggctgtgtgggtctctctcctaagcatgctttcccacatgaagcactatgggaaaggaatccaaggaacgacttggagtcacccgtgtcccctgctgccatacttagcacttctcagtctattgactctgtctagtggcaaggagaaattcccagagtgatacccatcgggacacaaaagatagatggactcacaaggggtttatgtcctgaggtaagtgactacggacataatgatccattaaccagggtcgcccattgccaccaacccctaaaggggaacccctctgtactggctcctgtttcctcaacggtggccccagctcactcagcacttgtcctagcgggttggcagctgcccactgagagacagccttgaatggagcctgcttattgactagcgtgggcaggcattgtggcctcaagcccagaggggtcaagaggtcagccgggccatgcgaggcagcacgtagggcccaaccccctccacctctggtttcccagatctgatgccttgcgaccagatggggtgaggtacagctaggagagttgtgtggtgtgtacagtcatgaagagagacaagccaggagtctggttggtgatttcagctgttgccagtggtatttttaaaagacacaaaatgtcaaaccctttccctcccatgaacgctgagagtcagcggccattctgtctatggctccttgaccctctgttgtccagtgcagggctcgtgctgtctggggaaacccccatgagatctaaagaattcacgtcttgccccctaaattctccaggtcctgtattcttcatagatcccacaaagattggaccccaaagcttgtcctgtggggggtggggagaggggactggttacagttctggcagggcactagttgagtttggacatctctgtccctgaggtctaagtcggtctctgggagctgaggacatagttcagttaatagagtgcttgcctagcatgcaggaagccccagcttccatctctaacaccccataaacggggacagggtgcctgtaatctcagcacttgagaaccagaagcggaaagatcaggaattcaatgctgtcctttaactacacagcgagttccaggccagcctgggctatgtgagaccttcctgtttcaaaaaaaaaaaaaaaaacctaaacaaatccgagctgattctgaggctcttcttctctggggcctcgggcttgtccagcgacatctttagatttcagaatggagctctgggaagttcttctggccccgaggatgtcactgctggtgctggagtgtccatgggacagactggtaagaaggtaatgacccgtttgatgagggttgggagtggtggagggttggcatgacacagtgacggggagcaagttcgtcggtccaccacggtggcagcagcatgtcacctgtcccctctcctgcagacctctcccgtgtacagcttcagtttcccccggaggaagttggcgtagacccggaagagcttgcagaaagtatccactgtgagtgttcggagtggagcaggtggggtggtatctggaggcgacatcaattccttctgtcaagagagaataggatgtcactggagtgtggagggctacagataagatgtgacctggtccagaatgggaggtgggtgtgtgcagaggtgtgtcttcttcaggcagtctccacattatttttatttggatatgtggatgtgaatgtatgcaggtgcccggggcatccagaatacacccttagattccctagagatgggtgtaaaggcagctatgaggcacccgatatggatgctgggtattgaaccctgcaagagcagcaagcgctcctaatcattgagccatgcctccagccctgcgtctaatgtttcgagacagcatctctcttagtaaagcctggagctcactgatccagactggctggccagtgagtcccaggagtccttgcgagtctgcctccccagctctgggatcatgtgtaccttccacctcatctcattttctttttttttaaatggaagtgctggagatcgaacttggctcctcacacttgtgcagccagcatgccatcccttgattcatctccgcagactgagctgtcagtagtctttgttttaaatttgttattacattaattcgcttagaggactttcagcttgtgggtcccagggcatcaggcttagcatcgagctcatttccccgctgagctctccctggctcagacctcagggttctttaacagttcttagtgcatcctgtagaagggcaagtagcagggtccacaggcactcacactcacctgagctcccagtacccgaagcagtgaagtgaggctacgtagaccactgatggctttgtctatatgaagctgaagggtctctggtggctgggaggaattggctagcagggcctgggcctgcaggatggcttctgagagcagggacaggccttgccaaacttctatggcctgttcttccacctaggggagtcaaagacttagaaacagccaaccaatgtcattccctatcctccctggctattatacaggactgaaagaaggaacagaaaagcaagcagtaaggtttactgaatgaatgaatgaatgaatgaatgaatgaatatattatgagctactctatcccatgaaccattgtctctgatattttctcccacactataaagatgtgaaaatgagacccaccaacctctaagaaccaagggtggagagggtgggggcatggatgggcggtcagacagacagacagatggggacaaggacagggaccagacacaatgcaactcacctccattcttttccaagcatagaagttgactttggtatctgggactgtaatattttcactcagtctgggaccttctgcacaacccatctaaaagacacagccccaggtcaaaatgtccacaaaaagccatcagacactctgtctttgaattttaccggcatgctttgggaaccaccagctttgtcattctttattttagacatagtttcatgtaacccaggttggcctcacacttgatatgtagctaaggatcaccttgaatttctgattctcctaccaccacctcccaactactgggattgtaggtttatgccacccaaaatgttttgtgcagtacttggaatcgaacctagggcgtcttgcacactttgcaagctctttaccaactgggccacatcccctgcccagttttatcattcttgtcggggggatgaaagaggtttaagggtaaacatcttatcttgtccctaaaggtagttccaggaaggaacccaaattcccagatccctgagaaccagtttctttcttttgtggggccagggagcttaccgtgacattttctgcctccttggcctctaagatgtacctctccagaactcgactgtcgcagatgaggcgtgggggagcacagaggactgggaggcccagaggaatcagtagcaaggagagtaaaagcagcagggtgggacgttctggaagaaaggcaggctgagtgtgaggccgagaggggagggggccgtgggactgcaggggccggttggctcagcgagacccctctgcccttatagtctctgctgaccccgaccttgcaattgcttaggctctgcctgagtggccttcattcaatccctccgcgctgcacaccccaccccccaagcgaccggcatccacttctcggccaaacttcactgtgggtgcgcgccagaggctggcagatcctgggaagcagggactcctggacgcaggtaattcctttagcagcctttcactcacagagcagcgcctcatctccccaaaatcctaaattttgtccctgttctggatccccccgccttttttgtcattcacagggggctccccaaaccccttagtgcacgtggaggctgccccaccccccctcttccttgatccttggagagtcgcaggtccttgaacacggtcggtttcctgaccaatagctttagatgtaaatccttactcaaacaggagccctggaggtcacaggtccttagcctgtgagtactcaccgggcacccccatctccgcgcctagctgccggagctccttagcgacccggggctgggccagtgtccacgctgcaagtcttcatccttggaagttctgtagggccagatcaccccactagcctggaagaaagtggtcactgtccagggggcgcgggcagagtggggacgcggtggccctggccaagggtccgttcgggaacacagtgagacacagccaccggccagggttggtcccgggacactgtggctccggccgggggtcggggatgttatcagcatgtgtgcgtgcgcgggtgggggtgggggtgaagctgtgtgtgcgtgaggggtcgccagaggtgggggccacctggggtcagagcaaggggcaggacgcctgggtctggtgcttgctggggtggagcaggctgttccaggcacacacgccgtcaggggggttttggggggggggaggttctgatttccaggagggtagaccaggggggtgcgcatctgagagatttgcgggaaggtaagcctaaggctgaggtaaggataattgacctatgaaaagttgggcgccggaacacctgggggcgggggtgtgtggggggtgggagcatccttgtcttgaggcagggatttagatcagaaacaactaaggctggagtctagaaggggctcggatgctttttcttcttacagtcttacgacttgttctaagggtcagggttttccctgttgaataatgaatggggcctcctcccctccctctcctcgtttttctataatccctaaaaacccagaaaggtaactttcagaacaggcctgtggggcattactgaggacgggtgggcaggttgatagtgggttcttgcttttgtttatgcagtgctgagactggaaccccgtgcaaatactctgtaactgagctcccactgagctgggggattctaggcaggggctctacttctgagccacacccccagcccctcactgggggattctaggcaggggctctacagatgagccaggtctccagatccaatgtgtattttgtgcaagaccctttgcaggataaaaagagatacattttaatctccttcgagatctatacagcaagacaagttctgaacatggcaggcagtgtatcggaactggagtgtgcagatctgaggtgtaagagctgagggtgaacgagctcatattcaaccagggaagttaaggcagatgggatggccagaatcactatgagctcagaattgaggattgagcagtttggatggaacgtaattctaataggtatgggaggagactcaggtatatggggaaagtggggaatgtggaatgagatgaagccagagtgctctttaggaagaaccaggctgtaaaatagcctagaatgctgttctgaataactcagattaaaaagagagagaaagtgggggaaattcactcaattctttcaggaaatcttcaaatgctggtgtggtggtgtgctccagtcagtcatcccagtgctggtgtggtagtgtgctccagtcatcccagcacttaggaggctaggggaagctacatagtaaaactccatctcaaaagataaaagaagggctgaagagatggctcagtggttaagagcacctgttactcttgttgagggcccaggttctattcccagcactcatatggtggttcacaaccatccatcactccagttccaaggaatccgatgccctcttctgacttctttgagcatcgggcatatgcatagtacacagacacatatgtaggcaaaacacatcaaataaaacatgaacctaataaaaatgtaaagataaaagaaatgtctatggactctgttccacctaccaggaagggacccgaggacagggtcatcagtggtgcagacaagagtgcctgccctggtgacatgctagtggggagacagacaacgggcagatggcatttagatggcacttagaactaagtagaggtggccggagttaaaagcgcttgctctttgttcagaggacccaagttcagttgctagcaaccatatggccactaacaactatctgtaactgcagatcaaggatctagcgccctcttctggactccgaagatactgtgtacatgtgctgcatagactcatgggtaaaaatccacccgtataatcaaaataaataatctttactatataatattatgtgtatttcatatatatcacatatactatagacaatacatatacacatacaaatatatatgagaataaggggaaggagcggaggagatgatttagtcagtaaatgtttgcttcatatgtacaaggacctgacttaggttccccagcacccacattagaagctgggcataaaccgagaggtcgtggcacacacctttaattcagcactcggcaggcaggggcaggcagatctccatgagttcgaggccagcctggtctacagagcaagttataagactgccagggctacacagagagcctgtctcaaaaaaagaaaacaaaatcaaaataacaacaaaaagcatgctagcatgtggttgatagtatccccagtgtttgggaggcagagacaggaggattcctggagctcactggacagctaatttaaccaaatcagtaacttccaggttcactaagatcctgcctcaaaaaccgagcggaagaccagtgagatcatgactcagtgttacccagtgagtacttgtggcctgagacccacgtagtgaaagaagagactcaaccgctgaagctgatctaagacctccacgtgtgtgccatgtaaaactcgtacacatagatgcacatgtaattaataattaattaatgtaacaaaagtgaaatggagaagcaactgagtaagacatatgaaaggtggactcttggcctccagtcttgcaccacatgcatgtacacacacacacatacacacacacatacacacacacacatacacacacatacacacacacacatacacacacacatacacacacacatatacacacatacacacacatatacacacatacacacatacacacacacatatacacacatacacacacacatacacacatacacacacaatacacatacgcacacatacacacataaatacacacatacacacagccaacacatagaaagagacacacatacacttatacacacacatacacatatacacacatacacacacaatacacatatacacacacatacatacacatacatacacacacagaaagagacattcacacacacacacacacacacacacacacacacacactagctaaggagcaaaggctcagaaagatgcaccagaagttgcagttgcctattcagtcaataggcagtcagggtcgccagtgcatcgattctgacatgctggaggaagaagggagccataggatttagctggaagaacatgatcaaaacaagctgtagagccgggcagtggtggcgtacacctttaatcccagcacttgggagacagaggcaggcagattccaggtcagcctggtctacagagggagttccagcacagccagggctacacggagaaaccctgtctggaaaaacaaacaaacaaacaaacaaacaaacaaacaaacaaaacaaaacaagctgtagaagcatgaagaggaggagcagaggccaagccagctagtgagctagccgaaagtcagatgaacctgagcctgactcttccctggactgttgtcacctcgggctttttcagggtttcccctgaacctgctatccaggcttagcacccagctctgctccccaactgtggcccagctgtgaggcatgcaaacgaacacacacgtccacacacgtccgcatgggagctcagacccgaccaccgcacccctcccaacagcctgctctttccagggcccctgactcctgcgtcacagctctgacctatccaccggagagagggccggggacagatcagggcagggacaacatggcctgacatggcctgagtcttagaaggaggagcctttggggactgcaggacctgttccttctctgtcacaacttttcagagaaccctgggagaggggccagacccacctcggagagagagctaccattgtatttgtggggtacaagacgtgggcaaatcaatccatggcacacccagttctaatgccacataatccccctgggtgctgaggggctctggggatgcaacatcatctcaaacacactggtgtacaccatctgatggcaggtgacactgaggggacgggaaggaaacagaaccggaagctgctcataggacgtgaatggaaggggcagaaggttcgcggcaagttcaaggcagcctgggttacagcgcatgctccaggccagccagggctgcgtcccaagatctgtctcaaaacaacaacaacaacaacaaaaaaacctaaacagctggggtagagctgtgcacacctgtcaacggggcgagaggaaagaagaatcggagttcagggctatcttctgatacatagtgaattggaagccagcctgagctacatgagaccctctctcaaaaagagaaagaaataaaagacggcaacaaaacaaaaacaaacaaacaaaaaacaaacctctatctaggtccccccctcgtagctctgtcactgtccaccatcaccatatagaaccccaaagccgttctagtccttcctaaccctgcttctccatttgttttcccatgaatattctcacctatgtcatgaccccgagcaggaatcttttactttttggttgttgttgttctttgaatgataaggtctcatctgtcccaggctgggcttgaactccttatgtagtcagagacaatcttgaacttgtggttaccactgccttcacctcctaagtactagcattcgagtcatgcaccatcatgctttggatggagcctggggttcagtctaggcaagcgctttgccaactgactcacaccccaagatgccttgagcaggactttgcagggattccccactccccagaagtaagacctgctggaccagccatggtctttccttcttattaatttatttattcagtatgtgtatgtgtatacatgtgcgtgtgtgtgtgtgggggggggggggggcatgggcatgctcatgtgtgtcacagcatgggtgtggaggtcagaggtcaacatacaagagttggatgcaggaattgaacacaggtcatcgggcttgacagcaagcacccttatgagctgagccatcttgccagccctatactatggcctcccatcactggggcttgtttagacagtttgtggggtcttctttttagctgtggcttccatctggcttgccctccgcactctgtctccctcttttcttcagatctcaaatccaagcggcctttcctccataaagcctttcccaacaccccagcaggaagccattgcttatgttcatgtgttagcgtttgctataccagggccactgtgtatgacaaagttaagaatctgtccaagttgatcactgctcagcgtcgggagttgcatattcataaaatgtccccactgggagtagaaccctctgcctccctgtgtgtgccctggtacacagagatgagagtaaaggatagtatatgggtggtcttatgcctctctgtgcctgtcctgcacccagcgccggtctcagttgggggttgtgttctctgttccatgccaggctcctctctatgtgggagacctggagaaggagagtagactacaccgatccacccttgctcgctgtgcttttgggctggagaagttgctattaatttcagagcaggtgactggtgtgaactgggctctaaagatattgcagagatgaaacccagagaggagctggaagcagactgtactctacaggtcccaaaagggaaacaaattttacaacccccatgagctgttacaaacctcaggcagcacggagccccagctgcctggagctgggctgagggggatggggtgggggaaggctctgagcttttcagaaccagtttccaagcactggtttttcagcttgggaggccagccaacagcctaggagaccttctgtgctggaaagtgagttggctgggcggggagagggctggaagagtgttttgaggggagacttttggcccttggagacctggaaggaaatgagaatgctggagaagggaattctgtcggttgacagcctggggtggtggcgcacatctgtgatttcagctgttcgggaggctaaagagaattgtgagttccaagccaacctggacttcatagcaggacctatctcaaaaagaaaaaaaaaggttagccatttggtagtggctcatgcctttagttcctctgctcaggaggcagaggcaggtggatctctgagagttcaaggccagcctggtctacaaagcgagttccaagatagccagggctatacagagaaaccccttgtcttgggaaagagagagagagagagagagaagctagggatatggctcagttggtgaagcatggctgctcaagtatgaggccctgatttgatttgatttgatttgatttgatttgatttgatttgatttgatttgatttgatttgttttttcgagacagggtttctctgtatagccctggctgtcctggaactcactctgtagaccaggctggcctcgaactcagaaatctgcctgcctctgcctcccgagtgctgggattaaaggcatgcgccaccacgtcctgcgaggccctgattttaagctctaacagactgtagctgggtgtaggagcttctctttgcagtcccagcattattaggaagtgagaggcaggcagattgatggatttctctggcaagctagcctaacccaggccccaggtcccaggtcccaggccccaggccccaggtcccaggtcccaggtcccaggccccaggtcccaggtcccaggtcccaggtcccagctcccagctcccaggtgccaggtcccagctcccaggccccaggccccaggccccaggttccaggttccaggtctcagtgacagactctctcaaaacacacagagctgacagttcctgaggaatgacacctgaggctgacctctgtcctccatgcatatgtgcacataccccctcccacacacacaaaaagaaagaaaagagccatgcatataatggtgtgtgcctataatcctggcactcaggatgtggaggcaggaggatcaagagttctgggtcatcctcagctaaatagcaatttctgggctagcctgaactgcatgagaccctgtctttgggataaataaattattcttttttccccattcctgttagatgtcacagaatcaagtataactctttcggcagaactggtacctaatacacttacctacaacaagcagatgttcactaaatgccatagatgctaaacaggcatctagtggcaagatggctcagtgggtagagatgcttgctgccaaggctgacaacttgagttcaatccccaatcccccatacccacatggtggagggagaggacagactccctcaaactgctctctgactcctacacgcatactacagcatgtgctcgcgtgcgcgcgcgcacacacatacacgcgagtgtgcaattatggatacatttaaaaaataaattggttgaaaaatacatgtttatcctgacacatcgtctttccaattttttgaagcagggtctctaagatgctcaagctatcccataacttactatgcagcccaggctagtcttgaacttgtaacaaacagtcctcctaccttggcctcctggattaccagcatgagtcacggtgcctagcttgggactatgtctttataggaggaaatcgttccctgggcacggtgggctctgtaactgttcaatgaaaggagacagcgtgctgaggcagactttctactcctgacccatgctgaccatttaagttttagtggaagtcaaagggaacagagatggtgctggcttccctgagggcacctgtgaaagctgtcaatccctgggcttcctggcctcacacgccatacagaccaccgtacatgcagaaaccttcctcgtagctatgtctgtcatggttcccgactccacacctccccagccaagttttcaaacaggaaatccccaggggctggtctgccttcagtagcatcattgaaggctacgcctgcggacagtgacccagggaagccctaactgcaagccgtgtggaaacacggactagaaacaacaaacggaggccgtgtgagacagagagctgccaagacaaaccgagcgggtgtacgagggatgcaagagggctgcctgccaccagctctgctgggctccagccaggagagcagagtcaagaacacatacgtgcagggagacacaactgcagctgagcttcatacgggctcagcttctaggaggtttcaaggcaaggaagccctgaggaggtcgatggagggctagccagctaagtacgatggcacatgcctatagtcctagcacttaacgaaatgaaggcaggagatagtatgtttgagaccagtcagcctggataatgaaaccctgtctccagagggcaacaaaagacatggagacacaacccagcagttaagaatgtgtactgctagccgggcgtggtggcgcacgcctttaatcccagcactcgggaggcagaggcaggcggatctctgtgagttcgaggccagcctggtctacagagtgagttttagaacagccagggctacacagaaaaaccttgtcctgaaaaacaaaacaaaacaaagcaaagaatacacattgctcttaaaaagtttggttggcatcacctacatcagctggctcacaaccacctatactccagttccaggggaagtaacagctctagcctctgagagcacttgaacttgtgtgcataaactcacatagagacatatacataattaaaaataaaataaaatcttttaaaataaataatagaaccaagtgggatggtgcacttgcaagcctatcacttggaaagctgaggcaggaggattgacatgtgttggggactaggctggactgtataatgagttttagggcagtctgtattacatactgagatcctgtcagacaggaaggaggaaggaaggaaggaaggaaggaaggaaggaaggaaggaaagaaagaaagaaagaaagaaagaaagaaagaaagaaagaaagagaaagaaagaaagaaagaaaaaagaaaggaagatctgagactatggttcagtcagtaaaatgcttgctacccagtgagggggactgagttctacctctcgtgctcacataaaagagctgggcacaggtgtgtgtgtgtgtgtgtgtgtgtgtgtgtgtgtgtgtgtaacccaattgctgagaagactgaagcaggagaccttctgggcttgctggctgtcaccataaccaagtcatcgagtacaagtaaaagtggagagaccctgtctccaaagcaaagtggccaggagtgttgctgcaaaccagcacttgggagaaagagacaggcagagctctgggaattcaaggacagcctggtctatgaagagagttcaagccaggcagactggtgagaggccttgtctcagaaagaaacaaaggcagaaaggaagggagggagaaagggaagaagggagggagggagggagaaagggagaaagggagggagggagggaagagtgaaagaaggaggaaggaaggaaggaaggaaggaaggaaggaaggaaggaaggaaggaaggaaaggtgggtctggcacatgcacagaaacacttgttcatgtgcactttcacacacaggaataggtacacagatcctaccatgaacaacaaaaaagaagggtggagccggagagagagatggctcagtagttaagagcactgactgcttttccgaaagtcctgagttcaaatcccagcgaccacatggtggctcacaaccatctgtaatgggatctgatgcccttttctggggtgtttgaagaaagtgacagtgtacgcctattaaacaaataagtaaataaatctgaaaaaaaaaaccacaaaaacaaaaccaagggtgatggagagggctgtcacaatataaatgtcatcaaccttgtttccttagtctccacagtcactctgtgtccctcttggcccacaatgtgcctgttcatatatccctctcttgatacctctgcccaggaggtcctctttcctttcttctgcccatcaaactcctcttcatgcttcagtacccaagtcaaaggttaaagcgtgttggtccccacaaagaatttaatctttctgttccctcaggtatacatcatggcagcctacatctcttacatatctcatctgttcataagaaatgcagtctggagccgggcgtggtggcacacgcctttaatcccagcacttgggaggcagaggcaggtggatttctgagttcgaggccagcctggtctacagagtgagttctaggacagccagggctacacagagaaacccggtctcaaaaaaacataaaaaaaagaaaagaaaagaaaagaaaagaaaagaaaagaaaagaaaagaaaagaaaagaaaaaagaaattctgtatgtgtacactctcccagctacataatgagctatgtcatgccgaagccatgggaagggattttggccaactagaactagttttcagtgccacgccacaatacttggagtaagattcccttcctgactcttacttgtgacctaaacatttgtaaaagatacaatctatagcctgaactacatcatgagtttcaggccaccctgaattacatatctccaaggggggtggatgtggagaccccaccccaccccaagaatcacaaacacaggatactcaagtccctgataaagaactgagcaggtgtaggcttgtttttcaggcccagtacccatgtcactaaggcaagagggtcttgatataaagccatcctgatctaccagcaagaccctgcctcaattaaaactataagtaattaactaactaattaatttaattcagatatggtagtatacacctaatatatacctctagcacttgggaggcagacgtgtaaggatagctcacaagtctgggcttagcctgagctaacgtagtaaattccaggccagccagagctacattacaggaccttaaaccaaaccaacaaacaggctgggaagatgatacagtagaaggaccacttgctgtgtgagcatgaggaccggagtctggtgcttcagagcccacatataaatgtcgggcaggtatagttgcccactagtaatcccagtgttcaggaggcagagacagggatgcctagggcagctggctatctttactagctggaattagcaagctctgagtggagaacaaaacctcaataaataaaatgtagagcaactaaggaagctgtccagtgtcaactttgggcctccacactgatgtgtacctgcatacgttcaaatgtgtgtacacactgcccacattcacacaacccctcataaatccatatgtgcataagcaaatgagcccatacagggacttcctggaacccgtggccactctctcagctcttgacatctaaaaatacagaatattatgtagataatccatgatctgtgttgcctagggaataatgctaagaaaacaacacttgtataggtttgcttgaacagggtctcactatgtagtcacggctgggctagaacattctatgtagagcaggctggtctccaactcacagagatctacctgcttctgcctcttgagtacagggatgaagagtccgaattaccatagctggaagatagatttattcttgaagattggatttgttttaaattatgtgtatgtttgtgtccaggtatatgtgagtaggtacaaattctgtggaggtgtgagaggacctcagactcttgggaactggagttacagacagttgagagccactcgacttgagtcatctgcaaaaacagtactcgatgctaatcactgggccatctctccagcacatctccactgtaggtgttgagccaggag

SEQ ID NO: 33 - DNA, 38891 bp, Homo sapiens
caatggcgtctcccatctcccccgcatgggaaaggccggtgctgccctctgggagcctggcaggaggaacactgggttggggaggggggcatgtgtggtcccaagtctggaagaagctccttcctcttctcccgctgggagctgcgtggccgatgggagcccatctccaccgcggcacctgcatggtctcagccttccggttcggtgccgctgtgccgggggctactctcttgccagtggggaccacagccctcggtatcccataggtcaagggcgtcaggccctctcagtgagcttcagtcattcactttagaaactgcttcccggctcggtctgctaggtgttgaacatgaccgtggcactcactgaaaacacctgcctgggagggcatctgcggcaggaaggctgcttccctcctggctgaggggcactgccctgcctgacaagggcgtggcttcccagggcctggggatcgaggtctcccacagggtggcccagcaattggaagcagatggtctcaaaccctgaaacgtgccaggcattctggaagtttgcaggggtgtcctgctcagctctttatgaacccgggaagatgacaggctctgttgggggcccacggcacacatttcagggggtctgtgggacttagctgaccccacctcagacagatgcagacagcggctcatcaccggggggtccctcacgggtgtctgtctctcttaggttggagcaaaacgtcccactcactggaggcacctgaggacgacgggggctggtcaagtgcagaggagcagattaactcgtccgacgcagaggaggacggcgggttgggccccaagaagctggtaaccacggcttccctgtgggcacttggggtgggggctgccctccggggattaggggtgcttctggcaggtccacccaggcttgggtcttaggacacagccccagctcctcctaaccctggaaggtccacatgggcctgggtcttacgggcagtgccagctcctcctaactctctctggaaggtccacccagacctgggtcttggggcacagccccagctcctcctaactctctctggaaggtccacctgggcctgggtcttaggatgcagccccagctcctcctagctcctctgtctcagcagcactttgtgtttctgggttaatttccaggtgcccacccagcctcctgtagagcccactcgtgggtgcaccttcctcagaggagacagtccccacccccctaccctttatgtcatagaatgctgtcactgagccttcctaactatacatacaattctcattttgtaagaaaatggaactgctaagcatggatttgcatttgaaaaaacattcattgttaatgtcagaagcaagaaaaagctgccatgtgttaatcattccagtgagggttacaccaagaagtgtctgctgcaccttctgtgctgtgcgtggtccatgccccaaggctggaggtgcaaaggggacaggtcccggaggctctggaagggcagagaagccaggcgtggaagggtagggagagccctcggggcctctggcctctcccacagagacagcatgaaggaaggcctgggcgtgagaacagatgtgggggacacagaggcggaggccacgtggcaggaggggaaacaggctggtggaacagggtgcacggggcctggggagggatttggatctcattctttgtggggtgtggggagtgatcctggctactctgggcaccacagaggcaggagccagtacaggccatcacgtgagggcaggcagcccagtcaccgtcctcttgctccaggccatcatgtgagagcaggtggcccagtcaccgtcctcctgctccaggccatcacgtgagggcaggtggcccagtcaccgtcctcctgctccaggccctgcagccggcagcacccctccgcagcccaccacacgcagcaccaggaggctgtgaatctccccactctgtaggaacagctgccgcttcctgggtccccattccccaacggaacgtgttccatgacatctgtgcagcatccgctgtgtgccaggcacagttctaggccccggagacaaagcgggaacagcacagacaggaacctccactcttacagtgaggagagaaagaggagtgaggcttggggaggttgggcaggacagctgcagggagagggagggcagaggacgggcgagtcggggagtaccaaggaaggcctcagcaaagcagcatggaaataagacctgaaagcacggaagggccctccgggaggcgggtatgcaggcgcaaaggccctggggccgagagctgtgtgtggagaccagcgtgaggggctggggcagctgggcccaaagacagattcacagacgccttccatcgccgctgcggtagtcatgccctgcggcgtagcctcctcccaaggctggagcccttccccggagctggtcgtggccaggagctcccaccggggcagggcgctaaggcccggcactccgcctggctgctgtggggctgctgccggggcgggtgctgacgctgtctgtgcccctgcccgtctcccaccaggttccaggtaaatacacggtcgtggcggaccacgagaagggaggccccgatgcgctgcgcgtgaggagcggggacgtggtggagctggtgcaggagggcgacgagggcctctggtaagaccccgcgctcagccccggactgccccgcacgtggctgccgctgaccctcgccccttgcaggtacgtcagggacccgaccactggcaaggagggctgggtgccggccagcagcctgtccgtccggctcggcccgtccggctcggcccagtgcctgagcagctcaggtaaggcccacgtgccccgagcccacccgtgacgctgccaagggcccgggcgaggaagctgccccgtgtgtgcccggcagagccgacgccgaagcccgtccccgcctgatctccccgcagagtcgagcccggggtcggccgtgctgagcaactcgtccagctgcagcgagggcggccaggcccccttctccgacctgcaggggtagcgcggcctcggcgccggagacccgcgcgctgtctggggctgcggtggcgtggggagggcgcggcccccggacgccccgaggaaggggcacctcaccgcccccacccagagcgcctggccgtgcgggctgcagaggacccctccggggcagaggcaggttccacggaagaccccggcccgctggggcttccccggagactccagagcccacagaggaggggccgcagggaacagccccgggcggcaggcgccgggcagcggcatctcgtcctggctccaccgtgctgcttctgcctctggacggtgctttcaggggacgcgcggaccgtggtggagctgcttccggagaagtggaggatcctctggccaacggcctgaggagagcggggcacggggtctctttagcttttacaagttttaggattttttcaagcagggatcaatcccgtggccattttttgtggtactttggcctcaattcttcaccaggaatcactgtgtttacatgaaatgacaatttgatactgtatttgatagaaaactatttttttgttaccggggtttacatagaagcacgttgtttataccactaagtgactttgggggggctctcccatggaaacggatggcactccctgaagctccctggtcacaggtggatgaaaacgtgtccgtgggtgacatcaggtggtgtctccaccaccaaaagcagttagaagccaaggagattcctttatctacctagggttcattttcaaaagaaaatttaaactataatttaaacaattaacgttcttttctacaaaaaaaatgcagggacttgatttttttaaagagcttcactgaattaggatatttttattgcttttaaagaaaatacaaagatgcagtttctgcagggtgtggcgtggaccagtgctgccgaccatagctcagagagccctgcccctgcctcactgcactgcagcctcctcggaggccgcacctccactccactccccacgcgccccctgcctcccacccaggtccacctgccacctggtgaccaccttgagtacagaagtgaaagtggggagagtattttattcaagtcacagcagaactggaaaaaaactcttctgttttaccaacttcttgtgtttcagaaacatattctgttcaaaacttttgaagccctttcggtgtctagtctgcagatgtttttgtatgtgtgcacctctgaccatgtgtgtacatatgtgtcttgctggaaaggacatattcgctgtccccgtgctgctgggagggccgcctcacagcctcacggttcccagccccagcacagtggaggcaggcgtggctgcattcccctcacgctaccctcccagcggcttgtagccgtcactggccagacctccagggtgcggaatcaaataggaagcatgcagagactcggcagcttttcctctgatgtgtaagttatttggaacgcgtgctgtgtcccgcgatgtccctgatgtactgtgcaggcgcggtgcctccgtctcgtcgcacagctgcgcgcccttgtgtgaccctccccataaaggcactttacagcttcatgtttcatccactgtcacttttttttaactgctgatgtaaatggaattttaaaagcagagttctttattgtatggatgacgtttgaataaatatcagcaactcctgccatctgcctttgtctgtcaagacacagaacgtctcagcagtcggggtttccagggccgcagtgcactgtgcttgcacatggtaagtcattgttgggacggaaaagaagccggcagtgggcagggcccagcgtgcggctcaggcaccgagcaaccgctttgctttcttctgtcagacggcgatgatgacaaaatagcaacaaggttgtgcgtgtcagaaacgcaaaggcagcagaggaagcgtagtggaaccattacagaatcacaatgcagccgacactctccagaccagaaaagggagcataaagaaagggtattgatccaatagaagaagggaagggtggagaaaggggaaagcatggttaacaggaaacaacatgtaacggaagagacagcccagatgtgtctggctcacaacagacgtgatcatgttatgctggcctggaagagcatcggatcagacgtgacaagtcactgcttagagaccatcaagcaaatttatatatagattggagatttaaaataaaagaagacagaacagacaaacaccataagaaagctggtgtagcagtatcgatgacctgaaatgggattcaggacagttcatagagtaaagggggctgcgtggcaatcaggaactcataagccactgactataaagctcaaaacacagcaaagttggcagtcggcagacagcaatgttgactgtcatgaaaagtgatccctgtttgcccctaaacgtagagaaatctgcgttattttccagcacacatggagcacaaacaaaatatttgcaaaacaatgggaagatcattgaaacactgtttggcaatttaaaagcttgtttctaactcacgggatgcgggcagtctgctctctagaactggacagcgtgcacagagccacgggagggagcagccacggccagctcagattggtgtcgacagcttagtggtgtctgattttatacatgacaaaatgaacgagttaaccatttaagccaaaaaaataagactagcgtaacccaaagaaagtatttaaatacttctgtcaattaggacagttgagaaaagagaataacaaaatcaaaagcaaaactcaaactttgtacctgaaaaatctaataaaactgactaatttatagaaaacctaagaaactccatatcaaataaaaaattttaaatatgagagaaccattatgaacacctttctgccaatatatttgaaaacagataaataggatttattgttagaattggtcaagaagaaatgaaatacttgggttgatgaataacagttacagaaattgcattgcaattaaaaaaaaaattaccccaaacagataccagatctaggtgattttgtaagcatacaaacatatttataaaagctatttaaaagaatataacaagagaaagcaactcaataaagttatgaatcaaatttaaccttggtacccaaacctgacaaagattatgtaagaaaagaatcagctgggccaggtggctcacatctgttcttctagtactttgggaggccgaggtgggagagttgtctgagaccaggagtttgagaccagcctgggcaacattgcaagacaccatctctacatgaaatttaaaaattagccgggcatggtggcacatacctgtagtcccagctacttgggaagctgagaccttacaagtgagcccaggagtccaaggctgcagtgagctatgatgatcatgccactgcactccagcctgggcaacagagcaagaccctgtctctcaaaatcaaccaaacaaaaagacaatgtaagaaaaaataaaattatgaagatgaatgcaaaaattccaaatgaaatataattaagtaaaacccaattctgtgttataaataaaggtaatactttctaagcaagtaaattcatcccaggaatgcaaggggtagtatgttaatgtggctataatttgccatattaatgaagtgaagggtaaaatcaccagcttaacaaatgcaaaacaataattcaatttttattcaacatgtacttgtcatgttaggccaactaggagtagaagaaaatttctttaactaaataatatgtatcaaacaaaatctttgcagcgaactttttttttttgtttgtttgtttgtttgttttctgagacggagtctcgctctgtcgcccaggctggagtgcagtggcgcgatctcggctcactgcaagctccgcctcccgggttcacaccactctcctgcctcagcctcccgaggagctgggactacaggcgcccgccaccacgcccggctcattttttgtatttttagtagagacggggtttcactgcgttagccgggatggtctcgatctcctgacctcgtgatctcccacctcagcctcccaaagtgctgggattacaggcgtgagccaccgcgcccggctgcagcaaaaattttaagtactgaaatcctttagaaccatccccattggcagcagaactgaacggggccccactactctccagcgccatttagccgcagtactagtgactaccaccgcaaaggaaaaggaaacaaggccagcgcggcggctcaggcctgtcatcccagcactttgggaggccgaggcggcagatcacgaggtcaggagatcgagaccatcctggctaacacggtgaaaccccgtctctattaaaaatacaaaattagccgggcgtggtggtgcatgcctgtaatcccagctactcgggaggctgagacgggagaatcgcctgatcccaggaggcagaggttgccgtgagccgagatgtcgccattgcactccagcctgggcaacaagagtgaaactccatctcaaaaaaagaaaaaaagaaaaaggaaccaaggcatgctaattgaaaaataacttttcatatctagaaaaaccaggtgaattcataaactattgaaactaagaagtccacaagatcaacccacaaaaagttattaacattcctagcaataacaatactattttaacagcaacctaaatactaaaataaatgtaacaaaagttttggacaaaattatgaaacatgatagaaggtcataaaagaaggcctaaatgggagatttttatggatgggacaattcagtatcaccaaagtgttaactctcccccaagttaatctgtgtatttcatcaaaattccaacagaattctttgtggaattaggaagttgattgtaataaacatagaagataaaggtctgagtatagccgtggtgattcggggagcagaggcaggaggaggagggctcacctaccaggcatctggatagatcataaacctgtcatcagtcgtgacaagggggagagaggctaaactggtcgagcagaattcagattcccaggcagggatgtgtgcagggacctggcttgtcctggggctggtcaatctttggcacggaatggcctcttcaggaacgggtgttattgggacagctgcctttccatgtggatgatggcataaaagtatagcccccccaaacttaagattaaaacattattatgaggaaacagaatattcttattgcctagggcaaggatagatttcttacaaaagacaagctacactttaagagatggacaaaaagataagatggacaatctgagcacatcccatggtgaatttctctccacgctaagaccccagacaagggtgaaaagcaggaccaaggcccagagaagaaaaattctgctcaaaatcataactgttcaaccttgcatacattctctctcttaaactgaaagttagcatcctacagcactggtgtgacacccggcaggcccgagggctcagctgcctccagctgtggccccaagaaggcaaagcacccgggtggggtggagggagcagccccgtgctctactggctgacagtggtgcccaggcccagctcccttctctgcacagacagcagagttccgcttagcacaggcttttcctcgccagtgcacacactgtcagccattggaactggcctgcaagacagcttgctgtggcggctttgcaggcacagggcacacaggcatccgtgcacgcagctcctctgtcctcccatgccctgcaccctccgtcacaaggaaacccttgcttctaggattgcaccaaataggatttggaaccaattggtgcccaagctcaaatcctgttagtggctgcctgtttccctggcatacatgcgtcctgccgagatgcatttggcaccaggtgggatgtgctcactggttcccaaaacgagaacacatagcagtttccctggatgtttgttcaatactattcccgggacctgcccgtagattccaattccttatgggtgtggaagagcctggaaatcacgtgtgtgtaggtgtgtggcatgtgtataggggtgtgtttatgtggtgtgactttggggtatgagtgtggcatgtgtacggtgtgtgtgagtgtggtatgtgtatggcgtgagtttgggttgtgcgagcgtggttctcatgtacgagtgtgagcatggagattctttggtagggaaggagtcagggtctccctctgtcgcccaggcttgagtgcagtggcacaatctcagctcattgcaacctctgcctcccgggttctctgtctctgggaccacaggcatgaaccaccaagcccagctaatttttttattttttgtctagctttggtcttgctatgttgcccaggttggtctggaactcctttcctcaagcgatcctcagtcctcagcctcccaaagtgctgggattacaggcatgagccaccacccaagagattctgatgtcacagacatctgactcacacactccctggacagctcacgtgtgcccaccaccacagtcagggatggctgcagatgaacaaggtgctgacgtggtttctgtagcccccaaacaagcaacttgccttgagatgacaaccaaagttttcctgtgtcctccacactcaagagtgactgtgaggcggaggggcccagcccttcttgcaggcgggaatgagtggatgggtggatcaacagaggctgccacaggagagagggaggcctggcctgggaacagagctgtgaccgtgcccttccccagggtaggggctgaaggaccctcccatcctagtgacagggccacagcatgtccaaggaggccccagaggaggtcccgggagtcctgggagagcctggttagcctccctgaagggaggaagtggggttttgtgagagggatggtgcagcagcccccacacctgctactccgtgtggccgggtccagccccaggcaaggttccaggcatgcccctgggacagacgtgggagggagaccagcaggcaggtccccctcagggaggtatggagcgggtccccggggccaggtggagcccctcacacctgtgtcctcaaggacccacaccaggacaatggccataggcgggcacctgcagccgccctggccagcagtgagacgggcagagagcccagccagatagcccggttcctgccccctcccgcctgcccgcacagagagggctgcatgcaggtgagggtccatcacctgaagagcttcaccagccccgaggccatgagccactgaatctctcagggggttttggcgcttgaggttccccaggtcattctgctgcccagagagggttgaggacctctgacctggagccccaaaggggaagggtaccctaagaccagccagccatctactctcaggtgggaaaggggtagggtttagatatggccccctcccctccacgtcctgaaattaccttgggctgtgctggccgagagccgcggggaccagatttgagctggacgtgagctttattccagacggagcagctactttgtaagcgatctccctgggatcgatatcatggaggggcacagatgggcttcagctgtgctgggtggaagagaaaacatgccctgtcggcccctcagcaagtgctctgctctctggactgagatgcaggtcagcagcaagcagggaggctttgggggtgctgggggctgctttgaaaggcacccctgagctaagacttggctgttgggaaggaatcacctccctccctccagccgtaaaaagaactggacatcagcttccaaagaagtcatcagcaatgcaactgttcacatggaggatactccctgcttgaggggtcagacaggcctgctgggcaacccaggaggcttggatgaccgtctaccccagtgtttttgggatggaaagttccacattctgagaaccctcagtccctgggcaacctggggtggttagtcaccacagcttgtggcttgggcccatgacagcaggtagaaatgacgtggactgccgccagccgggcacagtggctcacgcctgtaatcccagcactttgggaggctgaggcatgtggatcacttgaggtcaggagttcgaaaccagcctggtcaacacggtgaaaccccatctctgctaaaaaaaaaaaatatatatatataaattagccaggcatggtgacgtgcacctgtggtcccagctactcaggaggctgaggcacaagaatcacttgaacccgggaggtggaggttgcagtgagattgcaccagtgcactctccagcctggcaacagagcaagactctgtctcaaacaaacaaaacaaaacaaacaaaaagacgtaagatgtggaccgctggagaatgggggtgctgcctgcagtcaaaacggagtgggggtgcccagctcagggccagaatgatcctattcccggcacttctcagtgaggctctgtggctcacctaagaaaccagcctcccttgcaggcaacggcctagctggcctggtctggaggctctcttcaaatatttacatccacacccaagatacagtcttgagatttgactcgcatgattgctatgggacaagttttcatctgcagtttaaatctgtttcccaacttacattaggggtttggaattctagatcgtatttgaagtgttggtgccacacacaccttaacacctgcacgctggcaacaaaaccgtccgctctgcagcacagctggggtcacctgacctttctcctgtcccccccacttgagctcagtggctgggcagcaggggatgcatggccactggccggccaggtgcagctctcagctggggtgttcagaggacgcctgtgtcctcccctcccccatccctctgtcacccttggaggcagagaactttgcccgtcagtcccatggggaatgtcaacaggcaggggcagcactgcagagatttcatcatggtctcccaggccctcaggctcctctgccttctgcttgggcttcagggctgcctggctgcaggtgcgtccggggaggttttctccataaacttggtggaagggcagtgggcaaatccaggagccagcccgggcttcccaaaccccgcccttgctccggacacccccatccaccaggagggttttctggcggctcctgttcaatttctttccttctagaaaccagcatccaggcacaggaggggaggcccttcttggtggcccaggctttggcgggattatttttcaaagaactttaggagtgggtggtgctttcctggcccccatgggcccctgcctgtgaggtcggacaagcgcagggagtctggggcctctcagagtgcaggaagtgcgcacagggtgctcccaggctggggagcacaggtaggggacggtgcgtgggggatggcgcctggggcatgggggatggggtgtgggaaacggcatgtggggcgtaggggatggggtgtggaggatcgggggtggggatggcgtgtggggtgtgggggatgggccgtgggggggtggggcctgggaaacagcatgtggggcatggggtgtgggggtgaggtgtgggaaagtgtgtggggtgtgggggatggggcatggaaagggcgtgtggggtgcaggggatggggcatggaggtgtgggggatggggtgtgtggggtgtcggggatggggcatgtggggtgtgggggatggggcatggaaagggcgtgtggggtgcagaggatggggcatgggggggtggggatggcgagtggggctggggcctgggaatggtgagtggggcatggggatggcgagtagggggtgtggcgtgaggatggctagtggggcgtggggatggcgtgtggggatggcgagtggggggtgggctgtgagggacagtgcctgggatgtggggctgcagccctagctcacagcatggccttatgaccccggccaccttcctgccccaggcggggtcgctaaggcctcaggaggagaaacacgggacatgccgtggaagccggggcctcacagaggtgagcagggactgccactggttttgtcctggggcccagtgggggccaacatcacctccttcccctcccatggcaaagagccagcccgcggggtggctactgcagtgccccccaaggagggtgttccctgctcgagaggaagtgaccgctccagcttggccttccctgggactggggtgcaggcgattttatcttctttgctccattctgttccttccagataatcgtgtgttcttcatcaggttttcctcagttcttgagagcttttctgatgcaaatctgctttcaccccagggcggtcaccggctctgctcacaccagcctccaagggtgtgggtgtcccgggagtgtgggtgtcccgggggcgtgggtgtcccaggagtgtgggtgtcccgggggcgtgggtgtcccgggagtgtgggtgtcccgggggcgtgggtgtcccgggagtgtgggtgtcccggaggcgagggtgtcccgggagtgtgggtgtcccgggggagtgggtgtcccgggagtgtgggtgtcccggaggcgagggtgtcccgggagtgtgggtgtcccgggggcgtgggtgtcccgggagtgtgggtgtcccgggggagtgggtgtcccgggagtgtgggtgtcccggaggcgagggtgtcccgggagtgtgggtgtcccgggggagtgggtgtcccgggagtgtgggtgtcccggaggcgagggtgtcccgggagtgtgggtgtcccgggggcgtgggtgtcccgggagcgtgggtgtcccgggggcgtgggtgtcccgggagtgtgggtgtcccgggggcgtgggtgtcccgggagtgtgggtgtcccgggggcgtgggtgtcccgggagtgtgggtgtcccgggagtgtgggtgttccggaggcgagggtgtcccgggagtgtgcgtgtcccgggggcgtgggtgtcccgggggcgtgggtgtcccgggggcgtgggtgttccggaggcgagggtatcccagaagtgtgagtgtcccaggggcgtgggtgtcccgggggtgtgggtgtcccgggggcgtgggtgtcccgggagtgtgggtgttccggaggtgagggtgtcccgggagtgtgggtgttccggaggcgagggtgtcccgggagtgtgggtgtcccgggggcgtgggtgtcccgggagtgtgggtgttccggaggtgagggtgtcccgggagtgtgggtgttccggaggcgagggtgtcccgggagtgtgggtgtcccaggggcgtgggtgtcccgggagtgtgggtgttccggaggcgagggtgtcccgggagtgtgggtgttccggaggcgagggtgtcccgggagtgtgggtgtcccgggggcgtgggtgtcccgggggttgtgggtgtcccgggagtgtgggtgttccggaggcgagggtgtcccgggagtgtgggtgttccggaggcgagggtgtcccgggagtgtgggtgtcccgggggtgtgggtgtcccgggggtgtgggtgtcccgggagtgtgggtgtcccgggggagtgggtgtcccgggagtgtgggtgttccggaggcgagggtgtcccaggagcgtgggtgtcccggaggcgagggtgtcccgggagcgtgggtgtcccgggggcgtgggtgtcccgggagtgtgggtgtcccgggggagtgggtgtcccgggagtgtgggtgtcccggaggcgagggtgtcccaggagtgtgggtgtcccgggggcgtgggtgtcccgggagtgtgggtgttccagaggcgagggtatcccagaagtgtgagtgtcccgggggtgtgggtgtcccgggggtcgtgggtgtcccgggagtgtgggtgttccagaggcgagggtgtcccgggagtgtgggtgtcccaggggtgtgggtgtcccgggggcgtgggtgtcccgggagtgtgggtgtcccgggggagtgggtgtcccgggagtgtgggtgttccggaggcgagggtgtcccgggagtgtgggtgttccggaggcgagggtgtcccgggagcgtgggtgtcccgggggcgtgggtgtcccgggagcgtgggtgtcccaggggtgtgggtgtcccgggggcgtgggtgtcccgggagtgtgggtgtcccgggggagtggatgtcccgggagtgtgggtgttccggaggcgagggtgtcccgggagtgtgggtgttccggaggcgagggtgtcccgggagtgtgggtgtcccgggggcgtgggtgtcccgggagtgtgggtgtcccgggggcgtgggtatcccagaagtgtgagtgtcccaggggcgtgggtgtccggggggcgtgggtgtcccgggggtgtgggtgtcccgggggtcgtgggtgtcccgggagcgtgggtgtcggggactgcagggacatgggcctcccctcccactcctgccgcccagggcacctcctgtgaggactcggagtccgtgagttcccacctccttgagcccgattctttggtgtccccgcctgcatcctcagcctccttccaaaccagaccagttctctaggggcgtcgacgtgtgaaactgattttaaagaaaacaggcagtggcctttctctcggccccacgtggcccagtagcgctcaccttccgtcccttcttccgcgctcagtaaccaatttaggccgctcctgcagaactcgggctcctgcccaccggcccacagcgtccacctgaggcctcgtcctcccagcaaaggtcgtccctccggaacgcgcctcctgcggcctctccagagcccctcccgcgcgtcctctcagccccgctcgcctcctcccggggcctccctctcccgcctgcccccaggcccgtctcccctcgcgggctgaggcaggttcgggcagcacggccgccccggggcgggggtcactctccaccaccgcgtggtgcccacagctcacggcgctcccgggtgacggtcccctcggctgtagggcgtcctgaagagcggcctgctcggagctgagcgcacggggttgcctcgccctgggcgtctctggccctcaccagccccgtcttcccatgggcaaaacggcggtcctgtttgtccacaagtaaccgtcggggttacggaggggccaggagctgcggcggggggctgtgctctcaggaccggccccaggaggatccgcgcgaggtctggagctctcaggggtcgcgggggacagaggggccccaagcggaggcggggaaggcggcagaagcccaggaccgccaagagctggcgaggaagcccggggctcgctgtcgggggagccgggcaggggccgcgcctcggaccaggacggaggcctggggaaggcggatctggccgccggagacgcggtgcgggtggagacgagggatttggatttccgcgggcggctgtacggatttccacgcgcggttcacgtgggccccagggggttgcccggcacccggggccgcgccgccttctcctcgccggcatcgacccgcagcctcacgtttacgcggcggcgcccgcagcccccttcggcccggcttccgcgcgtgcccccgagcgcgccctcgggatcagcccccggaagcagagaggccaggccgggaaggatgggcgacgggggtggctgacccgggagcacggcagggaggacacccagccaggcccgcgagcagcgccgctcccctcctccaggacgggcgggaacctgcgatgcccccgccgcgtgggccgtggggcggtctccgaggcactgggcggggcacgcggtgggcgcttcacggaactcgcatttcccagtcttcgtaacccaggaggaagcccacggcgtcctgcaccggcgccggcgcgccaacgcgttcctggaggagctgcggccgggctccctggagagggagtgcaaggaggagcagtgctccttcgaggaggcccgggagatcttcaaggacgcggagaggacggtgagcccagcctcggggcgccccgcgccgcggacactgcaggcggcggtgaaccaggccgcgtggggccgcctgcgtctctttggctgcggctgtgggcggcgaacacgcagcggcgcccgcgcggcgctttctgcgggggtcgctttccgcccggggtgactccgctttcctgggcgatgccccccacccccaggcacgcgctctccccgtgcggccgcaccgcgcatgccggttttcacatcagaaaatacgatttgcaaagcacacttagggtgtcccccttaacttcccaagggagtccccccagtccccgaagggtccagggcagcctgcgcatcgcagacgcgcgcggctcgcagaagggacgtggtgagaagctggcccacagcatgccaccagcggcacctcctcagggcacgtgtcggggagaaacaacacttagggacctgggactttctccagctcacgctcacgggtcacctcacactccaagatcacctcaaagaggacacctcacacagggcacacttcacactcacaggtcacctcacactcacaggacacctcacactcacagggcacacttcacactcacgggtcacctcacactccaagatcacctcaaagaggacacctcacacagggcacacttcacactcacaggtcacctcacactcacaggacacctcacactcacagggcacacttcacactcacgggtcacctcacactccaagatcacctcaaagaggacacctcacacagggcacacttcacactcacgggtcacctcacactcacaggacacctcacacaagacacctcacacggggcacacttcacactcacaggtcacctcacacccacaggacacctcacacagggcacacttcacactcacgggtcacctcacactcacaggacacctcacacaagacacctcacacggggcacacttcacactcacaggtcacctcacacccacaggacacctcacacagggcacacttcacactcacgggtcacctcacactcacaggacacctcacactcagggcgcacttcacactcacgggtcacctcacacccacaggacacctcacagaggtcacctcacacaggacacctcacactcagggtgcacttcaaacccacaggtcatttcacctcacactcacaggacacctcacacaagataccacacggggcacacttcacactcacaggtcacctcacactcacaggacacctcacagaggtcacctcacacggggcacacttcacactcacaggtcacctcacacccacaggacacctcacagaggtcacctcacacccacaggacacctcacacaggacacctcacagaggtcacctcacacccacaggacacctcacactcataggtcacctcagtcttacaggacaactcacactcacaggtcaccttactctcacaggacacctcacactcacaggtcaccttactctcacaggacacctcactctcacaggacacctcacacagggcacacttcactcccacaggtcaccatacctcacacagatcacctcatactcacagatcacttcattctcacaggatacctcacactcagggcacacttcacactcacaggtcacacctcacacagatcatctcattctcacaggacacctccctctcacaggtcacctcacactcacaggacacctcacagaggtcacctcacacccacaggacacctcacagaggtcacctcacacggggcacacttcacactcaggtcacctcacacccacaggacacctcacagaggtcacctcacacccacaggacaactcacagaggtcacctcacacaggacacctcacaaaggtcacctcacacccacaggacacctcacactcataggtcacctcagtcttacaggacaactcacactcacaggtcaccttactctcacaggacacctcacactcacaggtcaccttactctcacaggacacctcacacagggcacacttcactcccacaggtcaccatacctcacacagatcacctcatactcacagatcacttcattctcacaggatacctcacactcagggcacacttcacactcacaggtcacacctcacacagatcatctcattctcacaggacacctccctctcacaggtcaccttacactcatctcacactcacaggtcgccacacctcacactcacaggatgcctcacactcacagaaccacatctcatatgcacaagacacctcacactcaggacacctcatgctcaaagaagcctcacactcacaggaggtccagctgtctgaggcaaaggctaacatgaccctttccagacaaattgaggatggtcatgcctagcatttttatacacctagttttgaaagcatttctcatctgttgtattctcacagcaccccgtgagtttaagttcaggtggccaacagtttcttcagcaatcacttttttctgtggagtgcttttgctgtttgtggaatattttgcatctgctactgcaccctctccccgtatgtgtggccaccctgtcagaggtggagctgtggctcagagcctgtgtacctcgtcccaggtccacagctcagcgacagaagagtcagggttgaacctcgggtgttctgacttgggagcaggaaatgtgtggtcacccatagttccagatgtcctggggaggggccaagattagaagaaacctacctcagctccagaggaaagtctggcttcctgagcccaccccgccagacccaggtccaagtcccccaaccccagttcatggtgtgtccagtgcttaccgttgggtgctctggtgaaggtgcatctcacgaggcttgctctcttgttccttcagaagctgttctggatttcttacagtggtgagtggatgatcaccaccagtcctgcctgcaacccttctcagcttactgacaccagcccactccacagatggggaccagtgtgcctcaagtccatgccagaatgggggctcctgcaaggaccagctccagtcctatatctgcttctgcctccctgccttcgagggccggaactgtgagacgcgtaaggccccactttgggtcccatatttgcagagggccctggggagctggtggaggtggcctggccaaccgggctgcagggtgcacaacctggtggggtgtgtaggccgggcattcagggctcagccccagttggaaattggtctaggtgaccttgaaatcccttccagtctgaggtctttgacagggacccaaggttctgattatcagactcagtggccccttgggctcccggccctgggcaattctcagccctcgagatggcccagctgagagtccctgtgtccctgtcccacttccacatcccaccacgcaggaccgcttggtaaacttccccttctctactttccattacaaaggtttgaggggtttgttttttttttaaccatctgaatattaaattatcacaaagtttgaggcccccaacctcccttgggttcagtaattcactagaaggactcatagaatccactgaagtggatacactcacaggtaccgtttattacagcaaaggatgcaggcttaagtctgcagagggaccaggcacaagcttccccttgtcctctccctgtggggtcatgtggacagtccttaattctcccagaatgacgtgtgacgagacgtgggaagtactgccaacttgggaagctctacgagccccggtgtccagaggttttatcagggctcaatcacatagacccagctgaccacccgcatggctgacctcagtctcagcccctccagaggctacgccgatagtgcggcccaaggccccaccatacatcacattgtcagctagaccatccagcatggctcaaggcccaggtaaacaccaacattccctcaggcaagaccttccaagggcttagcggtcatttcccaggagccaaggcaaaggctaccctttctctggcacagcagttcatccttgaccacccaagaccacattcttacactgaatgagctctcctgtgcagcagccattttcttctctaagcagaagagagcccagcaagctggaggaggctgaagagagaggcttcctgctggtcatctgggtccagaatgcctggagatctctgctcagccctggtgcccagcagccctggtgtgcatcctgcagggcaggccttcccgccggagtcctggacttgctcagggccactccccttgcccatgtcaaccaaagtcaggctgccggttctgcttcttctgtctgagcccatgaccagtgctgggactaactgtccccaggcgggctcacggtggtacgaggccagcttggagaactgtctcagctctctggtcctctcgtcagttgggtctctgattggaaagtcccttggacacttttaccatccccattggactttcactttcccccaggctcccatcagctgctcggaagagtggtcaccctggaggccactgcccaccagccaggcaccccccaaatgcaaccgcagccagcactgccagccactggcaaggctgttcagacatgtggctcctctgatccacgccttgtcctttggatcagtccacggagcaggtggtgccaagctcaggctctgtcacccacagctcagtgccaccttccaggcagaacaccactgctgacccagggcatggccaccccgggggctggctctcgctgacccccagaagcccctctcagggtgtccccttcctgtccccagacaaggatgaccagctgatctgtgtgaacgagaacggcggctgtgagcagtactgcagtgaccacacgggcaccaagcgctcctgtcggtgccacgaggggtactctctgctggcagacggggtgtcctgcacacccacaggtgaccaggcttcatgtcccagtcccagatgacaccagtccctgtcccactacggattatcttactggacaaaagacgggtgggagtggcttcacatctactgagcactaactatgcactgaccaattgtgaggtgggatctgggcaccaagggtggcacaggccagagcgacagtgactaggatgggcaccctgggggcaatccctgaatggcctcaggccccctgccaattctaggcagaccaggggagccaagcaaggcactatctcacgtccaactcccactcgcaggacctccgccagggttcatgaatctacttcggcacagccaatgtctgtactgactgctgcccactctgcattccaaaactcgtaaaggctcctgggaaaatgggatgtttctccaaaccagcctggaacgaatgggctgcacttccaaaagcagggacaccccacacccactgtgtctcaaagaggcggacgtgcccaccctggccacacagcctgggactcagcctgccacctcctcgggcttcctttctggcccaagaccttgattgaagcagatcaaaactaagcatgggatcaaaacaacacagtttgattcatctttaggtagaatttcattcaccttctactaaagtcaaacaacacatcttctccctgaaaagtgagcagagggcggttttaagacgtaagccctctgtttcctccaaaaccagccctgaccattgtctcctcagccagccacttcttcaagggcctctcatggccgggccccaccagtcaggcccagccgaggccctgccttccaccacccctgggccctgggagctcctgctcctgggggcctcccatagcctcggcctcaaggcctctcagaggatgggtgtttctgaatctttcctagtggcacgttcatccctcacaaatctctgcatctttctgacttttgttttacacagttgaatatccatgtggaaaaatacctattctagaaaaaagaaatgccagcaaaccccaaggccgaattgtggggggcaaggtgtgccccaaaggggagtgtccatggcaggtaaggcttcccctggcttcaggattccaagccctgagggtcttgaagccttttgaatgtgaacaacagctctggaagggaaaatgggcaggtcagccccaagcccaccaggctccaagtcagcacacctagcacctccagctcgcggcacccccatgcttttagtggggcaaggaaggagaaaagaaaacgacactcactgagggtctaccctgtgcagagaaccctgcgagatgccccatccgagttgtcacgtcgtcctcacggttactctttgaggtgggatctttgcctgatctttgcaaaatcaggagcattggatcaaagctatgtgaagatcctgtgaggtgaacagtgaaatctcacagcgacatttgtattcttgggccgtgcccaagagcacgtctcggctagagaggggcacagcctcccagagccaggtctgagcagctttgcctgggagggatctgcaaagaccccaggatttcagaaagaaattgtgcaatgccagaggttccttggcatgcccgggagggcgagtcatcagagaaacaatgacagcaatgtgacttccacacctcctgtccccccgcccaggtcctgttgttggtgaatggagctcagttgtgtggggggaccctgatcaacaccatctgggtggtctccgcggcccactgtttcgacaaaatcaagaactggaggaacctgatcgcggtgctgggtgggtaccactctcccctgtccgaccgcggtgctgggtgggtgccactcttccctgtccgaccgcggtgctgggtgggtgccactctcccctgtccgaccgcggtgctgggtgggtgccactctcccctgtccgaccgcggtgctgggtgggtgccactctccgctgtccgaccgcggtgctgggtgggtaccactctcccctgtctgaccgcagctctcaagtgtctcaggggctgtggctctgggcttcgtgctgtcacttccacagacagacagacatccccaaaaggggagcaaccatgctgggcacgactgctgtggccaccgtgctctcagccactttcccatgcccaaataaaacgataaaagactgggggcttctgcccatcctgcctcacttgaccaagagcccagaagaggatgcgacacccagggcctcatgggaccaccggctggcaggggttctgctcactgggtttatgggtgagacgagcactcccaggagggccactgggccgggaagaactgtggagaatcggggcacgccctgtcctcccagctgccagggcacagcatcccttccccacctcaacacccagaccccagattcaccccagttcacttgtccccacacgagccacaggctgccacctggggcaggctggccccaccttggggttagatgcaggtccccttgccccagaaggagactgcagcccctgcagacctagaaatggccacagcccatccccatgcaccagggggtgaggtggcaggtggtggaaagggcctgaggggggcttcttccttccaggcgagcacgacctcagcgagcacgacggggatgagcagagccggcgggtggcgcaggtcatcatccccagcacgtacgtcccgggcaccaccaaccacgacatcgcgctgctccgcctgcaccagcccgtggtcctcactgaccatgtggtgcccctctgcctgcccgaacggacgttctctgagaggacgctggccttcgtgcgcttctcattggtcagcggctggggccagctgctggaccgtggcgccacggccctggagctcatggtcctcaacgtgccccggctgatgacccaggactgcctgcagcagtcacggaaggtgggagactccccaaatatcacggagtacatgttctgtgccggctactcggatggcagcaaggactcctgcaagggggacagtggaggcccacatgccacccactaccggggcacgtggtacctgacgggcatcgtcagctggggccagggctgcgcaaccgtgggccactttggggtgtacaccagggtctcccagtacatcgagtggctgcaaaagctcatgcgctcagagccacgcccaggagtcctcctgcgagccccatttccctagcccagcagccctggcctgtggagagaaagccaaggctgcgtcgaactgtcctggcaccaaatcccatatattcttctgcagttaatggggtagaggagggcatgggagggagggagaggtggggagggagacagagacagaaacagagagagacagagacagagagagactgagggagagactctgaggacatggagagagactcaaagagactccaagattcaaagagactaatagagacacagagatggaatagaaaagatgagaggcagaggcagacaggcgctggacagaggggcaggggagtgccaaggttgtcctggaggcagacagcccagctgagcctccttacctcccttcagccaagcccacctgcacgtgatctgctggcctcaggctgctgctctgccttcattgctggagacagtagaggcatgaacacacatggatgcacacacacacacgccaatgcacacacacagagatatgcacacacacggatgcacacacagatggtcacacagagatacgcaaacacaccgatgcacacgcacatagagatatgcacacacagatgcacacacagatatacacatggatgcacgcacatgccaatgcacgcacacatcagtgcacacggatgcacagagatatgcacacaccgatgtgcgcacacacagatatgcacacacatggatgagcacacacacaccaatgcgcacacacaccgatgtacacacacagatgcacacacagatgcacacacaccgatgctgactccatgtgtgctgtcctctgaaggcggttgtttagctctcacttttctggttcttatccattatcatcttcacttcagacaattcagaagcatcaccatgcatggtggcgaatgcccccaaactctcccccaaatgtatttctcccttcgctgggtgccgggctgcacagactattccccacctgcttcccagcttcacaataaacggctgcgtctcctccgcacacctgtggtgcctgccacccactgggttgcccatgattcatttttggagcccccggtgctcatcctctgagatgctcttttctttcacaattttcaacatcactgaaatgaaccctcacatggaagctattttttaaaaacaaaagctgtttgatagatgtttgaggctgtagctcccaggatcctgtggaattggatgttctctccctgccacagcccttgtcaatgatatttcacagagaccctgggagcacctgctcaagagtcagggacacacgcatcactaaatgcaagttcccaggccctggctgcagtgggaggacctggcaagctgcactcttgctgagtccccagggtggtggaagaagaatgagaaacacatgaacagagaaatggggaggtgacaaacagtgcccccactcagactccggcaagcacggctcagagagtggactcgatgccatccctgcagggccgtcctgggcaccactggcactcacagcagcaaggtgggcaccattggcactcacagcagcaaggcaggcaccagcaacccacctcgggggcactcaggcatcatctacttcagagcagacagggtctatgaactacagccgtgggctgcttccaaggcaccctgctcttgtaaataaagttttatgggaacacacccatattagtgtccatggagtggccgtggcagagacgtccagccggacagaccagctgacccgccaagcccagcatggttagtgtcaggacctctgctgaagatgcttgctgaccctggccagaccccggttcctaatgccccctaaacgggacgggagccagtggcgggccctgatccaggtcagagctggctctgctttctcttttgtccgagtgaccatgcctcagtttcctcatgtgtaaaacaggagcccaccgtgatgcttatggtgggatgagatcagcatggatggaacaaggccctggaagggcccatgccatggtcatcgacagcaaagccactctgcagacagatgcttcagtgaattggtagaaaattctgcaaccagaatgcccggggctcctgagggcctaagcccagcccagggttctggaagccactctgacttcttgggagtggaagttggcaggactcttcctgggaagaagcggagggtggggatgagaggacagttcaggagcccacccagacccacaggaggaaactaggggagtcatgcggggtcctggtggagcgccagcctcccttcctgccaatgggaaatgcaggcgcccacctcatggtgctgccggaggagggggcccgggactccccagaggcttcgctgaagggcctgggcgcccccaaaggctacatgtttcatatgggacgtgccacctgccacggctcagctccagctttctgtgagtggcgagatagaatacggggaggccactggccatgggcctgggacagggtgggatgaggcggcaggcttgggccaccaaagccagcatcgccacccagcattgatgacaaagactgcgtgtctgccatgagcatcctgctgttggtgcacacaccgcattggtctctccatacaaacatgcctagaggcgatgtcagagggtggagaccaggagaggcaggagtcagacatctggtgccaccaggaaggcccttctcagaggaccaggctgtgcgtggtgcccgccgtgggaggccagcctggcgttggcatccagcatcatcagtttgtgcagtcgggtggggctcagtgagtgcctcctgtgtgccaggcacaatgacgcacaatgtgtgcacaccaggctcatgtgcaggtggctgcgagacagggcgacccatcaaggcagatgcaccatgaggcagtggccagtgctgtgggtgttaggggcattgctccccggccactacggcatagcaggcagtgatcgccacactggccaagctttagaccatttattccagagaccccagaggcaaaaagcccggctgcacctcccagtgactcccacagccattgagcagagacactcaggaccttgtgatgggaggtttctgcactggagaacgagcccagaagccctctcagcctcggaacagtgtggccagtggtgggcaggtcaggaggggcttcagacacagcctgtccctccagatggtcacgggaaggtcactccccacagaagtacgttttggggccatgcgggcacagaaggtttgggggtgggtggggcaggtgccagcctggcctgtgggaggccatggtgcagatgccaagccccccccgtgacatgagaccacctgataccacccagagagtggctgtgagcggaagggcccgcccagaaacaagcagggccttggggcagaagtcctgggctcagatcccacgctcactgccagcggcctcggctcaggcttctgcgctctctaaacttagttttctcttctggaaaaatgatggggaaaatgatatttgtatgtgaggactgagagttaaatgtaaacatctggaaactacaaaatgagcacgaaatgatgtttttattcttagaacagaaagtccccacacccgcggccctggtgactgatgaggatgaggttctgcggggcctctctggccgcccagctctgcctggggaaggtggggccagagtggatgtgttcccagcgtggtcactcccctgcctcgccagcaggtctcggctccaatcaggaggcctaagccaagtgataagcagccagacaacagccatcccagctggggcgtggactttgctccagcagcctgtcccagtgaggacagggacacagtactcggccacaccatggggcgcccactgcacctcgtcctgctcagtgcctccctggctggcctcctgctgctcggggaaagtcgtaagtgcccctcgcccttcagacccaaaagcagcgccagggagcagggaggggcggcagttggggaaaccctctcatctctgcagcctggacggtgggtgccttgagtgctgccagaggctgggctcggatggctgggcttggcctttccagccaacggcatcctcaaggccagctgtggctccctggggctgagagtcagacgggcggatcagaggtcacagagacaaaaacacaaggacagagtcagagagagaaagggagagggaaggagaaacggagacacagtgagatgggaggccaagaggcagagacagaggtagaaagacggagacagagagagagggaggggttggggcaggcagagacaggacagttagccatctgccaccacagggaggcacaggacgaggggcacagcagaggagctcccagggaggaggaggctgagccgagccagtgccaccactctcggactggctccgtcggggaaggagctgcctaatgcacagctggacaggtgggggcagcagggctgtccaggacccccgggtctgtccaaaagcagaggcccagacaggacagaagccaggcaagcctggggacagcggaggaagaggaggcccctctggtggggacacgagagacagggaccctagacttgtttgcatcctggacaaagtggacaggcaggggcaccaaggggacccaggcctgggaagggaatgtgtgagggagagacggagcagggggagaccctcgtggggtggaaaggggagacccctgggaaggctgagtggatcctcagtgcatcactgacctaaacggcccctccgcctggtgacttggagctccagtcacatcacacgggggtcttctccatcccaccctcaaccccctgccctccccagcctctgtcccctgagccacatcttcctgtctcccacgcggaacgggactcccgtcttcatggggtactgtgtggctccaactcgcccagccttcttcctccccctcaggccacactgccccctgcaggagcccactgtgatgcttgtggtgggatgagatcagcgtgggtggaacaaggccctggaaggacccatgccatcatcatcgacagcaaagctactctgcaaacagacagatgcttccgcgaattggtagaaaattctgcagccggaatgctctaggatcctgaggccctaagcccggcccggggctcccgaggccctaagcccggcccgggactctggaagctgctctggcttattgggaatggaagttggcaggactcctcttcctgggaagaagcagagggtggggatgagaagacaggccaggagcccacccagacccacaggaggaaactaggggagttatgcagagtcctggtggagcgccagcttcccttcctgccaatgggaaatgcaggcgcccacctcgcggacctctgggtccacagggtattggcacccttagctgtgtgatgcgggcctggctcataaccatggcctgtggtgtccccgggggccggcctggaccctgggtggacatggccagccccggagagccagggccaggccatctctctcccctactctgcctcagaggcctcggcagctgcactgtggggtgggtggggctgaacacaggtcccagaaggtcccactcaggaccctgctgtgcacacttttgattttaataaaatcagaatgcgcacagcatctgcagtctagcctttaaacgagcacagctgtcctggcagtcacggaagttcttctggggcggtgggacctcagcattcctttgctggtactgctacaagaaaggacaatggaccaagtagcttaaagcaacagaaacatttctcccacagctctggaggctggaagttcaaaatcaaggcgtcagcggggctggttcctccagaggctgggagagagtctgctctaggcctgtttcctggcctcggggtgccagcggcctcacagcccatggcttgtgggagcattgctcccatcgctgcctccatcatcgcatggggttctcaccatggctgtttttctgtcttcttttctctcagaaggacaccagtcattggatttagggctcactctactcccataaaatgtcttcctaactaaatacatcacaaaagttctatttccaattaaggtcaggttctgaggttctgggaaagacatgaatttggagggacattattcagccctgtcctgccacctgtgagtgttttctgcaatccaactttttattttaataaaatcagaatacgcagagcacctgcagtgccagcctttaaactactgctgttgtactggcaatcattaaagctacgtggcttcagtttcaatctttacattcaacaagtttaaacccattcttcatgagtttggaccttactgactgaaaattttgcttgctggtaaaacttgctcaaatgcagttgctgactgtggaattcactgatgttgccaaaacaacaaacacaactgtgtgctcgaggattgcaatgctcccaacagcttctgaagaaacaaaccacacgacaaatgtctaccaatctggatgctccatatcagagttctagagtgttccattaatttcttgagacaagtgcctaaaaaccttgttttaatttcgttttgccaaaatcccattttactcacatcagaaagtgtggccacgtggcccagacccggcctgctcagtctgactgaagcgttgatgcgactcagccataacagatagcagaagcgcccagattcagtccagagggctgagccaggcacgccatctttccttcattccctcaacacatattggttaagttccggccgtgctaggcacgggcatacagctgtgaccaaacacgtcaagtctttttccagcggagggaaggataagcctgtcagcatgtaatgtcagagaggggttgggtgctagaagacaaatagcacagtgtaaggggatgaaagagacacgagtgggggcaacgtcagagggcgtggtcagggagggtgtctcggagggcgctgggcctgagccacttgggtatctgtggaaagaatgttccagacagggaggtgactggtgcaaaagtcctggggtgtgagtgttgggctcagccagggtcagcgcagagcccagtgtggcagagagaggtgaatgagggcagagttgaaggtggtgaggcctgggaggcctggccatgggaagaccctgggctctgttctaagaccactagaggcagattctgggtagtccttgacttccttgcatcaccctttccaccccgtgcctgccacctgtaccctcttcctcacacagtccagctcaaccttataggccgtgtcctacccccatgagctggggagagctgagcaggcttcagggagatgggaaaaggcgggaactggacaggggctgcaaaggaaaggtgacttcttactggtcaatcagcctggggatgctcgggggtggatgccaaggggaacagagctgtggccgctatcacagaacagcgagttcctctaagaggtcagaggaggcgcaagggatcgaccagagacagtgagggcgtcaggctccagttgagtggggaccaatccttgtggcaagtctgtgaaccatcactgtggctctagggtagcagagaaaaaagcaggcatatgtccatctggccacaaggaaggagaccaaggggaagagagaaggtaccaagagaggtgttcacatggaggtgcgtcagaacaccgagggcaaggcagaacgcggtcttcagaccccaactggagcccaggaggcccgcgagtcccagtttgggaaacactaagccaggcttggataacttgtctgaggctgtggtcatcccaacatgagagccagaggccccaagggagatgggcattccccacccctcagcttcctcagtgccttttgtggagtggaggtgacatgaggctgcaggttgcagggagccacgtgtgggctgcatttcagagcaagtgtgtgggagtggagcagacacgcagagtaatggggcagggtcaagaaataataaatctaagtctagcgttggtgggataatgtcggtgtcactaaaagaaatggggaatttggaaggtaaagtaactggaggtaggaatgaacccaagatttactaagcaccttctgtataccaaactcaacactaggagtttatacaatctttaaaacagctctaagagtagatattataattcccttctgccaataataaataataagtgactaaggtgtttttgaagctcaagattgcttgattctgcagtcttgttttaaattttggacatggagagtttggagttctgagatgagggaaggcatctgtcatagtgagagagctgaaaacatggagctcaggacaaaagtcagtgctagagagatcagttggaagagttatctttattgtagtgagacattgaatttttcagtggaaaaaaagcacagaaaaagactacagagggccaagaaaagaaactgaggctgtcaaaatgaaaagaggaggaggagtgggtgagagacaaaggagacacaggcagagagatgtggacagcacagcccacagacacacactctacaagggacacagactctcggatccagggcattttaaccagcagatcaagactcatttgccagtcatgaaatcaactcagtatttttttttaaaagagtagaatcaaatagaaaactttgtactaagtactgtattttaggaaatactaataaatactatttcttgaaagttggcatgtatgtgtgtcctggcacttcataaattgtactattatagtttgtaattgaaacagcatcaccaatccccacataacaaagagcagagaccttaaagacgagtggggccaggctgaaggggcacagcttgagccaaagcacagaacagtgggctgaaagcaccctagggagggagaattcaaggaagggggcttgggtggccaggctgagccagcgtgagcatgtgaggaggctggtgagctgattgggtgggatgtgtctacttctccagagaagggtgcatgggtctagagcaggtgcctcatgctgtacctcatagagaactggggggaggggggaaatgggcatttccctccacagcccccaaagtgcctgaggaaagtgttgataaagaagccaaactctgtaaaatatttgaagagatttattctgagccaaatgtgaggaccacgacccatgacacagccttggaaggtcctgagaacatgtgtccaaggtagttgggtcacagcttgattttatgtattttagggggacagaagttacatacagacaccaatcaataagcataagttgtacactggttcgttccagaaaaggggaaggtgggggcttccaggtcataggtggcttcaaagatattctgattggcaatcagttgaaagagttattatctaaagacctggaataaatggaaaggagtatctgggttaagataagaggttgtggagaccaaggttcttgttatgtagatgaagactcataggtggccacccttagagggaatagatggcaactgtttcctcttcagacctttaaaaggtgctacacacatggccaggcgccttggctcatcctgtaatcccagcactttgggaggctgaggcaggtggatcacttaaggtcaggagttcaagaccagcctggccaacatggtgaaactccatctctactaaaaatacaaaaattagccgggtgtggtggtgcttgcctgtagtttcagctactcgggaggctgagacagtagaatctcctcctgaggcaggacaatggcttgaacctgggaggcagatgttgcagtgagctgagattgtgccattgcactccagcctggatgacagagcaaaacaccatcttaaagagaaaaaaaaaaaaaaaaaaaaaaaaaggtgctagactctcagctcagaaaaagacctggaatggtaagggggttctctacagaatgtggatttccctgagatagctttgcagggccatttcaaaatatgtcaaacaaatacaatttggagtaaaatcatttattttagggcctgctatatgtcatgtgatcctatactagagaagtcaggttggaaactggtatcttattgctacaaagactctgtttggtcagcctcaaggtctcttaacgtgaatgctggtcagctgtgcccgaattccaaaggaagaaataatgaggcgtgtgggacctgcttcccctcatggcctcaactagtctttcaggttcctatggaattcccttggcagagaggacgggtccactcagtgagttgggggcttagaattttatttttggtttacaagagagtgatccgccttttgtgatctggatatggcaagggacatggcagtcagggagcataggtgagggggagcctgggtgagggtgaccagagcttttaaccctgtcctccctgccttccagtgttcatccgcagggagcaggccaacaacatcctggcgagggtcacgagggccaattcctttcttgaagagatgaagaaaggacacctcgaaagagagtgcatggaagagacctgctcatacgaagaggcccgcgaggtctttgaggacagcgacaagacggtaagggctggggatagcctggctgttggtaaggagctcaggccacagcgccctcgctggccccgctgctccgtccatccaggggggcggcctggaggaaggggcagcgtgcgcgaaggctttcaggggcggggcccagcaaatcgaggcctcggcggagtcctgcccacagggacatcagtgccgcccccgcgctgactccttcccggcgaggactcagcggggagggatgcgcccaagtcccttgagggtcacagggcttctgccagagttaagttctatttaaaaataaaatgttaacctaaaaaccaatagtcatggtctcggccagcgcctcgccgagttgcagtgagctgagatcgtgccctcccacgcccgcagcccgcgtcctgccttggcctccgtagtcgctgagagccacagcctagagcgccagcgcgcaggcgcacaactgacgccaggccacgaacccagtactgctcctgcacagcagaagcactagcactgaggccgggcggcgaacccggcactgcgcctgcgcagcaaaaggacacgcactgaggccaggccgcgaacccagcacggtgcctgcgcagcaggaagaccggcatccacaccggacgacgaacccagcatcgcgcctgcgcagtaggaggagagcaatgccaccaggccgcgattgcgcagccgcagcagccccgcgcggaagacgctaccctcctctcccccgaagaggcggggcttcgaacgaacctggaaatggccgaggggtctcgacttcctcaccccaggcatcaggaaaggtgcctgcaggacagggctctgaagtggaagtgggcggtggtgatgccgaactgacaagaatgagctgaagagaagaaagtagccgagaagggggccaagccggagctcagtgagcaacagctaggccagccgcggctggtgccatcagccacaccactaactgtggacccaaatggaaactttgaggccccttacaggtcccccagcgcaggccaccgccgaaggttactggggaagacccctgcagcttccatgtggacattactcgcttgcttcatcccggagtgcagtcacctgcagcctgggaccacctgactgatgtcaccctggagatccatgccaaaagagctggggaaagttcaccttctaatgacccctgcggaccagggtgaagttacaagttatggccaggtcaaggaattataagtcaataaataaactgcctcagggagacgtactcagagtccaggaaaatctaggaaacaccaagaagggcgagcgcagcatcagcccctgcaaaattgcactgctgcctcctggctcacatgttgccccatccttactttagcctcaaaggcaaggagacccaatattatttgagtacttggatttgatcctgagtgactttctgagaaagcagtgtatcatctgccctaagatcaccacatatatgacaaggtttttggatgagttgagatttctagacattgaaaccctcatgatgaacgtcatcccgggtagcaggggctaagcctttcatcacctgctacaacaagctggacattaacttgtatttgagaattgctccaggactctaccttcagatgctggttagtagcattgactggatttatgaaattggatgccagttaaggaataagagaatgtatttgatttgccaccctatatggtctgtgcagactgtcatgatctcattgaaatccaagaaaagattatgtcagggatgaagcacatcacaggtggttacaaggtcacccaccatccagatggctcagaaagccaaacctatgggttgacttctcctcacccttctggagaatcagtgtggtagaagagcttgaaaaagtgctgggtgtgacgctgccagaaactaacctctttggaactgaagaaactcaaaaaattattggtgatatctatgtaacaaaagcttttgaaagtcttctacctcagaacatattcaggcgccttgataaacttgtcaaggagttcctgaaagtgacttacatcagtcccacatttatctgttatcacctgcagataatgagctctttgaccaaatgatctctctaagagggtctcactgagcactttgagctatttgtcatgaagatagctgaatgtttccatgcagcaacagcagcagctgttgacaaacaagacaaggccagcaaagatgatgaggccacattcatagatgaaagcttccatgcaaccctggaatatgggcttccgcccacagctggttggagcgtgacaatcaaatgtgttaccatgtttctcacagactcccacaacatcaaggaaatatttctgactcctggcatgaaacttgaagaaagagaatgtagcagccactaatacaatggaaagcgcaacattgacacgtctatctagaaaattttaattgtctaagttgtgtgactcagatatctttgcatttctgcaaaagatcaaggtctactctaattcttaattaaattaagaattcctttttattacttgttagcaaataaatggcttgtctctaacagaaaaaatttagaattttcggaaatattttcaaatacttcttatatatacatatatttttttccactggtagaatttttctttagtaaaagtaaataatgctgatccaagtttatgtttcactcagcatcgtttctcaaacactcttctttacttatatatagctaccctatagctaagctatattttattgtatgatgcatttactcttttcagagtttggccatataagttatttctaaatattgctattaggaaaacacatatgcatgcatttcttctagattatcatctaagagtggcttctccagagagagacgactgaattaaaggttatcaacaagttccaattccagataagatgaagaaatcacattccacactgcctctcccactgagtgtagctccaaaacatggatagaatgcatgtagcagctatttgacgaccctaaaaagtaaatcgcagtgtattgcagaataagactacaatta

SEQ ID NO: 34 - DNA, 38891 bp, Homo sapiens
taattgtagtcttattctgcaatacactgcgatttactttttagggtcgtcaaatagctgctacatgcattctatccatgttttggagctacactcagtgggagaggcagtgtggaatgtgatttcttcatcttatctggaattggaacttgttgataacctttaattcagtcgtctctctctggagaagccactcttagatgataatctagaagaaatgcatgcatatgtgttttcctaatagcaatatttagaaataacttatatggccaaactctgaaaagagtaaatgcatcatacaataaaatatagcttagctatagggtagctatatataagtaaagaagagtgtttgagaaacgatgctgagtgaaacataaacttggatcagcattatttacttttactaaagaaaaattctaccagtggaaaaaaatatatgtatatataagaagtatttgaaaatatttccgaaaattctaaattttttctgttagagacaagccatttatttgctaacaagtaataaaaaggaattcttaatttaattaagaattagagtagaccttgatcttttgcagaaatgcaaagatatctgagtcacacaacttagacaattaaaattttctagatagacgtgtcaatgttgcgctttccattgtattagtggctgctacattctctttcttcaagtttcatgccaggagtcagaaatatttccttgatgttgtgggagtctgtgagaaacatggtaacacatttgattgtcacgctccaaccagctgtgggcggaagcccatattccagggttgcatggaagctttcatctatgaatgtggcctcatcatctttgctggccttgtcttgtttgtcaacagctgctgctgttgctgcatggaaacattcagctatcttcatgacaaatagctcaaagtgctcagtgagaccctcttagagagatcatttggtcaaagagctcattatctgcaggtgataacagataaatgtgggactgatgtaagtcactttcaggaactccttgacaagtttatcaaggcgcctgaatatgttctgaggtagaagactttcaaaagcttttgttacatagatatcaccaataattttttgagtttcttcagttccaaagaggttagtttctggcagcgtcacacccagcactttttcaagctcttctaccacactgattctccagaagggtgaggagaagtcaacccataggtttggctttctgagccatctggatggtgggtgaccttgtaaccacctgtgatgtgcttcatccctgacataatcttttcttggatttcaatgagatcatgacagtctgcacagaccatatagggtggcaaatcaaatacattctcttattccttaactggcatccaatttcataaatccagtcaatgctactaaccagcatctgaaggtagagtcctggagcaattctcaaatacaagttaatgtccagcttgttgtagcaggtgatgaaaggcttagcccctgctacccgggatgacgttcatcatgagggtttcaatgtctagaaatctcaactcatccaaaaaccttgtcatatatgtggtgatcttagggcagatgatacactgctttctcagaaagtcactcaggatcaaatccaagtactcaaataatattgggtctccttgcctttgaggctaaagtaaggatggggcaacatgtgagccaggaggcagcagtgcaattttgcaggggctgatgctgcgctcgcccttcttggtgtttcctagattttcctggactctgagtacgtctccctgaggcagtttatttattgacttataattccttgacctggccataacttgtaacttcaccctggtccgcaggggtcattagaaggtgaactttccccagctcttttggcatggatctccagggtgacatcagtcaggtggtcccaggctgcaggtgactgcactccgggatgaagcaagcgagtaatgtccacatggaagctgcaggggtcttccccagtaaccttcggcggtggcctgcgctgggggacctgtaaggggcctcaaagtttccatttgggtccacagttagtggtgtggctgatggcaccagccgcggctggcctagctgttgctcactgagctccggcttggcccccttctcggctactttcttctcttcagctcattcttgtcagttcggcatcaccaccgcccacttccacttcagagccctgtcctgcaggcacctttcctgatgcctggggtgaggaagtcgagacccctcggccatttccaggttcgttcgaagccccgcctcttcgggggagaggagggtagcgtcttccgcgcggggctgctgcggctgcgcaatcgcggcctggtggcattgctctcctcctactgcgcaggcgcgatgctgggttcgtcgtccggtgtggatgccggtcttcctgctgcgcaggcaccgtgctgggttcgcggcctggcctcagtgcgtgtccttttgctgcgcaggcgcagtgccgggttcgccgcccggcctcagtgctagtgcttctgctgtgcaggagcagtactgggttcgtggcctggcgtcagttgtgcgcctgcgcgctggcgctctaggctgtggctctcagcgactacggaggccaaggcaggacgcgggctgcgggcgtgggagggcacgatctcagctcactgcaactcggcgaggcgctggccgagaccatgactattggtttttaggttaacattttatttttaaatagaacttaactctggcagaagccctgtgaccctcaagggacttgggcgcatccctccccgctgagtcctcgccgggaaggagtcagcgcgggggcggcactgatgtccctgtgggcaggactccgccgaggcctcgatttgctgggccccgcccctgaaagccttcgcgcacgctgccccttcctccaggccgcccccctggatggacggagcagcggggccagcgagggcgctgtggcctgagctccttaccaacagccaggctatccccagcccttaccgtcttgtcgctgtcctcaaagacctcgcgggcctcttcgtatgagcaggtctcttccatgcactctctttcgaggtgtcctttcttcatctcttcaagaaaggaattggccctcgtgaccctcgccaggatgttgttggcctgctccctgcggatgaacactggaaggcagggaggacagggttaaaagctctggtcaccctcacccaggctccccctcacctatgctccctgactgccatgtcccttgccatatccagatcacaaaaggcggatcactctcttgtaaaccaaaaataaaattctaagcccccaactcactgagtggacccgtcctctctgccaagggaattccataggaacctgaaagactagttgaggccatgaggggaagcaggtcccacacgcctcattatttcttcctttggaattcgggcacagctgaccagcattcacgttaagagaccttgaggctgaccaaacagagtctttgtagcaataagataccagtttccaacctgacttctctagtataggatcacatgacatatagcaggccctaaaataaatgattttactccaaattgtatttgtttgacatattttgaaatggccctgcaaagctatctcagggaaatccacattctgtagagaacccccttaccattccaggtctttttctgagctgagagtctagcacctttttttttttttttttttttttttctctttaagatggtgttttgctctgtcatccaggctggagtgcaatggcacaatctcagctcactgcaacatctgcctcccaggttcaagccattgtcctgcctcaggaggagattctactgtctcagcctcccgagtagctgaaactacaggcaagcaccaccacacccggctaatttttgtatttttagtagagatggagtttcaccatgttggccaggctggtcttgaactcctgaccttaagtgatccacctgcctcagcctcccaaagtgctgggattacaggatgagccaaggcgcctggccatgtgtgtagcaccttttaaaggtctgaagaggaaacagttgccatctattccctctaagggtggccacctatgagtcttcatctacataacaagaaccttggtctccacaacctcttatcttaacccagatactcctttccatttattccaggtctttagataataactctttcaactgattgccaatcagaatatctttgaagccacctatgacctggaagcccccaccttccccttttctggaacgaaccagtgtacaacttatgcttattgattggtgtctgtatgtaacttctgtccccctaaaatacataaaatcaagctgtgacccaactaccttggacacatgttctcaggaccttccaaggctgtgtcatgggtcgtggtcctcacatttggctcagaataaatctcttcaaatattttacagagtttggcttctttatcaacactttcctcaggcactttgggggctgtggagggaaatgcccatttcccccctccccccagttctctatgaggtacagcatgaggcacctgctctagacccatgcacccttctctggagaagtagacacatcccacccaatcagctcaccagcctcctcacatgctcacgctggctcagcctggccacccaagcccccttccttgaattctccctccctagggtgctttcagcccactgttctgtgctttggctcaagctgtgccccttcagcctggccccactcgtctttaaggtctctgctctttgttatgtggggattggtgatgctgtttcaattacaaactataatagtacaatttatgaagtgccaggacacacatacatgccaactttcaagaaatagtatttattagtatttcctaaaatacagtacttagtacaaagttttctatttgattctactcttttaaaaaaaaatactgagttgatttcatgactggcaaatgagtcttgatctgctggttaaaatgccctggatccgagagtctgtgtcccttgtagagtgtgtgtctgtgggctgtgctgtccacatctctctgcctgtgtctcctttgtctctcacccactcctcctcctcttttcattttgacagcctcagtttcttttcttggccctctgtagtctttttctgtgctttttttccactgaaaaattcaatgtctcactacaataaagataactcttccaactgatctctctagcactgacttttgtcctgagctccatgttttcagctctctcactatgacagatgccttccctcatctcagaactccaaactctccatgtccaaaatttaaaacaagactgcagaatcaagcaatcttgagcttcaaaaacaccttagtcacttattatttattattggcagaagggaattataatatctactcttagagctgttttaaagattgtataaactcctagtgttgagtttggtatacagaaggtgcttagtaaatcttgggttcattcctacctccagttactttaccttccaaattccccatttcttttagtgacaccgacattatcccaccaacgctagacttagatttattatttcttgaccctgccccattactctgcgtgtctgctccactcccacacacttgctctgaaatgcagcccacacgtggctccctgcaacctgcagcctcatgtcacctccactccacaaaaggcactgaggaagctgaggggtggggaatgcccatctcccttggggcctctggctctcatgttgggatgaccacagcctcagacaagttatccaagcctggcttagtgtttcccaaactgggactcgcgggcctcctgggctccagttggggtctgaagaccgcgttctgccttgccctcggtgttctgacgcacctccatgtgaacacctctcttggtaccttctctcttccccttggtctccttccttgtggccagatggacatatgcctgcttttttctctgctaccctagagccacagtgatggttcacagacttgccacaaggattggtccccactcaactggagcctgacgccctcactgtctctggtcgatcccttgcgcctcctctgacctcttagaggaactcgctgttctgtgatagcggccacagctctgttccccttggcatccacccccgagcatccccaggctgattgaccagtaagaagtcacctttcctttgcagcccctgtccagttcccgccttttcccatctccctgaagcctgctcagctctccccagctcatgggggtaggacacggcctataaggttgagctggactgtgtgaggaagagggtacaggtggcaggcacggggtggaaagggtgatgcaaggaagtcaaggactacccagaatctgcctctagtggtcttagaacagagcccagggtcttcccatggccaggcctcccaggcctcaccaccttcaactctgccctcattcacctctctctgccacactgggctctgcgctgaccctggctgagcccaacactcacaccccaggacttttgcaccagtcacctccctgtctggaacattctttccacagatacccaagtggctcaggcccagcgccctccgagacaccctccctgaccacgccctctgacgttgcccccactcgtgtctctttcatccccttacactgtgctatttgtcttctagcacccaacccctctctgacattacatgctgacaggcttatccttccctccgctggaaaaagacttgacgtgtttggtcacagctgtatgcccgtgcctagcacggccggaacttaaccaatatgtgttgagggaatgaaggaaagatggcgtgcctggctcagccctctggactgaatctgggcgcttctgctatctgttatggctgagtcgcatcaacgcttcagtcagactgagcaggccgggtctgggccacgtggccacactttctgatgtgagtaaaatgggattttggcaaaacgaaattaaaacaaggtttttaggcacttgtctcaagaaattaatggaacactctagaactctgatatggagcatccagattggtagacatttgtcgtgtggtttgtttcttcagaagctgttgggagcattgcaatcctcgagcacacagttgtgtttgttgttttggcaacatcagtgaattccacagtcagcaactgcatttgagcaagttttaccagcaagcaaaattttcagtcagtaaggtccaaactcatgaagaatgggtttaaacttgttgaatgtaaagattgaaactgaagccacgtagctttaatgattgccagtacaacagcagtagtttaaaggctggcactgcaggtgctctgcgtattctgattttattaaaataaaaagttggattgcagaaaacactcacaggtggcaggacagggctgaataatgtccctccaaattcatgtctttcccagaacctcagaacctgaccttaattggaaatagaacttttgtgatgtatttagttaggaagacattttatgggagtagagtgagccctaaatccaatgactggtgtccttctgagagaaaagaagacagaaaaacagccatggtgagaaccccatgcgatgatggaggcagcgatgggagcaatgctcccacaagccatgggctgtgaggccgctggcaccccgaggccaggaaacaggcctagagcagactctctcccagcctctggaggaaccagccccgctgacgccttgattttgaacttccagcctccagagctgtgggagaaatgtttctgttgctttaagctacttggtccattgtcctttcttgtagcagtaccagcaaaggaatgctgaggtcccaccgccccagaagaacttccgtgactgccaggacagctgtgctcgtttaaaggctagactgcagatgctgtgcgcattctgattttattaaaatcaaaagtgtgcacagcagggtcctgagtgggaccttctgggacctgtgttcagccccacccaccccacagtgcagctgccgaggcctctgaggcagagtaggggagagagatggcctggccctggctctccggggctggccatgtccacccagggtccaggccggcccccggggacaccacaggccatggttatgagccaggcccgcatcacacagctaagggtgccaataccctgtggacccagaggtccgcgaggtgggcgcctgcatttcccattggcaggaagggaagctggcgctccaccaggactctgcataactcccctagtttcctcctgtgggtctgggtgggctcctggcctgtcttctcatccccaccctctgcttcttcccaggaagaggagtcctgccaacttccattcccaataagccagagcagcttccagagtcccgggccgggcttagggcctcgggagccccgggccgggcttagggcctcaggatcctagagcattccggctgcagaattttctaccaattcgcggaagcatctgtctgtttgcagagtagctttgctgtcgatgatgatggcatgggtccttccagggccttgttccacccacgctgatctcatcccaccacaagcatcacagtgggctcctgcagggggcagtgtggcctgagggggaggaagaaggctgggcgagttggagccacacagtaccccatgaagacgggagtcccgttccgcgtgggagacaggaagatgtggctcaggggacagaggctggggagggcagggggttgagggtgggatggagaagacccccgtgtgatgtgactggagctccaagtcaccaggcggaggggccgtttaggtcagtgatgcactgaggatccactcagccttcccaggggtctcccctttccaccccacgagggtctccccctgctccgtctctccctcacacattcccttcccaggcctgggtccccttggtgcccctgcctgtccactttgtccaggatgcaaacaagtctagggtccctgtctctcgtgtccccaccagaggggcctcctcttcctccgctgtccccaggcttgcctggcttctgtcctgtctgggcctctgcttttggacagacccgggggtcctggacagccctgctgcccccacctgtccagctgtgcattaggcagctccttccccgacggagccagtccgagagtggtggcactggctcggctcagcctcctcctccctgggagctcctctgctgtgcccctcgtcctgtgcctccctgtggtggcagatggctaactgtcctgtctctgcctgccccaacccctccctctctctctgtctccgtctttctacctctgtctctgcctcttggcctcccatctcactgtgtctccgtttctccttccctctccctttctctctctgactctgtccttgtgtttttgtctctgtgacctctgatccgcccgtctgactctcagccccagggagccacagctggccttgaggatgccgttggctggaaaggccaagcccagccatccgagcccagcctctggcagcactcaaggcacccaccgtccaggctgcagagatgagagggtttccccaactgccgcccctccctgctccctggcgctgcttttgggtctgaagggcgaggggcacttacgactttccccgagcagcaggaggccagccagggaggcactgagcaggacgaggtgcagtgggcgccccatggtgtggccgagtactgtgtccctgtcctcactgggacaggctgctggagcaaagtccacgccccagctgggatggctgttgtctggctgcttatcacttggcttaggcctcctgattggagccgagacctgctggcgaggcaggggagtgaccacgctgggaacacatccactctggccccaccttccccaggcagagctgggcggccagagaggccccgcagaacctcatcctcatcagtcaccagggccgcgggtgtggggactttctgttctaagaataaaaacatcatttcgtgctcattttgtagtttccagatgtttacatttaactctcagtcctcacatacaaatatcattttccccatcatttttccagaagagaaaactaagtttagagagcgcagaagcctgagccgaggccgctggcagtgagcgtgggatctgagcccaggacttctgccccaaggccctgcttgtttctgggcgggcccttccgctcacagccactctctgggtggtatcaggtggtctcatgtcacggggggggcttggcatctgcaccatggcctcccacaggccaggctggcacctgccccacccacccccaaaccttctgtgcccgcatggccccaaaacgtacttctgtggggagtgaccttcccgtgaccatctggagggacaggctgtgtctgaagcccctcctgacctgcccaccactggccacactgttccgaggctgagagggcttctgggctcgttctccagtgcagaaacctcccatcacaaggtcctgagtgtctctgctcaatggctgtgggagtcactgggaggtgcagccgggctttttgcctctggggtctctggaataaatggtctaaagcttggccagtgtggcgatcactgcctgctatgccgtagtggccggggagcaatgcccctaacacccacagcactggccactgcctcatggtgcatctgccttgatgggtcgccctgtctcgcagccacctgcacatgagcctggtgtgcacacattgtgcgtcattgtgcctggcacacaggaggcactcactgagccccacccgactgcacaaactgatgatgctggatgccaacgccaggctggcctcccacggcgggcaccacgcacagcctggtcctctgagaagggccttcctggtggcaccagatgtctgactcctgcctctcctggtctccaccctctgacatcgcctctaggcatgtttgtatggagagaccaatgcggtgtgtgcaccaacagcaggatgctcatggcagacacgcagtctttgtcatcaatgctgggtggcgatgctggctttggtggcccaagcctgccgcctcatcccaccctgtcccaggcccatggccagtggcctccccgtattctatctcgccactcacagaaagctggagctgagccgtggcaggtggcacgtcccatatgaaacatgtagcctttgggggcgcccaggcccttcagcgaagcctctggggagtcccgggccccctcctccggcagcaccatgaggtgggcgcctgcatttcccattggcaggaagggaggctggcgctccaccaggaccccgcatgactcccctagtttcctcctgtgggtctgggtgggctcctgaactgtcctctcatccccaccctccgcttcttcccaggaagagtcctgccaacttccactcccaagaagtcagagtggcttccagaaccctgggctgggcttaggccctcaggagccccgggcattctggttgcagaattttctaccaattcactgaagcatctgtctgcagagtggctttgctgtcgatgaccatggcatgggcccttccagggccttgttccatccatgctgatctcatcccaccataagcatcacggtgggctcctgttttacacatgaggaaactgaggcatggtcactcggacaaaagagaaagcagagccagctctgacctggatcagggcccgccactggctcccgtcccgtttagggggcattaggaaccggggtctggccagggtcagcaagcatcttcagcagaggtcctgacactaaccatgctgggcttggcgggtcagctggtctgtccggctggacgtctctgccacggccactccatggacactaatatgggtgtgttcccataaaactttatttacaagagcagggtgccttggaagcagcccacggctgtagttcatagaccctgtctgctctgaagtagatgatgcctgagtgcccccgaggtgggttgctggtgcctgccttgctgctgtgagtgccaatggtgcccaccttgctgctgtgagtgccagtggtgcccaggacggccctgcagggatggcatcgagtccactctctgagccgtgcttgccggagtctgagtgggggcactgtttgtcacctccccatttctctgttcatgtgtttctcattcttcttccaccaccctggggactcagcaagagtgcagcttgccaggtcctcccactgcagccagggcctgggaacttgcatttagtgatgcgtgtgtccctgactcttgagcaggtgctcccagggtctctgtgaaatatcattgacaagggctgtggcagggagagaacatccaattccacaggatcctgggagctacagcctcaaacatctatcaaacagcttttgtttttaaaaaatagcttccatgtgagggttcatttcagtgatgttgaaaattgtgaaagaaaagagcatctcagaggatgagcaccgggggctccaaaaatgaatcatgggcaacccagtgggtggcaggcaccacaggtgtgcggaggagacgcagccgtttattgtgaagctgggaagcaggtggggaatagtctgtgcagcccggcacccagcgaagggagaaatacatttgggggagagtttgggggcattcgccaccatgcatggtgatgcttctgaattgtctgaagtgaagatgataatggataagaaccagaaaagtgagagctaaacaaccgccttcagaggacagcacacatggagtcagcatcggtgtgtgtgcatctgtgtgtgcatctgtgtgtgtacatcggtgtgtgtgcgcattggtgtgtgtgtgctcatccatgtgtgtgcatatctgtgtgtgcgcacatcggtgtgtgcatatctctgtgcatccgtgtgcactgatgtgtgcgtgcattggcatgtgcgtgcatccatgtgtatatctgtgtgtgcatctgtgtgtgcatatctctatgtgcgtgtgcatcggtgtgtttgcgtatctctgtgtgaccatctgtgtgtgcatccgtgtgtgtgcatatctctgtgtgtgtgcattggcgtgtgtgtgtgtgcatccatgtgtgttcatgcctctactgtctccagcaatgaaggcagagcagcagcctgaggccagcagatcacgtgcaggtgggcttggctgaagggaggtaaggaggctcagctgggctgtctgcctccaggacaaccttggcactcccctgcccctctgtccagcgcctgtctgcctctgcctctcatcttttctattccatctctgtgtctctattagtctctttgaatcttggagtctctttgagtctctctccatgtcctcagagtctctccctcagtctctctctgtctctgtctctctctgtttctgtctctgtctccctccccacctctccctccctcccatgccctcctctaccccattaactgcagaagaatatatgggatttggtgccaggacagttcgacgcagccttggctttctctccacaggccagggctgctgggctagggaaatggggctcgcaggaggactcctgggcgtggctctgagcgcatgagcttttgcagccactcgatgtactgggagaccctggtgtacaccccaaagtggcccacggttgcgcagccctggccccagctgacgatgcccgtcaggtaccacgtgccccggtagtgggtggcatgtgggcctccactgtcccccttgcaggagtccttgctgccatccgagtagccggcacagaacatgtactccgtgatatttggggagtctcccaccttccgtgactgctgcaggcagtcctgggtcatcagccggggcacgttgaggaccatgagctccagggccgtggcgccacggtccagcagctggccccagccgctgaccaatgagaagcgcacgaaggccagcgtcctctcagagaacgtccgttcgggcaggcagaggggcaccacatggtcagtgaggaccacgggctggtgcaggcggagcagcgcgatgtcgtggttggtggtgcccgggacgtacgtgctggggatgatgacctgcgccacccgccggctctgctcatccccgtcgtgctcgctgaggtcgtgctcgcctggaaggaagaagcccccctcaggccctttccaccacctgccacctcaccccctggtgcatggggatgggctgtggccatttctaggtctgcaggggctgcagtctccttctggggcaaggggacctgcatctaaccccaaggtggggccagcctgccccaggtggcagcctgtggctcgtgtggggacaagtgaactggggtgaatctggggtctgggtgttgaggtggggaagggatgctgtgccctggcagctgggaggacagggcgtgccccgattctccacagttcttcccggcccagtggccctcctgggagtgctcgtctcacccataaacccagtgagcagaacccctgccagccggtggtcccatgaggccctgggtgtcgcatcctcttctgggctcttggtcaagtgaggcaggatgggcagaagcccccagtcttttatcgttttatttgggcatgggaaagtggctgagagcacggtggccacagcagtcgtgcccagcatggttgctccccttttggggatgtctgtctgtctgtggaagtgacagcacgaagcccagagccacagcccctgagacacttgagagctgcggtcagacaggggagagtggtacccacccagcaccgcggtcggacagcggagagtggcacccacccagcaccgcggtcggacaggggagagtggcacccacccagcaccgcggtcggacaggggagagtggcacccacccagcaccgcggtcggacagggaagagtggcacccacccagcaccgcggtcggacaggggagagtggtacccacccagcaccgcgatcaggttcctccagttcttgattttgtcgaaacagtgggccgcggagaccacccagatggtgttgatcagggtccccccacacaactgagctccattcaccaacaacaggacctgggcggggggacaggaggtgtggaagtcacattgctgtcattgtttctctgatgactcgccctcccgggcatgccaaggaacctctggcattgcacaatttctttctgaaatcctggggtctttgcagatccctcccaggcaaagctgctcagacctggctctgggaggctgtgcccctctctagccgagacgtgctcttgggcacggcccaagaatacaaatgtcgctgtgagatttcactgttcacctcacaggatcttcacatagctttgatccaatgctcctgattttgcaaagatcaggcaaagatcccacctcaaagagtaaccgtgaggacgacgtgacaactcggatggggcatctcgcagggttctctgcacagggtagaccctcagtgagtgtcgttttcttttctccttccttgccccactaaaagcatgggggtgccgcgagctggaggtgctaggtgtgctgacttggagcctggtgggcttggggctgacctgcccattttcccttccagagctgttgttcacattcaaaaggcttcaagaccctcagggcttggaatcctgaagccaggggaagccttacctgccatggacactcccctttggggcacaccttgccccccacaattcggccttggggtttgctggcatttcttttttctagaataggtatttttccacatggatattcaactgtgtaaaacaaaagtcagaaagatgcagagatttgtgagggatgaacgtgccactaggaaagattcagaaacacccatcctctgagaggccttgaggccgaggctatgggaggcccccaggagcaggagctcccagggcccaggggtggtggaaggcagggcctcggctgggcctgactggtggggcccggccatgagaggcccttgaagaagtggctggctgaggagacaatggtcagggctggttttggaggaaacagagggcttacgtcttaaaaccgccctctgctcacttttcagggagaagatgtgttgtttgactttagtagaaggtgaatgaaattctacctaaagatgaatcaaactgtgttgttttgatcccatgcttagttttgatctgcttcaatcaaggtcttgggccagaaaggaagcccgaggaggtggcaggctgagtcccaggctgtgtggccagggtgggcacgtccgcctctttgagacacagtgggtgtggggtgtccctgcttttggaagtgcagcccattcgttccaggctggtttggagaaacatcccattttcccaggagcctttacgagttttggaatgcagagtgggcagcagtcagtacagacattggctgtgccgaagtagattcatgaaccctggcggaggtcctgcgagtgggagttggacgtgagatagtgccttgcttggctcccctggtctgcctagaattggcagggggcctgaggccattcagggattgcccccagggtgcccatcctagtcactgtcgctctggcctgtgccacccttggtgcccagatcccacctcacaattggtcagtgcatagttagtgctcagtagatgtgaagccactcccacccgtcttttgtccagtaagataatccgtagtgggacagggactggtgtcatctgggactgggacatgaagcctggtcacctgtgggtgtgcaggacaccccgtctgccagcagagagtacccctcgtggcaccgacaggagcgcttggtgcccgtgtggtcactgcagtactgctcacagccgccgttctcgttcacacagatcagctggtcatccttgtctggggacaggaaggggacaccctgagaggggcttctgggggtcagcgagagccagcccccggggtggccatgccctgggtcagcagtggtgttctgcctggaaggtggcactgagctgtgggtgacagagcctgagcttggcaccacctgctccgtggactgatccaaaggacaaggcgtggatcagaggagccacatgtctgaacagccttgccagtggctggcagtgctggctgcggttgcatttggggggtgcctggctggtgggcagtggcctccagggtgaccactcttccgagcagctgatgggagcctgggggaaagtgaaagtccaatggggatggtaaaagtgtccaagggactttccaatcagagacccaactgacgagaggaccagagagctgagacagttctccaagctggcctcgtaccaccgtgagcccgcctggggacagttagtcccagcactggtcatgggctcagacagaagaagcagaaccggcagcctgactttggttgacatgggcaaggggagtggccctgagcaagtccaggactccggcgggaaggcctgccctgcaggatgcacaccagggctgctgggcaccagggctgagcagagatctccaggcattctggacccagatgaccagcaggaagcctctctcttcagcctcctccagcttgctgggctctcttctgcttagagaagaaaatggctgctgcacaggagagctcattcagtgtaagaatgtggtcttgggtggtcaaggatgaactgctgtgccagagaaagggtagcctttgccttggctcctgggaaatgaccgctaagcccttggaaggtcttgcctgagggaatgttggtgtttacctgggccttgagccatgctggatggtctagctgacaatgtgatgtatggtggggccttgggccgcactatcggcgtagcctctggaggggctgagactgaggtcagccatgcgggtggtcagctgggtctatgtgattgagccctgataaaacctctggacaccggggctcgtagagcttcccaagttggcagtacttcccacgtctcgtcacacgtcattctgggagaattaaggactgtccacatgaccccacagggagaggacaaggggaagcttgtgcctggtccctctgcagacttaagcctgcatcctttgctgtaataaacggtacctgtgagtgtatccacttcagtggattctatgagtccttctagtgaattactgaacccaagggaggttgggggcctcaaactttgtgataatttaatattcagatggttaaaaaaaaaacaaacccctcaaacctttgtaatggaaagtagagaaggggaagtttaccaagcggtcctgcgtggtgggatgtggaagtgggacagggacacagggactctcagctgggccatctcgagggctgagaattgcccagggccgggagcccaaggggccactgagtctgataatcagaaccttgggtccctgtcaaagacctcagactggaagggatttcaaggtcacctagaccaatttccaactggggctgagccctgaatgcccggcctacacaccccaccaggttgtgcaccctgcagcccggttggccaggccacctccaccagctccccagggccctctgcaaatatgggacccaaagtggggccttacgcgtctcacagttccggccctcgaaggcagggaggcagaagcagatataggactggagctggtccttgcaggagcccccattctggcatggacttgaggcacactggtccccatctgtggagtgggctggtgtcagtaagctgagaagggttgcaggcaggactggtggtgatcatccactcaccactgtaagaaatccagaacagcttctgaaggaacaagagagcaagcctcgtgagatgcaccttcaccagagcacccaacggtaagcactggacacaccatgaactggggttgggggacttggacctgggtctggcggggtgggctcaggaagccagactttcctctggagctgaggtaggtttcttctaatcttggcccctccccaggacatctggaactatgggtgaccacacatttcctgctcccaagtcagaacacccgaggttcaaccctgactcttctgtcgctgagctgtggacctgggacgaggtacacaggctctgagccacagctccacctctgacagggtggccacacatacggggagagggtgcagtagcagatgcaaaatattccacaaacagcaaaagcactccacagaaaaaagtgattgctgaagaaactgttggccacctgaacttaaactcacggggtgctgtgagaatacaacagatgagaaatgctttcaaaactaggtgtataaaaatgctaggcatgaccatcctcaatttgtctggaaagggtcatgttagcctttgcctcagacagctggacctcctgtgagtgtgaggcttctttgagcatgaggtgtcctgagtgtgaggtgtcttgtgcatatgagatgtggttctgtgagtgtgaggcatcctgtgagtgtgaggtgtggcgacctgtgagtgtgagatgagtgtaaggtgacctgtgagagggaggtgtcctgtgagaatgagatgatctgtgtgaggtgtgacctgtgagtgtgaagtgtgccctgagtgtgaggtatcctgtgagaatgaagtgatctgtgagtatgaggtgatctgtgtgaggtatggtgacctgtgggagtgaagtgtgccctgtgtgaggtgtcctgtgagagtaaggtgacctgtgagtgtgaggtgtcctgtgagagtaaggtgacctgtgagtgtgagttgtcctgtaagactgaggtgacctatgagtgtgaggtgtcctgtgggtgtgaggtgacctttgtgaggtgtcctgtgtgaggtgacctctgtgagttgtcctgtgggtgtgaggtgacctctgtgaggtgtcctgtgggtgtgaggtgacctgagtgtgaagtgtgccccgtgtgaggtgacctctgtgaggtgtcctgtgggtgtgaggtgacctctgtgaggtgtcctgtgagtgtgaggtgacctgtgagagggaggtgtcctgtgagaatgagatgatctgtgtgaggtgtgacctgtgagtgtgaagtgtgccctgagtgtgaggtatcctgtgagaatgaagtgatctgtgagtatgaggtgatctgtgtgaggtatggtgacctgtgggagtgaagtgtgccctgtgtgaggtgtcctgtgagagtgaggtgtcctgtgagagtaaggtgacctgtgagtgtgaggtgtcctgtgagagtaaggtgacctgtgagtgtgagttgtcctgtaagactgaggtgacctatgagtgtgaggtgtcctgtgggtgtgaggtgacctctgtgaggtgtcctgtgtgaggtgtcctgtgggtgtgaggtgacctctgtgaggtgtcctgtgggtgtgaggtgacctgtgagtgtgaagtgtgccccgtgtgaggtgacctctgtgaggtgtcctgtgagtgtgaggtgacctgtgagtgtgaagtgtgccccgtgtggtatcttgtgtgaggtgtcctgtgagtgtgaggtgaaatgacctgtgggtttgaagtgcaccctgagtgtgaggtgtcctgtgtgaggtgacctctgtgaggtgtcctgtgggtgtgaggtgacccgtgagtgtgaagtgcgccctgagtgtgaggtgtcctgtgagtgtgaggtgacccgtgagtgtgaagtgtgccctgtgtgaggtgtcctgtgggtgtgaggtgacctgtgagtgtgaagtgtgccccgtgtgaggtgtcttgtgtgaggtgtcctgtgagtgtgaggtgacccgtgagtgtgaagtgtgccctgtgtgaggtgtcctgtgggtgtgaggtgacctgtgagtgtgaagtgtgccccgtgtgaggtgtcttgtgtgaggtgtcctgtgagtgtgaggtgacccgtgagtgtgaagtgtgccctgtgtgaggtgtcctctttgaggtgatcttggagtgtgaggtgacccgtgagtgtgaagtgtgccctgtgagtgtgaggtgtcctgtgagtgtgaggtgacctgtgagtgtgaagtgtgccctgtgtgaggtgtcctctttgaggtgatcttggagtgtgaggtgacccgtgagtgtgaagtgtgccctgtgagtgtgaggtgtcctgtgagtgtgaggtgacctgtgagtgtgaagtgtgccctgtgtgaggtgtcctctttgaggtgatcttggagtgtgaggtgacccgtgagcgtgagctggagaaagtcccaggtccctaagtgttgtttctccccgacacgtgccctgaggaggtgccgctggtggcatgctgtgggccagcttctcaccacgtcccttctgcgagccgcgcgcgtctgcgatgcgcaggctgccctggacccttcggggactggggggactcccttgggaagttaagggggacaccctaagtgtgctttgcaaatcgtattttctgatgtgaaaaccggcatgcgcggtgcggccgcacggggagagcgcgtgcctgggggtggggggcatcgcccaggaaagcggagtcaccccgggcggaaagcgacccccgcagaaagcgccgcgcgggcgccgctgcgtgttcgccgcccacagccgcagccaaagagacgcaggcggccccacgcggcctggttcaccgccgcctgcagtgtccgcggcgcggggcgccccgaggctgggctcaccgtcctctccgcgtccttgaagatctcccgggcctcctcgaaggagcactgctcctccttgcactccctctccagggagcccggccgcagctcctccaggaacgcgttggcgcgccggcgccggtgcaggacgccgtgggcttcctcctgggttacgaagactgggaaatgcgagttccgtgaagcgcccaccgcgtgccccgcccagtgcctcggagaccgccccacggcccacgcggcgggggcatcgcaggttcccgcccgtcctggaggaggggagcggcgctgctcgcgggcctggctgggtgtcctccctgccgtgctcccgggtcagccacccccgtcgcccatccttcccggcctggcctctctgcttccgggggctgatcccgagggcgcgctcgggggcacgcgcggaagccgggccgaagggggctgcgggcgccgccgcgtaaacgtgaggctgcgggtcgatgccggcgaggagaaggcggcgcggccccgggtgccgggcaaccccctggggcccacgtgaaccgcgcgtggaaatccgtacagccgcccgcggaaatccaaatccctcgtctccacccgcaccgcgtctccggcggccagatccgccttccccaggcctccgtcctggtccgaggcgcggcccctgcccggctcccccgacagcgagccccgggcttcctcgccagctcttggcggtcctgggcttctgccgccttccccgcctccgcttggggcccctctgtcccccgcgacccctgagagctccagacctcgcgcggatcctcctggggccggtcctgagagcacagccccccgccgcagctcctggcccctccgtaaccccgacggttacttgtggacaaacaggaccgccgttttgcccatgggaagacggggctggtgagggccagagacgcccagggcgaggcaaccccgtgcgctcagctccgagcaggccgctcttcaggacgccctacagccgaggggaccgtcacccgggagcgccgtgagctgtgggcaccacgcggtggtggagagtgacccccgccccggggcggccgtgctgcccgaacctgcctcagcccgcgaggggagacgggcctgggggcaggcgggagagggaggccccgggaggaggcgagcggggctgagaggacgcgcgggaggggctctggagaggccgcaggaggcgcgttccggagggacgacctttgctgggaggacgaggcctcaggtggacgctgtgggccggtgggcaggagcccgagttctgcaggagcggcctaaattggttactgagcgcggaagaagggacggaaggtgagcgctactgggccacgtggggccgagagaaaggccactgcctgttttctttaaaatcagtttcacacgtcgacgcccctagagaactggtctggtttggaaggaggctgaggatgcaggcggggacaccaaagaatcgggctcaaggaggtgggaactcacggactccgagtcctcacaggaggtgccctgggcggcaggagtgggaggggaggcccatgtccctgcagtccccgacacccacgctcccgggacacccacgacccccgggacacccacacccccgggacacccacgccccccggacacccacgcccctgggacactcacacttctgggatacccacgcccccgggacacccacactcccgggacacccacgcccccgggacacccacactcccgggacaccctcgcctccggaacacccacactcccgggacaccctcgcctccggaacacccacactcccgggacatccactcccccgggacacccacactcccgggacacccacgcccccgggacacccacacccctgggacacccacgctcccgggacacccacgcccccgggacacccacgctcccgggacaccctcgcctccggaacacccacactcccgggacaccctcgcctccggaacacccacactcccgggacacccactcccccgggacacccacactcccgggacacccacgcccccgggacacccacacccctgggacacccacactcccgggacaccctcgcctctggaacacccacactcccgggacacccacgacccccgggacacccacacccccgggacactcacacttctgggataccctcgcctctggaacacccacactcccgggacacccacgcccccgggacacccacactcctgggacaccctcgcctccgggacacccacactcccgggacacccactcccccgggacacccacactcccgggacacccacgcccccgggacacccacgctcccgggacaccctcgcctccgggacacccacgctcctgggacaccctcgcctccggaacacccacactcccgggacacccactcccccgggacacccacactcccgggacacccacacccccgggacacccacacccccgggacacccacactcccgggacaccctcgcctccggaacacccacactcccgggacaccctcgcctccggaacacccacactcccgggacacccacaacccccgggacacccacgcccccgggacacccacactcccgggacaccctcgcctccggaacacccacactcccgggacaccctcgcctccggaacacccacactcccgggacacccacgcccctgggacacccacactcccgggacaccctcgcctccggaacacccacactcccgggacaccctcacctccggaacacccacactcccgggacacccacgcccccgggacacccacactcccgggacaccctcgcctccggaacacccacactcccgggacaccctcacctccggaacacccacactcccgggacacccacgcccccgggacacccacacccccgggacacccacgcccctgggacactcacacttctgggataccctcgcctccggaacacccacgcccccgggacacccacgcccccgggacacccacgcccccgggacacgcacactcccgggacaccctcgcctccggaacacccacactcccgggacacccacactcccgggacacccacgcccccgggacacccacactcccgggacacccacgcccccgggacacccacactcccgggacacccacgcccccgggacacccacgctcccgggacacccacgcccccgggacacccacactcccgggacaccctcgcctccgggacacccacactcccgggacacccactcccccgggacacccacactcccgggacaccctcgcctccgggacacccacactcccgggacacccactcccccgggacacccacactcccgggacacccacgcccccgggacacccacactcccgggacaccctcgcctccgggacacccacactcccgggacacccactcccccgggacacccacactcccgggacaccctcgcctccgggacacccacactcccgggacacccacgcccccgggacacccacactcccgggacacccacgcccccgggacacccacactcctgggacacccacgcccccgggacacccacactcccgggacacccacacccttggaggctggtgtgagcagagccggtgaccgccctggggtgaaagcagatttgcatcagaaaagctctcaagaactgaggaaaacctgatgaagaacacacgattatctggaaggaacagaatggagcaaagaagataaaatcgcctgcaccccagtcccagggaaggccaagctggagcggtcacttcctctcgagcagggaacaccctccttggggggcactgcagtagccaccccgcgggctggctctttgccatgggaggggaaggaggtgatgttggcccccactgggccccaggacaaaaccagtggcagtccctgctcacctctgtgaggccccggcttccacggcatgtcccgtgtttctcctcctgaggccttagcgaccccgcctggggcaggaaggtggccggggtcataaggccatgctgtgagctagggctgcagccccacatcccaggcactgtccctcacagcccaccccccactcgccatccccacacgccatccccacgccccactagccatcctcacgccacaccccctactcgccatccccatgccccactcaccattcccaggccccagccccactcgccatccccacccccccatgccccatcctctgcaccccacacgccctttccatgccccatcccccacaccccacatgccccatccccgacaccccacacaccccatcccccacacctccatgccccatcccctgcaccccacacgccctttccatgccccatcccccacaccccacacactttcccacacctcacccccacaccccatgccccacatgctgtttcccaggccccacccccccacggcccatcccccacaccccacacgccatccccacccccgatcctccacaccccatcccctacgccccacatgccgtttcccacaccccatcccccatgccccaggcgccatcccccacgcaccgtcccctacctgtgctccccagcctgggagcaccctgtgcgcacttcctgcactctgagaggccccagactccctgcgcttgtccgacctcacaggcaggggcccatgggggccaggaaagcaccacccactcctaaagttctttgaaaaataatcccgccaaagcctgggccaccaagaagggcctcccctcctgtgcctggatgctggtttctagaaggaaagaaattgaacaggagccgccagaaaaccctcctggtggatgggggtgtccggagcaagggcggggtttgggaagcccgggctggctcctggatttgcccactgcccttccaccaagtttatggagaaaacctccccggacgcacctgcagccaggcagccctgaagcccaagcagaaggcagaggagcctgagggcctgggagaccatgatgaaatctctgcagtgctgcccctgcctgttgacattccccatgggactgacgggcaaagttctctgcctccaagggtgacagagggatgggggaggggaggacacaggcgtcctctgaacaccccagctgagagctgcacctggccggccagtggccatgcatcccctgctgcccagccactgagctcaagtgggggggacaggagaaaggtcaggtgaccccagctgtgctgcagagcggacggttttgttgccagcgtgcaggtgttaaggtgtgtgtggcaccaacacttcaaatacgatctagaattccaaacccctaatgtaagttgggaaacagatttaaactgcagatgaaaacttgtcccatagcaatcatgcgagtcaaatctcaagactgtatcttgggtgtggatgtaaatatttgaagagagcctccagaccaggccagctaggccgttgcctgcaagggaggctggtttcttaggtgagccacagagcctcactgagaagtgccgggaataggatcattctggccctgagctgggcacccccactccgttttgactgcaggcagcacccccattctccagcggtccacatcttacgtctttttgtttgttttgttttgtttgtttgagacagagtcttgctctgttgccaggctggagagtgcactggtgcaatctcactgcaacctccacctcccgggttcaagtgattcttgtgcctcagcctcctgagtagctgggaccacaggtgcacgtcaccatgcctggctaatttatatatatatattttttttttttagcagagatggggtttcaccgtgttgaccaggctggtttcgaactcctgacctcaagtgatccacatgcctcagcctcccaaagtgctgggattacaggcgtgagccactgtgcccggctggcggcagtccacgtcatttctacctgctgtcatgggcccaagccacaagctgtggtgactaaccaccccaggttgcccagggactgagggttctcagaatgtggaactttccatcccaaaaacactggggtagacggtcatccaagcctcctgggttgcccagcaggcctgtctgacccctcaagcagggagtatcctccatgtgaacagttgcattgctgatgacttctttggaagctgatgtccagttctttttacggctggagggagggaggtgattccttcccaacagccaagtcttagctcaggggtgcctttcaaagcagcccccagcacccccaaagcctccctgcttgctgctgacctgcatctcagtccagagagcagagcacttgctgaggggccgacagggcatgttttctcttccacccagcacagctgaagcccatctgtgcccctccatgatatcgatcccagggagatcgcttacaaagtagctgctccgtctggaataaagctcacgtccagctcaaatctggtccccgcggctctcggccagcacagcccaaggtaatttcaggacgtggaggggagggggccatatctaaaccctacccctttcccacctgagagtagatggctggctggtcttagggtacccttcccctttggggctccaggtcagaggtcctcaaccctctctgggcagcagaatgacctggggaacctcaagcgccaaaaccccctgagagattcagtggctcatggcctcggggctggtgaagctcttcaggtgatggaccctcacctgcatgcagccctctctgtgcgggcaggcgggagggggcaggaaccgggctatctggctgggctctctgcccgtctcactgctggccagggcggctgcaggtgcccgcctatggccattgtcctggtgtgggtccttgaggacacaggtgtgaggggctccacctggccccggggacccgctccatacctccctgagggggacctgcctgctggtctccctcccacgtctgtcccaggggcatgcctggaaccttgcctggggctggacccggccacacggagtagcaggtgtgggggctgctgcaccatccctctcacaaaaccccacttcctcccttcagggaggctaaccaggctctcccaggactcccgggacctcctctggggcctccttggacatgctgtggccctgtcactaggatgggagggtccttcagcccctaccctggggaagggcacggtcacagctctgttcccaggccaggcctccctctctcctgtggcagcctctgttgatccacccatccactcattcccgcctgcaagaagggctgggcccctccgcctcacagtcactcttgagtgtggaggacacaggaaaactttggttgtcatctcaaggcaagttgcttgtttgggggctacagaaaccacgtcagcaccttgttcatctgcagccatccctgactgtggtggtgggcacacgtgagctgtccagggagtgtgtgagtcagatgtctgtgacatcagaatctcttgggtggtggctcatgcctgtaatcccagcactttgggaggctgaggactgaggatcgcttgaggaaaggagttccagaccaacctgggcaacatagcaagaccaaagctagacaaaaaataaaaaaattagctgggcttggtggttcatgcctgtggtcccagagacagagaacccgggaggcagaggttgcaatgagctgagattgtgccactgcactcaagcctgggcgacagagggagaccctgactccttccctaccaaagaatctccatgctcacactcgtacatgagaaccacgctcgcacaacccaaactcacgccatacacataccacactcacacacaccgtacacatgccacactcataccccaaagtcacaccacataaacacacccctatacacatgccacacacctacacacacgtgatttccaggctcttccacacccataaggaattggaatctacgggcaggtcccgggaatagtattgaacaaacatccagggaaactgctatgtgttctcgttttgggaaccagtgagcacatcccacctggtgccaaatgcatctcggcaggacgcatgtatgccagggaaacaggcagccactaacaggatttgagcttgggcaccaattggttccaaatcctatttggtgcaatcctagaagcaagggtttccttgtgacggagggtgcagggcatgggaggacagaggagctgcgtgcacggatgcctgtgtgccctgtgcctgcaaagccgccacagcaagctgtcttgcaggccagttccaatggctgacagtgtgtgcactggcgaggaaaagcctgtgctaagcggaactctgctgtctgtgcagagaagggagctgggcctgggcaccactgtcagccagtagagcacggggctgctccctccaccccacccgggtgctttgccttcttggggccacagctggaggcagctgagccctcgggcctgccgggtgtcacaccagtgctgtaggatgctaactttcagtttaagagagagaatgtatgcaaggttgaacagttatgattttgagcagaatttttcttctctgggccttggtcctgcttttcacccttgtctggggtcttagcgtggagagaaattcaccatgggatgtgctcagattgtccatcttatctttttgtccatctcttaaagtgtagcttgtcttttgtaagaaatctatccttgccctaggcaataagaatattctgtttcctcataataatgttttaatcttaagtttgggggggctatacttttatgccatcatccacatggaaaggcagctgtcccaataacacccgttcctgaagaggccattccgtgccaaagattgaccagccccaggacaagccaggtccctgcacacatccctgcctgggaatctgaattctgctcgaccagtttagcctctctcccccttgtcacgactgatgacaggtttatgatctatccagatgcctggtaggtgagccctcctcctcctgcctctgctccccgaatcaccacggctatactcagacctttatcttctatgtttattacaatcaacttcctaattccacaaagaattctgttggaattttgatgaaatacacagattaacttgggggagagttaacactttggtgatactgaattgtcccatccataaaaatctcccatttaggccttcttttatgaccttctatcatgtttcataattttgtccaaaacttttgttacatttattttagtatttaggttgctgttaaaatagtattgttattgctaggaatgttaataactttttgtgggttgatcttgtggacttcttagtttcaatagtttatgaattcacctggtttttctagatatgaaaagttatttttcaattagcatgccttggttcctttttctttttttctttttttgagatggagtttcactcttgttgcccaggctggagtgcaatggcgacatctcggctcacggcaacctctgcctcctgggatcaggcgattctcccgtctcagcctcccgagtagctgggattacaggcatgcaccaccacgcccggctaattttgtatttttaatagagacggggtttcaccgtgttagccaggatggtctcgatctcctgacctcgtgatctgccgcctcggcctcccaaagtgctgggatgacaggcctgagccgccgcgctggccttgtttccttttcctttgcggtggtagtcactagtactgcggctaaatggcgctggagagtagtggggccccgttcagttctgctgccaatggggatggttctaaaggatttcagtacttaaaatttttgctgcagccgggcgcggtggctcacgcctgtaatcccagcactttgggaggctgaggtgggagatcacgaggtcaggagatcgagaccatcccggctaacgcagtgaaaccccgtctctactaaaaatacaaaaaatgagccgggcgtggtggcgggcgcctgtagtcccagctcctcgggaggctgaggcaggagagtggtgtgaacccgggaggcggagcttgcagtgagccgagatcgcgccactgcactccagcctgggcgacagagcgagactccgtctcagaaaacaaacaaacaaacaaacaaaaaaaaaaagttcgctgcaaagattttgtttgatacatattatttagttaaagaaattttcttctactcctagttggcctaacatgacaagtacatgttgaataaaaattgaattattgttttgcatttgttaagctggtgattttacccttcacttcattaatatggcaaattatagccacattaacatactaccccttgcattcctgggatgaatttacttgcttagaaagtattacctttatttataacacagaattgggttttacttaattatatttcatttggaatttttgcattcatcttcataattttattttttcttacattgtctttttgtttggttgattttgagagacagggtcttgctctgttgcccaggctggagtgcagtggcatgatcatcatagctcactgcagccttggactcctgggctcacttgtaaggtctcagcttcccaagtagctgggactacaggtatgtgccaccatgcccggctaatttttaaatttcatgtagagatggtgtcttgcaatgttgcccaggctggtctcaaactcctggtctcagacaactctcccacctcggcctcccaaagtactagaagaacagatgtgagccacctggcccagctgattcttttcttacataatctttgtcaggtttgggtaccaaggttaaatttgattcataactttattgagttgctttctcttgttatattcttttaaatagcttttataaatatgtttgtatgcttacaaaatcacctagatctggtatctgtttggggtaattttttttttaattgcaatgcaatttctgtaactgttattcatcaacccaagtatttcatttcttcttgaccaattctaacaataaatcctatttatctgttttcaaatatattggcagaaaggtgttcataatggttctctcatatttaaaattttttatttgatatggagtttcttaggttttctataaattagtcagttttattagatttttcaggtacaaagtttgagttttgcttttgattttgttattctcttttctcaactgtcctaattgacagaagtatttaaatactttctttgggttacgctagtcttatttttttggcttaaatggttaactcgttcattttgtcatgtataaaatcagacaccactaagctgtcgacaccaatctgagctggccgtggctgctccctcccgtggctctgtgcacgctgtccagttctagagagcagactgcccgcatcccgtgagttagaaacaagcttttaaattgccaaacagtgtttcaatgatcttcccattgttttgcaaatattttgtttgtgctccatgtgtgctggaaaataacgcagatttctctacgtttaggggcaaacagggatcacttttcatgacagtcaacattgctgtctgccgactgccaactttgctgtgttttgagctttatagtcagtggcttatgagttcctgattgccacgcagccccctttactctatgaactgtcctgaatcccatttcaggtcatcgatactgctacaccagctttcttatggtgtttgtctgttctgtcttcttttattttaaatctccaatctatatataaatttgcttgatggtctctaagcagtgacttgtcacgtctgatccgatgctcttccaggccagcataacatgatcacgtctgttgtgagccagacacatctgggctgtctcttccgttacatgttgtttcctgttaaccatgctttcccctttctccacccttcccttcttctattggatcaataccctttctttatgctcccttttctggtctggagagtgtcggctgcattgtgattctgtaatggttccactacgcttcctctgctgcctttgcgtttctgacacgcacaaccttgttgctattttgtcatcatcgccgtctgacagaagaaagcaaagcggttgctcggtgcctgagccgcacgctgggccctgcccactgccggcttcttttccgtcccaacaatgacttaccatgtgcaagcacagtgcactgcggccctggaaaccccgactgctgagacgttctgtgtcttgacagacaaaggcagatggcaggagttgctgatatttattcaaacgtcatccatacaataaagaactctgcttttaaaattccatttacatcagcagttaaaaaaaagtgacagtggatgaaacatgaagctgtaaagtgcctttatggggagggtcacacaagggcgcgcagctgtgcgacgagacggaggcaccgcgcctgcacagtacatcagggacatcgcgggacacagcacgcgttccaaataacttacacatcagaggaaaagctgccgagtctctgcatgcttcctatttgattccgcaccctggaggtctggccagtgacggctacaagccgctgggagggtagcgtgaggggaatgcagccacgcctgcctccactgtgctggggctgggaaccgtgaggctgtgaggcggccctcccagcagcacggggacagcgaatatgtcctttccagcaagacacatatgtacacacatggtcagaggtgcacacatacaaaaacatctgcagactagacaccgaaagggcttcaaaagttttgaacagaatatgtttctgaaacacaagaagttggtaaaacagaagagtttttttccagttctgctgtgacttgaataaaatactctccccactttcacttctgtactcaaggtggtcaccaggtggcaggtggacctgggtgggaggcagggggcgcgtggggagtggagtggaggtgcggcctccgaggaggctgcagtgcagtgaggcaggggcagggctctctgagctatggtcggcagcactggtccacgccacaccctgcagaaactgcatctttgtattttctttaaaagcaataaaaatatcctaattcagtgaagctctttaaaaaaatcaagtccctgcattttttttgtagaaaagaacgttaattgtttaaattatagtttaaattttcttttgaaaatgaaccctaggtagataaaggaatctccttggcttctaactgcttttggtggtggagacaccacctgatgtcacccacggacacgttttcatccacctgtgaccagggagcttcagggagtgccatccgtttccatgggagagcccccccaaagtcacttagtggtataaacaacgtgcttctatgtaaaccccggtaacaaaaaaatagttttctatcaaatacagtatcaaattgtcatttcatgtaaacacagtgattcctggtgaagaattgaggccaaagtaccacaaaaaatggccacgggattgatccctgcttgaaaaaatcctaaaacttgtaaaagctaaagagaccccgtgccccgctctcctcaggccgttggccagaggatcctccacttctccggaagcagctccaccacggtccgcgcgtcccctgaaagcaccgtccagaggcagaagcagcacggtggagccaggacgagatgccgctgcccggcgcctgccgcccggggctgttccctgcggcccctcctctgtgggctctggagtctccggggaagccccagcgggccggggtcttccgtggaacctgcctctgccccggaggggtcctctgcagcccgcacggccaggcgctctgggtgggggcggtgaggtgccccttcctcggggcgtccgggggccgcgccctccccacgccaccgcagccccagacagcgcgcgggtctccggcgccgaggccgcgctacccctgcaggtcggagaagggggcctggccgccctcgctgcagctggacgagttgctcagcacggccgaccccgggctcgactctgcggggagatcaggcggggacgggcttcggcgtcggctctgccgggcacacacggggcagcttcctcgcccgggcccttggcagcgtcacgggtgggctcggggcacgtgggccttacctgagctgctcaggcactgggccgagccggacgggccgagccggacggacaggctgctggccggcacccagccctccttgccagtggtcgggtccctgacgtacctgcaaggggcgagggtcagcggcagccacgtgcggggcagtccggggctgagcgcggggtcttaccagaggccctcgtcgccctcctgcaccagctccaccacgtccccgctcctcacgcgcagcgcatcggggcctcccttctcgtggtccgccacgaccgtgtatttacctggaacctggtgggagacgggcaggggcacagacagcgtcagcacccgccccggcagcagccccacagcagccaggcggagtgccgggccttagcgccctgccccggtgggagctcctggccacgaccagctccggggaagggctccagccttgggaggaggctacgccgcagggcatgactaccgcagcggcgatggaaggcgtctgtgaatctgtctttgggcccagctgccccagcccctcacgctggtctccacacacagctctcggccccagggcctttgcgcctgcatacccgcctcccggagggcccttccgtgctttcaggtcttatttccatgctgctttgctgaggccttccttggtactccccgactcgcccgtcctctgccctccctctccctgcagctgtcctgcccaacctccccaagcctcactcctctttctctcctcactgtaagagtggaggttcctgtctgtgctgttcccgctttgtctccggggcctagaactgtgcctggcacacagcggatgctgcacagatgtcatggaacacgttccgttggggaatggggacccaggaagcggcagctgttcctacagagtggggagattcacagcctcctggtgctgcgtgtggtgggctgcggaggggtgctgccggctgcagggcctggagcaggaggacggtgactgggccacctgccctcacgtgatggcctggagcaggaggacggtgactgggccacctgctctcacatgatggcctggagcaagaggacggtgactgggctgcctgccctcacgtgatggcctgtactggctcctgcctctgtggtgcccagagtagccaggatcactccccacaccccacaaagaatgagatccaaatccctccccaggccccgtgcaccctgttccaccagcctgtttcccctcctgccacgtggcctccgcctctgtgtcccccacatctgttctcacgcccaggccttccttcatgctgtctctgtgggagaggccagaggccccgagggctctccctacccttccacgcctggcttctctgcccttccagagcctccgggacctgtcccctttgcacctccagccttggggcatggaccacgcacagcacagaaggtgcagcagacacttcttggtgtaaccctcactggaatgattaacacatggcagctttttcttgcttctgacattaacaatgaatgttttttcaaatgcaaatccatgcttagcagttccattttcttacaaaatgagaattgtatgtatagttaggaaggctcagtgacagcattctatgacataaagggtaggggggtggggactgtctcctctgaggaaggtgcacccacgagtgggctctacaggaggctgggtgggcacctggaaattaacccagaaacacaaagtgctgctgagacagaggagctaggaggagctggggctgcatcctaagacccaggcccaggtggaccttccagagagagttaggaggagctggggctgtgccccaagacccaggtctgggtggaccttccagagagagttaggaggagctggcactgcccgtaagacccaggcccatgtggaccttccagggttaggaggagctggggctgtgtcctaagacccaagcctgggtggacctgccagaagcacccctaatccccggagggcagcccccaccccaagtgcccacagggaagccgtggttaccagcttcttggggcccaacccgccgtcctcctctgcgtcggacgagttaatctgctcctctgcacttgaccagcccccgtcgtcctcaggtgcctccagtgagtgggacgttttgctccaacctaagagagacagacacccgtgagggaccccccggtgatgagccgctgtctgcatctgtctgaggtggggtcagctaagtcccacagaccccctgaaatgtgtgccgtgggcccccaacagagcctgtcatcttcccgggttcataaagagctgagcaggacacccctgcaaacttccagaatgcctggcacgtttcagggtttgagaccatctgcttccaattgctgggccaccctgtgggagacctcgatccccaggccctgggaagccacgcccttgtcaggcagggcagtgcccctcagccaggagggaagcagccttcctgccgcagatgccctcccaggcaggtgttttcagtgagtgccacggtcatgttcaacacctagcagaccgagccgggaagcagtttctaaagtgaatgactgaagctcactgagagggcctgacgcccttgacctatgggataccgagggctgtggtccccactggcaagagagtagcccccggcacagcggcaccgaaccggaaggctgagaccatgcaggtgccgcggtggagatgggctcccatcggccacgcagctcccagcgggagaagaggaaggagcttcttccagacttgggaccacacatgcccccctccccaacccagtgttcctcctgccaggctcccagagggcagcaccggcctttcccatgcgggggagatgggagacgccattg

SEQ ID NO: 35 - DNA, 33776 bp, Mus musculus
gccttccacaccatcttcctgtggtgacctctggcgccacatgcagccgcacgagcccatctctcaccctgtcattcgtgcccaccaatgctgtgtagatacaaatgcctgacgttatcttttaggggtgccttttggatacagagagagccaactttacgagtgcagcctcctaagaactggggctgttaaccacttttccagcctgacgtcttctgccccttctccctctgcctcacttcacattttcctgtcagctctgcaggcctctgcctttcttgctgtcgtgaccctcaagtgctgattaccatggtcaggcgtcttctggggtgtttttgccagtgaacagtggcaaagaagccttttaactgagagctgaaatagtctggtcacctggggatgctcttcagtgaccaaagccctgatgtgtttcagctctgcacagggatccctcccaacagtccagctctccccaggtgacaggcatgggttcaaagaactaatgtgctccccaacttataattcttacctggcttcaaacttgagcaaaagaagcttgttctatagcgacgttctttctaaagcagagctgagggcagcccctaagaggatgactgacggctaaggccaccatctaccacctctgctgtctgggcctctccccttccctgtgagaaccctcagtcatttcatctcgccaacctttcacctgcctcctccactcactcagcagttcttcagctttctctctactgttgtatttttgcctcttcctcttcctgcagcctctccgaccagtcctgacaaaaaagctaagcggcacgaagtaaagagcgacccgactccctttggtttgcgaggtagcgctgcagcccctgaaccccagcccagcatgctgtctggctgtgcagggcacctaggatgaaagcaagtagatcagacgagccaggagcagtagtaactgatgggtcacagcttgaagcctagtaacagatgctgacagatgctacattcctgctggctccttagcccatggttggcaagcacaggcacaggcacagcttggctgaccagcttttcactgagatttatcactcagtgctggtgcaggctacaggtgccctgttcaagggtcacagtaccaacaccctcccccgagtcaccagccagcccagttcttctgggtagaaagaagctgcaagatcaagtctttgctccaggcggacagtcactcacatgggccactggagtcagctacactcagggccttgagtctctgtgtccttctcccaaatcctccattgtccctcaaggatctcagattccaggagagggttcccaggagcaccctcagcatgataccagacttaccctacccccaaacgatgctccaaggcccaattccccaaccggtgtgccaaatgctgttccctcctcgttccggcttagtgttcccatccttcctaccttccatcatgcactgccttctacagaagtgggtgcagatgcaggccacgcctgagggggggcgttgtacagagcctgacattctcatgcagtgtcccagcatcctccaaagagagtgatccccccctaatctgcggtcatcaatacttgtaaatcctttcatgtatgtgtctcgcttctgctccctggaaactgccagagcagcatgccaggccccctgttaacagagtatccaatactctgacagcattgtggcctggtgctgatctggtcacaggcacttcagttatggcagctgccaaagcttgagctgattgaagcgtctcagacacgctaaggaaggcaacggtttctttatagtttgtgacccgctgggtgggctctgatgatggaaagttgtgtacttagaagtgttcatctgctccaacagtccttctgctcaggtagaggcccctgtgtaagcactgtagaggtggttggaggggaaagacaactgagtcaggcttcttgcacgtgtcttggagcaagaagggagatgactatagctgggaacctctagaaatcagttcttaacttacatgcaagcctgacatgacacttcccaggaccaagtacacagctgtccccaggcctcagggaggtagacagaggggctccacttgttcctgccatggtggggtgggctctgagcctgcatagctagctggtagctgggaaatgtctaggcccagctgttttctaggaagacagagaggtttaccagtgtccctgggaatgctcagctatggagtggttgcagagctaacagcttctttgttgccctgatttcatgggggctgttctgtaattccatcacacccctgcatcctcttacaaggaagaaccacgctgcaccagcacctagtactatatgatgtcaggtatgcctagccttggatccaacaagcaagctggccttccttgctgtgctttttgtgtgatgatgtgtcctccagtgtcgtccagtgactattcagtacccagtaggacagggtagttgctccaacctattactgtctgaagaatttactcaataggagtttatgatctccatgtctgcagtatgggaaatactgtaatatcctttggcgcatacatcaagataaacaagaatgacgcagtaggaaattcggggacccactggccaacccagtggatttgccaggaggcaggactggggctctatcattgctagactgcccatacatggcttaacctagtcctggtcattaacttgtgtatctcacaggtcagggatttacttggtcattcttgccgggaattgtttttcctggcggccaagtaggtattgcccatcggaatttttatctgaagacagcatcccttcgtggggtttgctatagggtttaagtaggtgagcttagtaggtccaggggcctgaagaaggtagaaatgtccaggggagttctgggcctcatcttaacccttagagtggcccggcaaatagcaaaatagacatgggcactctcatactgcgtctccctgtgctatgcagtcatagcagaatggagccagcattttataacagtgtaggaaccagtggggagtctaagcagatgattccagtgacagaaaactgtcacatgccacacagttcaatgaacctaggaagatggtagacttaagttcagagtcccacagatacacgttccaaggggtctgtggacctcagatcgaatacacttgggtaatggtgactgtagtgtgtgtgtgtgtgtgtgtgtgtgtgtgtgtgtgtgtgtgtgtgtgtgtatgcacatacctcacacggcactgtttctcctaggctggagcaaaacatcccactccctggaggcccctgaggaggacggaggctggtccagtgctgaggaactcatcaactcatctgatgctgaggaagacggtggagtgggccctaagaagctggtaaccatgacctccctacgggtgtccctaagtgggtccctgtgtctagtgaggatacatcctggcctgggccctctgttgcagccactgttcatcatctagagatacccagtgctcacttagatcactatccactacccacagccccatggcaccgtgtgccccctgcctctgctagagcacaggcatggtttaccccttcttaaggggacagcccatacttacacatagttaacattggtagaatgttctagccaaacccgtaaagacaggtagtaatgtggacacattgatacactcgtttttattttttaacatggccacaatatgaattgtaccatctccctaacactaggagtctttcagtttaagccagaaatctcaccaaaacctttacaagtggcagaaccccaacactacactggtcttccccttgctagttctaatgtgggcactgctgctagtgtatagctggtgatagaggtagagaacagacagagatagaggataggtgtgttgtgggggctgctggcgctgggaagagggagtgccaacaggatgaaacctcagccctatcccttgtcactctcaggtgccgggtaaatacacagtggtgatggatgatgagaaagggggccctgacacccttgccatgaggagtggagatatggtggaggtggtggaagaaggcgctgagggcctctggtaagatggcggtaaactctcctgcctcagacatgtccctcacacacaaatgacctgtgtgttcctacccagacatgaccatgtgtgttcctacctcagatatgtccctgtgtgattcccacctcagacatgtccctgtgtgattcctacctcagacatgacctatgtgttcctacctcagacatgtccatcacacacgaatgacctgtgtgttcctacctcagacatgaccatgtgtgttcctacctcagatatgtccctgtgtgttcctacctcagacatgttcttgtgtgattcccacctcagacatgacctacttgttcctacctcacacatgtccctgtgtggtcccacctcagacatgatctgtgcgttcccacctcagaggtgacctgtgtagtctgacctcagacatgcctctgtatgttcccacctcagatgcatccatttgcccacctcagaggcacccagcgacagattgggggcatgtggaacattacagccagtgacttcctctttcaggtatgttcgggacctgaccagcagcaaggagggatgggtgccagccagcagcctatccaccctcctgggcaaatccagttcagcccagtgtctgagcagctcaggtaagatccactgtgcgcgccagctgtgccctgagcctgccgagatcctcagcccagagcccgtttaaaagcagaggggtttctaggtgtgcagagcaaagggccagagccgaagcctgtctccactggtttcccgcagactccagcccagggtcagccgtgctgagcagctcatccagcttcagcgagggctaccctgctcccttctccgagctccagggatagtggccaggcccctgtggcaggcactcgaggtcaccgtgcagtagaccagcatgcaaatctctaagttttttggtttttttttatttttaatttttatttttgcttgggcttgcttagtttgggaggggatggtgctccgagatctctggaaacaggaggcccctgtcagccatgggcttcagaggacattggggccttggaaccaggaccccactgcatatgcagatgccaggagacaacagttcaccaccaaagcttcttcagagactccagagtggacagaggcggggctgtgggtcaggagacccctgtgcaggaagctgggaggcagccaacagcccctgctgtgcagcctctctaaggtgtcctggcctctctggtgctttctacggcaacacgaccctgaggaagccacttctaacaggagtgaacagtttgctaccaacagcctaagggggggtcaagggactctcgtcttttataagtttttgattttttttaaacagggattaaccccatggccattttttgtggtactctggcctcaaaactttaaccaagaatcactgtgtttacatgaaatgacaatttgatactgtatttgatataaaactattttttgttactggggtttacatcaaagcacgttgtttatacaactaactgatttctggggcactctcgctgagacctggcactccctggaatacaggtgcaggaaggcctggtcagccagggggtgtgtcctcctgggcagccagggggcgtgtcctccaccaaaagcagttggaaatcattgagagtcttgcatctgcataggtttcgttttcacaagaaatgtaaagtataatttaaaatattagccttcttttctacaatataaaggagactctctgttttttaaaagaacatcattaaattaggatatttttattatttttaaagaaaatgtataactccatgctgtcagtcatcctcagcaactcaggcactggctgcctctccacgtcagggcaggccccacttcccctctcctagccccgtccactctgccctacagcaggaggggctgcagctgagcttggggtgggggacggggatctgcagcctccattcaagtcacggcagaactgccacaaactgttgttttccgcttttttgtgtgtttcagaaacaaattctgttctttggaaactctctgtgcctagtagggcagatatttttatatgtgtgtatatatgttcacgtgtgtacataggatcttggtgtaaaggatgtatttatggtctcacgctgctgaacatgtgtcactttacggtccctccctgtctcctcaccctgctgccatgggaggccaccgaggctcgttcaccactgtatgtccaggaaaaacaccctcctcccctgccctatggcttgcaaagccattactggctacaccttcagagaatggtaataaaataaaaaacgtgcaaagactcagtagcatttctggttatgtgttatgcgggaagaatcgtgggacataactgcccagcctgttttgaaaaagccaccttcctttgggaacttgtcctcataaggacactttaaaatgtcatgtttttgccgggcatggtggctcatgcttttaatcccaacactcaggaagcagaggcaggcagatcttcttgagtttgaggccagcctgttctacgcagagagctccaagccagcaagagctacacacagtgaggcctcatctaaaaaccaaccaacaacaaatgtcacacctcattcagcattgctcttacttcctactgctctgatataagtaagaagttaaactcagaagtctttattgtgtgaatgaagtttggataaaggccagcaattcctgccatctcccctcttggtgtgagccctgggctcccagaatggttgtcacaaatgccttgtgtggctactgtaagactgaggcagaacggtagggtgtggaggaagtgcgggtaccacacataatatgatatatgttttattttatctgacagtgatggtgttaaaatagtaacaacatatacttgggtgtgtgctgagtgtggaggggactagagacatgcagtagaggcattacagaatagtaataacacatttgacaactcctcgttgagaaggtagagagtgaagcaggtttgttgatctgtgagaaaggtagggtggagaaatggggaaagaacagtgagcagagacacaaaaatataataaagagatgtgagcagacatgtctgacttcacagggcaactagtgtcctaattgatgtgcccagacagcaccaaacaggctagataaattaccactaaaggggagcctgagaaaagggcgatgactgagaataaaggaaagcaaaaggagtagcctgaataaaaggaaaagaaagctaacatagtaatgctactaacaaaaatgaaatttatggcagttagactataaggagctagatggacatccaaacttttaggctagtaataatgttccaagtgcagacagcaaggcttggtggtcaatgctgctgccatagacactgatgcctgtgtatcaaacaggaaatggtaccattttcagcacacacagaacatacacaaagcaatgaaatagatactttgtgaatggtgtttggaagtccgtagccattattctgtggtatccacttaatctaatctgacaacactgtggataacaagtataatcagttaaattaaaagtataaagaagaaattgagagagttaaaataaaaacaaatcaaaaccttaattcttgaaaaccagaaaaactgactgtaacttgtagaaaaaacaagaaacaaccttgcctgcgcccgcacaagccgtgcagatctccacccacggaacatccagagagtcgcaccactgcgctgatggagcagacatgggcagagctagggctggggttgctgcttccggcactgctcctacccacacagattcaatgcaaccaaatatctgttgcaccagtttccagtaaccagaatatttctgcttccccaaatccaagtaatgctaccaccagagtgggtggcagctccccgcagtccacagctggtctcctggcacacactctctctctcttctacatctctactgttagagactcaggccaggaaatgtttctacttcccatcttctagactcaccccaaatggcaaccacaagtccaatgtgaccaggaataaacaggttaccatacctcaacagaaaacactgagaattcaaaatctgaccagattaaaggacgcgttgagagaagagagatgccaatattgaacctgctggaatcttacattccaagatgaagacggcatccagaattgatgtgatttccttgaatgtggcttaagaaatgtggacacttaaaactctcacttgaaattggacataggtttgatgtagagattaggacagggtgcagaatggagacccattttgtcattggttcatctgacctataaagccatagtgcagttaggtgatattcaaaagcgtctttcatgctatttatgtatatgttagaaggaactaccaggcgttgctttaaattcccaatttgttgtttcagtactactaatttaatatgctaagctctaggtaaagttccacgttgtggaactttgactattctctttgaaagtgaacattttacaccctccttctgtggctttagatctggcattgtatttgacctttattagtaattgacatgtatcaggcaatgatggattggaacccacccccaaatccagccaccactgaataaatctgatttaaaaagtcaaaaaaaaaaaaaccctaagaaactatttagcaaagagtgttagaacatgtcaaacaacagtggtagaacacacacactcgccctatagggccagtaacctcccagaccatggcgtttggtttggtttggtttggtttggttttggtttggtttggtttggtttggtttggtttggtttggtttggtttggtttggtttggtttcttttgggttttggccaggtttacagcaccaggcgattccctcctatggagccagcctcatatccaaatcagaaaagagttggttacccctctaacagttgtaattggttaccagtgtaacagtcatagttggttacccctctaacagtcatagttggtttcccctgtgacagttgtaattggcttcccctgtaaccgtcatagttggttacccctctaacaattgtaattggttacccctctaacagccctagtttgttagccctgtaacagtcataccactgtttgattcataggttcggttactacctatgtagtcactgttctagcatgcagggttctctggtgaatgggacagctgatgactctttcctccaatggatactttcagaactatgaaaacaaagcataagggaggaagtttcaaggtcagtgccaatttgattctctatatgctacagataaagtgtggtgtatcttcagcaatcatatatttatggtgggcaagcaagaacaatgacctatgttgggaaaaaaaccccacaaattctaaacaagtaaatttgtccatgtaatgcaggtatggtgcaatatcaaaaaagtactgctgtaacttaccatgtcaaactgaaccagataagtcagcagtctcatagatgtacaaaattttaattgatcattaatttatcatggttattgcaccaggagtttaaaaacagttttcaaccagataaagcatgtgtatcaatcttcaaagcaaaaattttaagtatcctcatccaagcagaaatcaaagagaggtgagcaagagccttcctagcatacaggacaaacatgaggacacctcactattgagatcactcactagaatagggactagcacaaaggagcaagaaatgaatctggtggattgaaagtacctgctcctaaccaggaaattcaggagcattcacacattgttaacagtagagtcctcgaggctaatacacagagcaaaacagacccagagaagacacagacccagagcaagacagggatccagagcaagatacagatccagagcaagacacagatccagagcaagacacaaatccagagcaagacacagatccagagcaagacagatccagaggaaataaaagtgatactgacctttctgattcagatcagctctctagttcttaaacttcaagttactggtggcattgccactggtccccaaccttgcagggtgtcagaacccacaggcatcatcaaactctgtgattaggactgctccaaagattctgcttccccatggagtgagggagcctgcatctgtgtaggtgtcatggatgatgtgagtgtgaaggtgtagcgtgcatgtatacaagggtgtgcataggctgtgtgtggagtgtgtgcataggtgtaagaatggtatgcaactgtgcaaagacagtgtgcatgtgtacaagtccataaggaagtgtgagcataatgtatgtgtgtgtccccaggtaattctgagcccactgtcacttacgggtctctcatgtgtgtcacatgtacaagggtgaggctgacatgtagcagcatgctgagggttccagtcctgttctgcagactgtgggggagcccttggggagctggctggggatgaggcttagtgcttcctatcccagagaaggggcaaatggtccctgagcacatacaaggaatatccacataagaaggactcccggatcccagaagaagcctgtttatctttcctgagaaggtaagtggggaggagtccaaaagacggacagacagtgaccccatgctatccctccatgtgtctgcactatgtatgtacagtgctaatggtacccatggtacaggtgtgaaaagaagaccaagcaaacaaggcccctgcaggtccaaatgggatccttgacgcctgagacgcaggagccagccaaggcacgtgccacagggaggtcgccatctgctgaagaactttagccagagcccaagcaccaggcgggctcagcatctgtcctctgaagcaactccaattgttctgctgctccagaaagctaaatacacagttcctggaactcaatagggaagagaatcctgagaccaggtccagcctcacataagagagctgggatgaatggctgccatctcctctcatgtccctggagttaccctgtcacgagagcattggattttactgggtgaaatttgacctctatcccagaagaagcaactggggtcccaagtgtgaagggaccccaggagtcaaaggtgcccctggggtacaccatgctggcaaagattaaagtccctgactagagagggagaggtactgtagtgtcccacaaatgaggtctgactcccaaaagagtggtccagccttgtactgccccctccctgaaaagaacattttcctcagagggtccaactgaagcccacagtgtagtctaggaggctgcatgaccataaaccgagtgtccttgggctagatccagtttttacacagaaagtttcacgtgctgagaaaccttgttgatctcaggcaacccagtgtccacaactccacctggagcctgggccagaggacacaaagggacaagtcatgggccacctgccgatagctgtttccacagtgtgggaagaggaggggcagggcagcccttgagagccattgacggctgcacagcccaggtctgccctacaggtcttttccaggtcataagcccataccctgtgctttaacaatgtcatcactgtgaatatggacatccatcggtgggtgagctctgttcacacctccggtctgagcccacattgcctgccttagctttcctctttccctggatgtacaagtgccagagacataagtggcagcctccaaccggcctccatgcttccagccaatgctccagctttctccacccctctcccctcccccctgacctttgccctcccggcagcatctggacagtcaccagccagaagccacagtctcatcatggttccacaggcgcatgggctgctgcttctctgctttctgctccagctccagggacctctagggactgcaggtatatatgtctgtctgtccggggagggtttctctgtgcatggagttgctgctctttgcagaggcagctgggacatcaacaggaaccccctcatgagcagcacacttgatgtgtgtccctgacaaaagcagatagcatctggatgcttgccacccggaaataggcagctcttcacaggggtgggatctttggctgtcgtcctccagagacgttttagaagtagggtgctttcctgccctctatggacacagacacttgcctgtgaaattagagcctgggggtcactcagtacagagctctgtggcaaggggtcagatgtgtcagaacagccacagggcaactgcactagagggctcgctcactgccttggctctacatccacatccacagcccctcccaccaagtcccccaccacatacatacatgtgtgcctctaaggccttgggggagaaagctcgtagttatgaatcacaagttgcagtcttacagaaagagatgctgccaggaacattcccatgcatagtgacatgggtggtcgagccagtactgtcccccttggaagcccatggcacatagggattgcagtggattctcctgtggaactgagtgacaacaggagcaatggctttcccaagttctctgcagtggtatggaagaccttggggtcaggtttgctttggatctccaggagattggctgaagtaaatttaccttctcctaagggcccaccccttacacaatcacttgctgtagaagtgtatgtgtcccagtggctggtggcatatggatccttctctgcctggtgaaggacattgattggtccagttggacagtgtctccatcctctctaggaacaccagagagtgttcctcggcccttcctcttccctctctctgtcccttcccaaaatggtttatctgacttccactcttgtccttccaagggaccctcctctggggtgtaccaacgtcctcctggtaagcagagccacctttcaaccccacctagacccagctcctcccagtaaggccctctgagcctcctctgcatagggaaagcctgtctctgttagccctcctcctgaatacattggatgctattgggtcttccataactgccttccttcaaggctcttcttcccatctcagttacacgtcttcccgtccacagatatcccaggcacacagtttatgtgacacagttgtcatatgaggactttgagggcctcaacaccatccttggtttccacccctgactacctttaggtgatttaaacatctgcaccccatctccacacccactcctgggattcagacccaaatctttgcttttccaaagccaagtgtggaacactgtcttctagtttctgtcgaggtcactgacattcaaggtcgtgtggtagaggctgcatctgaaacacttccaatgtagaaaatcacaggactcagaaccccaggtgaggcagctgtggccatggtacccagggctaatgctatgttatggtaagatctgaagccccagggctatgacttgagattcttcgattgactccctggacacaggatagaggacacagatgggagaagagagggagatttaaatatatgtttgtgcacacattttatgagtacccaagaaaggggttgcacaatgtgtgattaactgtctctttgtggcttggtgtcacatgtaaacctcgtgttcactggcctcacaggagaccacaccatttggcaatctcgttactaccgatgtgtcatttcgtgaccttttgtaagctctccaagcatcttctcattataaattcctaagagagatataggagaaatgccaaatcacatggatatggtaaactttcatctcatctaataaatatgtcaccatatacttctacataatactgtgccatgttctctgtcaccatcaatgaaagacacacccatttttcttaaagatatatttatttaatgtatatgagtacaccgtagctgtcttcagacacacctgaagagggcatcagatcccattacagatggttgtgaaccacaatgtggttgctgggaattgaactcaggacctctggaagagcaatcagtgctcttaaccgctgagccatctctccagcacaacacatccaattttaaattcagctgtgcctggtctgtgtcattccctgtgaccttcagcccacagaagatggtaagccattgacggaaacaacctatgcaccttccgttccttgaggtgaacaggaactctttggtccccaccaaagagtggaatggaaaaagattaatgtggatcagttgttcccatcactgcgggagatgggtgtttctgccactgagagatctggtgtgggtggttttcatgggctgacccagtgtggtttccttcactcactggaatgatccagtgtggctgtttccattcctgatgggaccaagagtgggtggcttctgagcagcttgagggaagctgccaggagcacatgagaccttctgtttctcagttttcataacccaggaggaagcacatggtgtcctacacaggcaaaggcgtgccaactcactcctggaggagctttggcccggctctctggagagagagtgcaatgaggaacagtgctcctttgaggaggcccgggagatcttcaagagccctgagaggaccgtgagtgccccatctcgtgcctgctcttgtgtaacacactgagactggaaggaagtgagctggggattgtgagggtcacacctatgtctctggatctgtctccccctcactgcggaggctgccactcagtactcatagatggacaggaaccctgacacacacaggtttctctctcaaccatgccacaagcagttttacaagaaatacaactcataaactacactggctgtgtctcctattttcccagaggggaatcccttattccttacgggctgcccatgaagtaaacctgagagggaaaattcacctcaagaaggcaggacacacacacacacacacacacacacacacacacacacacacgcaggcctcactggaaacgtgtgaggaacaccaaggcttcctctgccacacttggccatgtgcacagatttgcctccactcctgagttactcttttttatgtttgtttgtttgtttgtggtttgttgtttttttttttttttgagacagggttttgctatgtagcccaggctgacctccaattcttcatcttcattgcctcccaattattggaattataagtatgtgctaccccgcctggccctgtggtttcattttgtaaaagatacatatttatacatcactgagcatgttcctgtctggttagacatctcactctggagggttttcccagcaagggtgtgtcaggataagacaaggctttaagacggggtccactgtgtttcattttgtcatcatctctggaaaaaatagtcagtcacagcttcaggggcggttgtgaggggctggttgttcgttctccaagggcttttcttctcaccagccttggctcatatcacacctcacactcacaggaggctcccctcacactcataggaggctcccctcacactcacaggaggatcacctcacacttacaggaagctcacctcacactcataggaggatcaccttgcactcacaggaagctcacctcacactcacaggaagctcacctcacactcgcagaacacctctctctctctcaaaagagacctcacattcgcagaagtcctcacacaggaatttcacatgtactggagaatttacacccacagaacacctcacagaggaaccctcattcccacaggatagctcacaaacccaaagaatgttccacacaggaaattacaccgcacacttctctcacaagtgccctcacactcactcagagcaactcacacagggagcctggagaagctgctttcctcactgactggagcaaccacctgacagaaataactggaggaaagacaggtttattctggttggtcgttcaggagtcagggaaggcgtgacagtcacagcgcatccagtcaggaggtagagagtaagggatgctggtgttgagctcactatctcctctttattcagaccagaactcccatgggatgacacctcccacatttagaggtccagcccagaactggagaaagcaggatcagggtcagaactctggtgcgctcacttgggaaaggcaattgtgtggcgacttaaatatctctagaaagggcgtagagaaacatcaacctcagataatccctcctcgtctccagaggaacgctatcttcccaagccccacacagatgcccaggtcaggagccccagccatagctcctgagctccctccgtggacactaagtgctacttctcatgaccgtgcctcacatggcttcttcttccctctcagaagcagttctggattgtttacagtggtgagtaggtgaaagccatctgtgcccctcccccacaccccttctttgcagcacactaatgtcagctcacccacagatggggaccagtgtgcctcgaatccatgtcagaacggaggtacctgccaggatcatctcaagtcttacgtctgcttctgcctcctagactttgagggtcggaactgtgagaaaagtgagaccaacttcttgcctccgtttgcaatggatggagtcgggagggaagggcctgggtgactggttccagagaataacagcctcatcgagtaaggagagggtgtccaggccagcctcggcccctgaaggaaattgatctgggagacattaagtatttcttttaaacccatggcctttgatttatgagtctaagattctgggtctcagactcgctgtctgtcccttttgactccttgccctgagaattctgctgaactggagagatttaggggagggagggtccatctctgtccccaccaggtaagtcagctaggtaaacttcttctcctctgctggtttaaaggtataaagtatttattcatctttgaaatatcaattattgttatgcttggagaccaccaaactgctctgggctcaacggttcactactggactccatagagttcactgacagcagagatacacatgagtattttattacaccaacgtttgccatggccagaagcaggctttctgttgttctcttctgtgagctcacatagacagctcagttcttctagaatgcatgtaaagtgctgtgcagtatcaccaatagaaagtcacttaaccccgggcctaggtgtgagagacctgtctccagcccctccggtcccaaatcccaccatcaatcaaacctttggttagccatctggtatggcccaaggccccagacaagtggcagtattccagttgggggatgcccacgaggtcacctcttcagacaggacaaaagtgtcctttctgcagaccaaggactccttattgcccaagtgggttcttcctggtatcagctgcctccggttctcatcagaaagaggccagagagagtaaagggggaaggggagaagggctcactaacagtcactgatccatggaggcctgtaaggtttggtgatcagtgactgtgaatgacaggacagtcctctatactaaaatgaactgaccaccctcgcctgcaaatggccagtgctggagccaagggcctagatggctcacatggtcatgagggttgccccaagagtaacttctccctttgacatgtccgtgggccagttccccattctattgagaacatttcctttccttggaaatgtttgcttaccacctccagaacccttcacatcttctcattagagccttggaaggaagatgtcatcacacaccagcctagcaccctccaagatttctcagacttgtgactcccaaatccagctctccatcccgccagatcagtccatagggcaggtgacgcaagctcagccttaatagcccacagctacatgccatattccaaggggacaagagcaaccaccaccatggcccgtctgccgaccttgcagagacctctcaggttgtcttctccttttctcaggcaagaatgagcagctgatctgtgcaaatgaaaatggtgactgtgaccagtactgcagggaccatgtagggaccaagcgtacctgtagctgtcatgaggactacacgctacagccagatgaggtgtcctgcaaaccaaaaggtaatagactgtggggactggagctgtcttaggctctgaagaggcagtcacctgtgtgggcctgtggcaagttatcagctccatgatgtgtaacaaggtcagacctctgcttatcaagtacctggtagatgctgactgacttgaggtgaaagggtagagacttgaaggacacctgacctgagagctgttagtctggaaccctgggccagcatcctgcactgcctcaagtatcctgaccattgaagccggccaggagtggatgaggaggtcctacaccaactcttatgtcccacttagagtctctgagacataatcgggagtcacataggcacacctggcatctgtatccactgctgcagttaacaacataagatgacctattattattattattattattattattattattatatgcatgtgggcagtattacagatgatgacagtcctgaagggatcagagaatgtcagctcccctgggcactgacgttacaggcagttgtgagctgcttgttgtgggtgctgggatccactcttgccccctgctctgaaaacatatctccacaagaagactattcgagctctgcttccgaaggcggaggcttccccggaagaggatggggctcagtctgtctcatgaagctggaaagttggaagcccacagctcagtgttctttcttacccgaagccttcgcagtgggtggcgcccgagtctgccttaaggaccctgtcttcctgtgctggtggcccatgcttacacagatcgtcactttcttcatagcgaaccagaacgacacgttctccctgtgaggctctggcagaccccagctctagaaagcaggtcctcagctgtccccacaccgttgtctgcctcctctcctagccgctgcacaaggccctccctgcccactctagaagtaagccccaagttcctctgtcctgaggcctctcactgcccccagcaggagccatggcagcagccaactgcttctcatcccacagtcaccttcgcctctgcaccctgctctctctgacttctgtttcatacagttgagtacccgtgtgggagaatacctgttgtagaaaaaagaaactccagcagccgccaaggccgcattgtgggaggcaacgtgtgccccaaaggggagtgtccatggcaggtaatgctctccgtccagggaaaacctctctctccagctccggctcccctgacattagggtttctactctggggtatggaagttttgagttgggttacatttatacagaagagacatgggccagcctccatccccctatcccctcccccacactcttgtccagagaaagggaaagaaagcaggtattggggcccatcccatgaaaacccatgccaggcccacagttgccttgcacaagtcacttgaagagctgtagttgcacctcatcatccatgcaccccacccttctgcacccctgttgtctaccagagccagcagatctagggctgctctaccctgctgggggaatccccaaagggatggtgggcaggaattgtgtcaagtcagctgcttccttgggggcaaggagaccataaaagtagcatggctctctttgtctgtgtgcccccgcccaggctgtgctgaaaatcaatgggttattgctgtgtggggccgtcctgctggacgccagatggatagtgaccgcagcccactgcttcgataatatccgctactggggaaacatcacagtggtgatgggtaggtatggcccatccctggcctctggcctgagggcattttcagattaagattggctcagaggctgagagccaatggcctgacaatgtctctaaccaggtgatatcttcaagagtggcactggagatgacccacttgtcctctgggcccccctcctgtcagagaataggaaactggggggctactctgtccaccttgccctactcagattgggtgtcaaggaccccattcactcctgcaggctctgcccattcacaaccttccctccagaactgcagtggaccctgggccaggcttctcctgagaccctggcaaggagtcaaatcctcagacaccagaggctgaactgaccacagccctatccacatactctaggttagagaagcaagacaaacaagagctctgtgtggggacatggccacacatggtaggatacgtgccatgagacatggtaggatatgtgccatgaggcatggtaggatatgtgccatgaggcatggtaggatatgtgccatgaggcatggtaggatatgtgccatgaggcatggtaggatatgtgccatgaggcatggtaggatacgtgccatgaggcatggtaggatatgtgccatgagtggcgtggtaggatatgtgccatgagtggcgtggtgtcctcccaggtgaacatgacttcagtgagaaggatggggatgagcaagtacgacgggtgacacaggtcatcatgcccgacaagtacatccgcggcaagatcaaccacgacattgccctgctccgccttcaccggcctgtgaccttcactgactacgtggtgcccctgtgtctgcctgaaaagtccttctccgagaacaccctagccagaatccgcttctcaagggtcagtggctggggccagctactggaccgtggtgccacagccctggaactcatgtccatcgaggtgccccggctgatgacccaggactgtctggagcacgccaagcacagctctaacacccccaaaatcacagagaacatgttctgcgctggctacatggatggtaccaaggacgcctgcaagggtgacagcggtggcccacatgccacgcactaccatggcacatggtatctgacaggtgtggtcagctggggggagggctgtgcagctattggtcacattggggtgtacaccagggtctcccagtacatagactggctggtcagacacatggactccaagctccaggttggggttttccgactcccactactgtagctccttggatagcccaacccgtcccaagaaggaagctacggcctgtgaagctgttctatggactttcctgctattcttgtgtaagggaagagaatgagataaagagagagtgaagaaagcagagggggaggtaaatgagagaggctgggaaaggggaaacagaaagcagggccgggggaagagtctaagttagagactcacaaagaaactcaagaggggctgggcagtgcagtcacagtcaggcagctgaggggcagggtgtccctgagggaggcgaggctcaggccttgctcccgtctccccgtagctgcctcctgtctgcatgcattcggtctgcagtactacacagtaggtatgcacatgagcacgtaggacacgtgaatgtgccgcatgcatgtgcgtgcctgtgtgtccatcattggcactgttgctcacttgtgcttcctgtgagcaccctgtcttggtttcaattaaatgagaaacatggtctccacgtgtagggtcatgcttccgggttgcctaagggagtgtttctgaagtacagtgtgcacccctgccatggactgtttccccctggcagggaccggctgatttcagcacaccttggggatacctgctgttaccctgggttgtccttaagtccctgagtggagcctctgatgtcaagtcacatacacatcggcggggctgctcttcctgggaaaaggaaggggaaggtggactagagtcaaagagtaagctgagagggcttgatcaagtgcgtcatggccttagtttccccaatcactagtaggtaggcaggcatccatctcacagagccaatctgagttgccaccaagggcccttgggaggccttactgagaatctagctccctgaagactgacgtgctcagtatgggttgtgcttattctccagtcagcatgtcctttctgggggtggggccatagagaggggaggcgacaaagggaggaccccctcaagccagctttagtgtttgtccctagtcccagaccacaggtctgctgtgagtacctcacagactcagtgtaggctcagtgacacagtacacgggcatcatcaggcagggcagcgatcaggcaccagactcctgccaacagccaccagagcaccgcgcacatttcccaagttctgttatgtctgccacagcctaggaaatgacagtgacttccctcctggtgagatgccagcatcagcctcaacatctgatgtcacgggtgtgtgtgtttgtcaggtacccacagcacgccaaggccctctcagcactggtaacagtgataagccaagtgtcatcaccgtactctctggctacgtgcatgcagccacagtcatgagccattgcctaaccaaactccagtacagtgagcatgagaagcctattgctgctcactaattagcaggcatggtgcgcatgctccgcagactcaaaaatagctctgccagatgaagctttgaaggaggaagggctcagcatgtagaaggtggagtcagggtgagcactgcctcctcacaggccaaagttagggagttttgttgttgttgctgctgggactgctcctgcagttctctagggacaccggagcatgggcctgtagccccaattacatgtacacacacactctcagaagagtcaaatggccacagcatgtgagaggagctgtttccacatctatagctctcagatggcttacccttccctggcctcctctttcaggaccaagggaaatggctactcccctgcagaaccgacccaaggtatgagccacatgctctgcagaagtgccatcggccatcaagcaccaagactccactcacacagtctccaccctccaggcctgcgggaaggctgggagtggcaggcctggtgggcagaacacacccccaaccctgatgattgccacatggccctgtggacttccctggatgtcacgtatgagagaagtgaccttgtgtcaagacaccaacagttcagggttcctgttccccaatagctcagcctgtttccgtgactacaatatatagccattgtccaagagacacataaacctcacacctacacctctgcccgcccggagtcagcagggcccagccagaagattgagggcttggattcaaatcccacatctgacctgacacccatgctttgcctcatgcctgtttcaacttctgttccttaaaacaaggaggggggactgacccctctaccagctgggtaagtgccagcagggctggggtgagcattggagaaccaggcaaccccccatcaaatgctattgttgctctctgcaggaagcaggccctgcctggcagttctggataagggtagcctcccctagaaaggctggggctggtcaccacagtccccagtcccctgacctcattgctggcccagggctccaatcagaaggctgagataagcagaaggcccatggccacctggggcccagggtgagtgaaccttgccccatgcctgtcacagccactgccgtccttgaccacaccatggggagcccggtgcaactcagcctgctctgtgttgtcctggccagcctcctgctccctgggaaaggtggtaagtactccagtccttcacggtgaagagcggcccggggagagggggtgagagtgggtgggagggtgggagggtgaaatgcttggttcgctgaccagcgacaggctggcttctaaaggtatacatagagccagctgcgagtacccatgcagagcacatggagatttgaatgaaaggaaacggagaaaggagaggaagggaatggagacaaagtgagagagaaaccatgataaggagagaggggagggcagagaaaatgacaccaagacaaagccaccccagacatagaagacacaggagccaaggccctgagcttggggagctcggctggaccagagactgcacaaggcaaagctgtacaggcagtgagcagctcccaggcctgttcccccctccccaaaaaggcttattttagctagcccagagcaggctctgctcgtgcagagctggccttgctccagtacaaggagaagcctcagcaacactgggcacctcgcatgtactggggccttaatgaggaaaacatctctgggaaacctgctaccactcagtcgatgggtcgatgtcagtaagccactggcaaggtcagccccacagagacagccacatgtttgagggcagcaacatgtgggaactggacaaaggcctccagtaacaaagcacacagccgacagtgagcagcaggaccctcccacccctcgagtcaggacagttggagtccttgctgggttccgtggacagtgttcaccatgttataacactttagttctgggctgccaaacttgattttattcaaatcagaacctatggctgctggtggcatggtgggtctgtgtgaccatctaaggagtgagcatagtgtcctagctaagccattcatggagactgaggttagtccgaagagcgagagctggaagcccagccggtcaccttctttccctgggtagggacctttaagcacctgctctttccaggcctaggaacagccttgggcagacaggccaaatgcctttgtagaagcacattctcactgaggcaaaagaagatgaccaggagataaatgacatcagagagtggctggtactgtgaccagcgtcaagacagggggaagggagggggcgtgaagctagtgaggatgctggccctcctgaagggtcatgcaatagagttatccatgcgtgcaactggataggcacaccagccactcttgcgtcccctggcatggacaacttaagggtttatgatttcagaggccttagactgtcatggcagagagggtgtgacaggatggagccgctcctgctgtggccaccaggcagcagaggaaagggaggccatctgggggacttctctttctcctcaagcttccaggctgtgtggcaatgctgcccacaccactcagggtgcagccttcccctcagttagttctctcaggaaacgccctcatgaacacacgcggacatgtctcagtctcccaggctgacaatggagattaaacatcacactgtggaagaatattccaggcaggggaaaaggcctgtgtgaagactgggtgagagggcctttcaccttccctgtcttctagtgtttattaaccgggaacgtgccaacaatgtcctggcgaggactcggagggcaaactcattttttgaagagttcaagaaaggaaatctggaaagagagtgtatggaagaaatttgttcttatgaagaggtccgtgaaatcttcgaggacgacgagaagacggtgagtcgggccaggtccaggctgggtcctctcagttacttattagctgaggctggaccatcccatcttctgggctgctacagggttccaggctggcccagagttggacctttacccacaaggctgggaaggatagtcagggaaagcaacctagaggtgagatgaccaggcatagcatcctggcttttgcctgtggggcattcattttcatctcttcagctctcctcctgagtaggaaaactgaggggaagagacatggcacatcatagaagggtaatgagaactcgcgagtgtggccaagttaacctgtgggagatgaatgcacaccattgccttcaccctcccactcctgtgggtaaagagctctgtgactaggaagagcatgccagccacgcagacacatgacaggaggcccacggcaccaccaatcaccacccatgagcagcaggggtgagcctgctccttttccctaggagaggaccttcaggtgcccaggagaaatctgagcctaaataaacaagaatgtgctaaagagaacagggtccccttcccccccaaaacaaaagggggccaagggagagcttaggaaggaacaggcagttgttggacccaagtggaagctgcaaggcccactggcaccatcgaaggtcactgagtcaggcctgcaccacttcatggccacaccactggctccacttaggaactcagtcacctgtagccaggatcgagtgaccaagaccaccaggggagtttaggctagtgtgacccctgaggggtgcaatcagagcagttgctttcagatagctgtgactaaaggcattaagtgttttagctttcactatcaaagggttctctcggtctgtgatctcttcatttcatgagcttaagcaggacactatagcagcagccagagggagcatgctctcctcagggcagacaggaagcaaaaggtgaaaacaggaaagcactgaatccaagatcctaaggacagtccccaccaggtcagctagacccctgggtgtgccccaactgaagtttgcagaagctcccaaaacgccaccacctggggaccaagtgttcagttatgaccctcagaaggacagttcatattcaaaccataagagaggccaagttatgaggcaaagctggctctaggagtagaaaaaaggattaatttatgctcgtcaaacaaccaacagccttaggagacttactgagttcaggaccctggaaacgtgggaaggaccaacgccgtcctctgcacaggcacctcggactcccgaagctctccatcctcgctttaccttcaaagatgttcaagtccaagccatttggacttaatcacaaacaatttcctcaggaaagagtcccccatgctccgtaaaatcatcccctggctcgtccgagacacccacccccctgccttgcatcacaggacacaacaaatgtgaggattgttctggaaccttgctgtagctaacgatgttgactacgcttaagaatatgaacaccgcttcgaggattcatccatttatcccatattcagggagaactggcttagtagagaagatttgaagaagtcttggaaatgaagctgacagaaaccaacctgttagggactggagaaaccggtacaattctttctgccatctatgtggtgcaatcttttatagccctccgcctctaaccacatccaggcccctcagcaagcttgtcagagaagtagggctggggatgatttcccagccccattctgatgtcacccacagacacggagtcttctagtcgcagaccactctaaggtggctctaatggggtagttggatttactggtcgagaaagaagcatgcagcacttaaactgagcagtcacagccttttgagactcaagccaaggccattcactgtggtgaggccatgccacacaagacaagagaaggagggaaatgtaccgatgagtgtcctggaaaccacacctctgcaagtcggtctagagagaaagccacaatccggtcatgtgaccagataccacctcacttcagcagatcatggtattcaagagaattcttatgttgctgtccaccacagtccatttcagccaccagaaaacagaaagggaatcaagatttctttttattcttcattgtggtggcacatgcctttcatcccagcactcaggaggtggaggcaggtggatcagtgtgaacttgagggcctggtccaagccagccaaggatacatagtacgggcctttctcaggaaagaaagaaggaaggaaggaaggaaggaaggaaggaaggaaggaaggaaggaaggaaggcaggaaggaaggaaggattcctttaattctttgctaccaaaccaatggtttatatctaatgagagaatccataattgcaggatttttattttaagcatctgtttaaagtatgtatatatattcatatatacataaatataaaactgttcagtagataaggaattgcctttttcaataagtggaattcatctcaatccctttgtcttgctataacaaaataccttaagctaggtaatttacaaacatcatgaaggttttactcatagttatggagagtgggaagtccgaggataagatgcctgcagtttgggtgtctgcttccagggggatctgtgttgctaactcctcatttggaagacagaggaaaggcacaaggaggaatgctgaaagcttcacaaggcttcagtcaccatggtgcagagctccatggacccaatcaccacataaaagccttaacccttatgtgaaaagaagaaaaagagaagaaaaagagaagaaaaagatagttatgccttcattatgtcaagacttagaaagttgggcagatacagctgaccctcatggtagctcctagagagtgtgcaagggggcaagaattatggggaggaatacatgttgtattcaggtaaactcatcttcctaggtgtggttcctaagccaggttcctgacctaccacgtcggattccgtgttaagaaaagagacaagagtatgtccccagcatagattccactctttataaatactaccactgagtttcagcctgtgtatggagggcagtacacggaggcggtactccaacacttgtgcatttatatcctaaaaaggcaaacctcacaccaaacagaccctgacacaaactgaatcagagatctgagggcaaaacaagaaaaacaaaggcaattagtagaaacatagatcatggaagataactcaaaagagaaaaattaatcaactggactttgtcaaatttctctgggaaagaaaaaaaaaacagttaagatgtgaatatgcaagctactcaccaagaaagtgtttgaaattcacatgcccaataaggggtccagaatctatagagaactcacaacccaagagaagtgaactcctaagaaattcaatgaacaaaagactcaaacagccacatcaccagagatgaaatacggtggcaagcccccaagaagatattccacaccactagctatctcaggaattcaagataaagccacagcgctcactgatagtgggtatcagtatacctgtggctggatgtactgatagaaggcagggctggaggctttggaaccaccagagggtccaaattcatgtactttgaaatagtgtgaatttctcagaaagccatataaagtggctcactgctgcaggaaaccagccctgagtacttaactgagaaagaaaaaacttattgtcaaatgaaataccttatgtcttgcataagatataaatgtttatagcagctccaattgtagttatcccaagctggaaacagcatgaaggtcgcccactgttgggtgaaggtaagcacagtacaagccagcaacaggaagatcaaaatggggtctacagttgcctggacgtgctctggaagcatgacgctgaaggaagagagtttcacaagcttgcttcacgtatgattttatttatcagacattctttaaaagctattgctttattgaagatcagtcagtttgtggtgggtaccagcacttagtaggttcaggggtaagcggagagctctgattgaaaggttgggtgaagatggggctgtgggtttccattgtatgggtggtcacacaagtctgtacatgtgctaaagttcagagaactgcacaccagaaatgggtttgaccgtgtgacatttaaattaggagaaaatatttgactttttttttttttgagataggtactaatgtagcccaggctggctttgaactcactatgaagctgaggaataaccttgaacttcagtcctcctgcctcaactctgaagtgctaggatcacaggcatgtgctttcatgtcaaagtttgtttaatttttggaaatgtagtctgcaccaagcagatctctatagatctctgtcttttcctttcacccctgagactgaatcaaggacctcccatgaactaggcaagggctctactccaggctgtatcgcccagtctagactgaaacttttttttttttttttttttggttttttgagacagggtttctctgtgtagccctggctgtcctggaactcactttgtacaccaggctagcctcgaactcggaaatccacctgcctctgcctcccaagtgctgggattaaaggcgtgggccaccaccaccgggtgaaacattttaataacagcacactcactgccatgactagcataacagggttctataaacaaggtggcttaaagtaacaaagtaacaaggatttgttcacttggcctttcggaggcagtgagtacaaagtcaggactgggccaggctgggatcttttgaagtaccagaagaagccaagctgtggtgcccaacattacccagaccttggctggctcccgtgacccttcctccactgttagctccggtgtcttttccttactttgaaatggacactctcattggttaagaacatataatcctggatgaccttacctgggtcttcaccctaatttgcatccattaagttccatttctagttaagatcatatctgaggtcccatctagatctgaatgggggctggtggggttgtgaaccaacagtgtgtactgtgacctgttaaacctaattagcaatccacacttttcccgcagatacctggtagccagtggtcttgttcttaattttgggcatgaggaatcctttaactgaacacaatactccagtggtatataattaatggatccattttgacttcttgctggttaccttgaaatgttgtttcaatattcagcaagagccatgtgttgaagcagattgtagatggaggtgttctggaacactcctcagggcaggttactggcaatggttacccttaatgtgaaatgtctgttttctctaatgtattgtaaaatattctttttttcttttagaaagaatactggaccaaatataaaggtgagacatcttctatttcaatcttaagtgagagagactccttaacatttaaatcaggaataatgattggcttttgaaatcagtttgaattacatttctgttcaaatcttgtttatctacacttttcccttatgggtttctatagtactataaataagtaatttatagtgcttttatattgagtccagttttattatttactaaaatacacatctttttaaatgggatcttgtcctgttgctgcaaaaccccaggttcaagtcaccctcatagcacagcccctggagtaactggggctgcagatttttttttctaccatgcctggcacagataaagatttatgtcagttcttcctcatctgaggatatcaacttccatgatattttcagtaagtacagcaagttagagcaaacggtggagatcggaatactggcctctctaaacagtggtcaccctgatgactgctcatagcatcagagatggtactactgatcatgaccacctggaagttattccaaaatggcaatcagacttgcccccgggtaagtgactaccaggagaggcagagcctgtgccagggctggatcatctttggattttcattccatacccagagggcttaagaaggttttccgtgttctctgatcagcaggcactggaaacaagtgtcacactggcctcttgtctttctcctttccagagaaggcaaagcatctcaccctagccacaaacacaccataatgcattccagcagaaatcagggacctagccagtgatgcaaggacaggggtatcacacagccacagccacccaagtgggaaataaacaaaatcaagatatgacgaattcctctcaaggagaagtgtgctcaggctctctgcaaagtgggtgcaggggtgtccgtgatgaggtctcaaccttagtttccaaatcctcccattgcagacggcgaccagtgtgaaagcagcccttgccagaaccaaggagcgtgtcgagatggcatcgggggttacacgtgcacctgctcggagggatttgaaggcaaaaactgtgagctctgtaagtccctctgcttggtgggccttcggatcatagagtagggaagagggaagacactgacgtgcctgccaggcaacttgagtcgtttgtagttctccaacacactgagcctcccgtgctgtcctctagctgctcgatggggtgccatgtgaaagctggcgctctgtgggccagagctgttaaagggcaccacgaggcaggtgacagtacagaggtagattcttcactctgctcgggtcaaatggtctcaggccacttgtcaccacaaacatcagtgaggagtgttctagattgcccagttttagacaagtgatgcacttaaccgattctacagggagactcactgagctattttttaccatggtaatagatttttaaattaattttagattactgtcagaccagttttcctttacaggatagagctgaatttcttttacctctttatttattgcttttttgagatggagtctcactctctgttcaaggctggtctagaacttactgtatagcccactccagatgtgaacccctgcctcggcctcccaagtactgggataacagatgtctgtcaccatgtccagggtttaatgacttcccttatagaatgagatctttatgtggatgccctcaggacctgccccagtaaagctgctgattatgactatgaagcattccccagagcctgacatctgcacacaacagaccaacaggtctagtgaggggcacaccagggagctaaaattccattaaggtagatgttacggcctaattgatttttcacccgagtctacacagaaggctgtaatgcagataacttctgtcttagttggggtttaactgctgtgaacagacaccatgcccaaggcaactcttataaggacagcatttaattggggctggcttataggttcagaggatcttgccattatcatcaaggcaggagcatggcagtgtccaggcaggcatggtgcaggaggagctgagaattctacatcttcatctgaaggctgctaaaggaagattgacctccaggcagctaggataagagtcttaaagcccacacccacagtgacacacctactccaataaggccatacctactccaacagggccacaccttctaatagtgccactctctggaccgagtgtatacaaatcatcacagccacagatgtggtttttagcatgagttggctcagcctgtgctggaagcaggtgggtgtctctgttccaagatgctgtggatggaggtatatggactcagtcagccttgagatagaatgggcaggtcagacgttaccaagaggatgctatgccacaatctcatgtaccccaagaccttcacttccaaaacttaatatatagagcggagggacgtaaatgaaccccccacacacacacacacacccctgctttcatatactctatacctggttcctggtttcctgacacatgcttcctatagaggactatttcttcaggatctcacaggaacccagacctaaaaacacagcatgctcacagcaggggccaggacaagaatcacattctgtttttattaggcaagggaagaaagaattgcaacgaggatgcaaccctccctctatgccaagggtggcgctttagaggagcagaatgtgtacagcc

(The sequence listing continues in the following parts.)

1. A single stranded oligonucleotide having a sequence 5′-X-Y-Z, wherein X is any nucleotide, Y is a nucleotide sequence of 6 nucleotides in length that is not a seed sequence of a human microRNA, and Z is a nucleotide sequence of 1-23 nucleotides in length, wherein the single stranded oligonucleotide is complementary with at least 8 consecutive nucleotides of a PRC2-associated region of a target gene listed in Table 4.

2. The single stranded oligonucleotide of claim 1, wherein the oligonucleotide does not comprise three or more consecutive guanosine nucleotides.

3. The single stranded oligonucleotide of claim 1, wherein the oligonucleotide does not comprise four or more consecutive guanosine nucleotides.

4. The single stranded oligonucleotide of claim 1, wherein the oligonucleotide is 8 to 30 nucleotides in length.

5. The single stranded oligonucleotide of claim 1, wherein the oligonucleotide is 8 to 10 nucleotides in length and all but 1, 2, or 3 of the nucleotides of the complementary sequence of the PRC2-associated region are cytosine or guanosine nucleotides.

6. The single stranded oligonucleotide of claim 1, wherein at least one nucleotide of the oligonucleotide is a nucleotide analogue.

7. The single stranded oligonucleotide of claim 6, wherein the at least one nucleotide analogue results in an increase in Tm of the oligonucleotide in a range of 1 to 5° C. compared with an oligonucleotide that does not have the at least one nucleotide analogue.

8. The single stranded oligonucleotide of claim 1, wherein at least one nucleotide of the oligonucleotide comprises a 2′ O-methyl.

9. The single stranded oligonucleotide of claim 1, wherein each nucleotide of the oligonucleotide comprises a 2′ O-methyl.

10. The single stranded oligonucleotide of claim 1, wherein the oligonucleotide comprises at least one ribonucleotide, at least one deoxyribonucleotide, or at least one bridged nucleotide.

11. The single strand oligonucleotide of claim 10, wherein the bridged nucleotide is a LNA nucleotide, a cEt nucleotide or a ENA modified nucleotide.

12. The single stranded oligonucleotide of claim 1, wherein each nucleotide of the oligonucleotide is a LNA nucleotide.

13. The single stranded oligonucleotide of claim 1, wherein the nucleotides of the oligonucleotide comprise alternating deoxyribonucleotides and 2′-fluoro-deoxyribonucleotides.

14. The single stranded oligonucleotide of claim 1, wherein the nucleotides of the oligonucleotide comprise alternating deoxyribonucleotides and 2′-O-methyl nucleotides.

15. The single stranded oligonucleotide of claim 1, wherein the nucleotides of the oligonucleotide comprise alternating deoxyribonucleotides and ENA nucleotide analogues.

16. The single stranded oligonucleotide of claim 1, wherein the nucleotides of the oligonucleotide comprise alternating deoxyribonucleotides and LNA nucleotides.

17. The single stranded oligonucleotide of claim 13, wherein the 5′ nucleotide of the oligonucleotide is a deoxyribonucleotide.

18. The single stranded oligonucleotide of claim 1, wherein the nucleotides of the oligonucleotide comprise alternating LNA nucleotides and 2′-O-methyl nucleotides.

19. The single stranded oligonucleotide of claim 18, wherein the 5′ nucleotide of the oligonucleotide is a LNA nucleotide.

20. The single stranded oligonucleotide of claim 1 wherein the nucleotides of the oligonucleotide comprise deoxyribonucleotides flanked by at least one LNA nucleotide on each of the 5′ and 3′ ends of the deoxyribonucleotides.

21. The single stranded oligonucleotide of claim 1, further comprising phosphorothioate internucleotide linkages between at least two nucleotides.

22. The single stranded oligonucleotide of claim 21, further comprising phosphorothioate internucleotide linkages between all nucleotides.

23. The single stranded oligonucleotide of claim 1, wherein the nucleotide at the 3′ position of the oligonucleotide has a 3′ hydroxyl group.

24. The single stranded oligonucleotide of claim 1, wherein the nucleotide at the 3′ position of the oligonucleotide has a 3′ thiophosphate.

25. The single stranded oligonucleotide of claim 1, further comprising a biotin moiety conjugated to the 5′ nucleotide.

26. A single stranded oligonucleotide comprising a region of complementarity that is complementary with at least 8 consecutive nucleotides of a PRC2-associated region of a target gene listed in Table 4, wherein the oligonucleotide has at least one of:
a) a sequence that is 5′X-Y-Z, wherein X is any nucleotide and wherein X is anchored at the 5′ end of the oligonucleotide, Y is a nucleotide sequence of 6 nucleotides in length that is not a human seed sequence of a microRNA, and Z is a nucleotide sequence of 1 to 23 nucleotides in length;
b) a sequence that does not comprise three or more consecutive guanosine nucleotides;
c) a sequence that has less than a threshold level of sequence identity with every sequence of nucleotides, of equivalent length to the second nucleotide sequence, that are between 50 kilobases upstream of a 5′-end of an off-target gene and 50 kilobases downstream of a 3′-end of the off-target gene;
d) a sequence that is complementary to a PRC2-associated region that encodes an RNA that forms a secondary structure comprising at least two single stranded loops; and/or
e) a sequence that has greater than 60% G-C content.

27. The single stranded oligonucleotide of claim 26, wherein the oligonucleotide has the sequence 5′X-Y-Z and wherein the oligonucleotide is 8-50 nucleotides in length.

28. A composition comprising a single stranded oligonucleotide of claim 1 and a carrier.

29. A composition comprising a single stranded oligonucleotide of claim 1 in a buffered solution.

30. A composition of claim 28, wherein the oligonucleotide is conjugated to the carrier.

31. The composition of claim 30, wherein the carrier is a peptide.

32. The composition of claim 30, wherein the carrier is a steroid.

33. A pharmaceutical composition comprising a composition of claim 28 and a pharmaceutically acceptable carrier.

34. A kit comprising a container housing the composition of claim 28.

35. A method of increasing expression of a target gene in a cell, the method comprising delivering the single stranded oligonucleotide of claim 1 into the cell.

36. The method of claim 35, wherein delivery of the single stranded oligonucleotide into the cell results in a level of expression of a target gene that is at least 50% greater than a level of expression of the target gene in a control cell that does not comprise the single stranded oligonucleotide.

37. A method increasing levels of a target gene in a subject, the method comprising administering the single stranded oligonucleotide of claim 1 to the subject.

38. A method of treating a condition associated with decreased levels of a target gene in a subject, the method comprising administering the single stranded oligonucleotide of claim 1 to the subject.

39. The method of claim 38, wherein the target gene is listed in Table 4.

40. The method of claim 39, wherein the condition is listed in Table 4 or otherwise disclosed herein.
